United States Patent Application Publication US 2007/0099251 A1 - sequence listing, part 6

SEQ ID NO: 13068 - DNA, 5164 bp, Homo sapiens
ccaagatggtggcgctgggctcggggtgactacaggagacgacggggccttttcccttcgccaggacccgacacaccaggcttcgctcgctcgcgcacccctccgccgcgtagccatccgccagcgcgggcgcccgccatccgccgcctacttacgcttcacctctgccgacccggcgcgctcggctgcgggcggcggcgcctccttcggctcctcctcggaatagctcgcggcctgtagcccctggcaggagggcccctcagccccccggtgtggacaggcagcggcggctggcgacgaacgccgggatttcggcggccccggcgctccctttcccggcctcgttttccggataaggaagcgcgggtcccgcatgagccccggcggtggcggcagcgaaagagaacgaggcggtggcgggcggaggcggcgggcgagggcgactacgaccagtgaggcggccgccgcagcccaggcgcgggggcgacgacaggttaaaaatctgtaagagcctgattttagaattcaccagctcctcagaagtttggcgaaatatgagttattaagcctacgctcagatcaaggtagcagctagactggtgtgacaacctgtttttaatcagtgactcaaagctgtgatcaccctgatgtcaccgaatggccacagcttgtaaaagatcaggagaacctcagtctgacgacattgaagctagccgaatgaagcgagcagctgcaaagcatctaatagaacgctactaccaccagttaactgagggctgtggaaatgaagcctgcacgaatgagttttgtgcttcctgtccaacttttcttcgtatggataataatgcagcagctattaaagccctcgagctttataagattaatgcaaaactctgtgatcctcatccctccaagaaaggagcaagctcagcttaccttgagaactcgaaaggtgcccccaacaactcctgctctgagataaaaatgaacaagaaaggcgctagaattgattttaaagatgtgacttacttaacagaagagaaggtatatgaaattcttgaattatgtagagaaagagaggattattcccctttaatccgtgttattggaagagttttttctagtgctgaggcattggtacagagcttccggaaagttaaacaacacaccaaggaagaactgaaatctcttcaagcaaaagatgaagacaaagatgaagatgaaaaggaaaaagctgcatgttctgctgctgctatggaagaagactcagaagcatcttcctcaaggataggtgatagctcacagggagacaacaatttgcaaaaattaggccctgatgatgtgtctgtggatattgatgccattagaagggtctacaccagattgctctctaatgaaaaaattgaaactgcctttctcaatgcacttgtatatttgtcacctaacgtggaatgtgacttgacgtatcacaatgtatactctcgagatcctaattatctgaatttgttcattatcgtaatggagaatagaaatctccacagtcctgaatatctggaaatggctttgccattattttgcaaagcgatgagcaagctaccccttgcagcccaaggaaaactgatcagactgtggtctaaatacaatgcagaccagattcggagaatgatggagacatttcagcaacttattacttataaagtcataagcaatgaatttaacagtcgaaatctagtgaatgatgatgatgccattgttgctgcttcgaagtgcttgaaaatggtttactatgcaaatgtagtgggaggggaagtggacacaaatcacaatgaagaagatgatgaagagcccatccctgagtccagcgagctgacacttcaggaacttttgggagaagaaagaagaaacaagaaaggtcctcgagtggaccccctggaaactgaacttggtgttaaaaccctggattgtcgaaaaccacttatcccttttgaagagtttattaatgaaccactgaatgaggttctagaaatggataaagattatacttttttcaaagtagaaacagagaacaaattctcttttatgacatgtccctttatattgaatgctgtcacaaagaatttgggattatattatgacaatagaattcgcatgtacagtgaacgaagaatcactgttctctacagcttagttcaaggacagcagttgaatccatatttgagactcaaagttagacgtgaccatatcatagatgatgcacttgtccggctagagatgatcgctatggaaaatcctgcagacttgaagaagcagttgtatgtggaatttgaaggagaacaaggagttgatgagggaggtgtttccaaagaattttttcagctggttgtggaggaaatcttcaatccagatattggtatgttcacatacgatgaatctacaaaattgttttggtttaatccatcttcttttgaaactgagggtcagtttactctgattggcatagtactgggtctggctatttacaataactgtatactggatgtacattttcccatggttgtctacaggaagctaatggggaaaaaaggaacttttcgtgacttgggagactctcacccagttctatatcagagtttaaaagatttattggagtatgaagggaatgtggaagatgacatgatgatcactttccagatatcacagacagatctttttggtaacccaatgatgtatgatctaaaggaaaatggtgataaaattccaattacaaatgaaaacaggaaggaatttgtcaatctttattctgactacattctcaataaatcagtagaaaaacagttcaaggcttttcggagaggttttcatatggtgaccaatgaatctcccttaaagtacttattcagaccagaagaaattgaattgcttatatgtggaagccggaatctagatttccaagcactagaagaaactacagaatatgacggtggctataccagggactctgttctgattagggagttctgggaaatcgttcattcatttacagatgaacagaaaagactcttcttgcagtttacaacgggcacagacagagcacctgtgggaggactaggaaaattaaagatgattatagccaaaaatggcccagacacagaaaggttacctacatctcatacttgctttaatgtgcttttacttccggaatactcaagcaaagaaaaacttaaagagagattgttgaaggccatcacgtatgccaaaggatttggcatgctgtaaaacaaaacaaaacaaaataaaacaaaaaaaaggaaggaaaaaaaaagaaaaaatttaaaaaattttaaaaatataacgagggataaatttttggtggtgatagtgtcccagtacaaaaaggctgtaagatagtcaaccacagtagtcacctatgtctgtgcctcccttctttattggggacatgtgggctggaacagcagatttcagctacatatatgaacaaatcctttattattattataattatttttttgcgtgaaagtgttacatattctttcacttgtatgtacagagaggtttttctgaatatttattttaagggttaaatcacttttgcttgtgtttattactgcttgaggttgagccttttgagtatttaaaaaatatataccaacagaactactctcccaaggaaaatattgccaccatttgtagaccacgtaaccttcaagtatgtgctacttttttgtccctgtatctaactcaaatcaggaactgtattttttttaatgatttgcttttgaaacttgaagtcttgaaaacagtgtgatgcaattactgctgttctagcccccaaagagttttctgtgcaaaatcttgagaatcaatcaataaagaaagatggaaggaagggagaaattggaatgttttaactgcagccctcagaactttagtaacagcacaacaaattaaaaacaaaaacaactcatgccacagtatgtcgtcttcatgtgtcttgcaatgaactgtttcagtagccaatcctctttcttagtatatgaaaggacagggatttttgttcttgttgttctcgttgttgttttaagtttactggggaaagtgcatttggccaaatgaaatggtagtcaagcctattgcaacaaagttaggaagtttgttgtttgtttattataaacaaaaagcatgtgaaagtgcacttaagatagagtttttattaattacttacttattacctagattttaaatagacaatccaaagtctccccttcgtgttgccatcatcttgttgaatcagccattttatcgaggcacgtgatcagtgttgcaacataatgaaaaagatggctactgtgccttgtgttacttaatcatacagtaagctgacctggaaatgaatgaaactattactcctaagaattacattgtatagccccacagattaaatttaattaattaattcaaaacatgttaaacgttactttcatgtactatggaaaagtacaagtaggtttacattactgatttccagaagtaagtagtttcccctttcctagtcttctgtgtatgtgatgttgttaatttcttttattgcattataaaataaaaggattatgtatttttaactaaggtgagacattgatatatccttttgctacaagctatagctaatgtgctgagcttgtgccttggtgattgattgattgattgactgattgttttaactgattactgtagatcaacctgatgatttgtttgtttgaaattggcaggaaaaatgcagctttcaaatcattggggggagaaaaaggatgtctttcaggattattttaattaatttttttcataattgagacagaactgtttgttatgtaccataatgctaaataaaactgtggcacttttcaccataatttaatttagtggaaaaagaagacaatgctttccatattgtgataaggtaacatggggtttttctgggccagcctttagaacactgttagggtacatacgctaccttgatgaaagggaccttcgtgcaactgtagtcatcttaaaggcttctcatccactgtgcttcttaatgtgtaattaaagtgaggagaaattaaatactctgagggcgttttatataataaattcgtgaaga

SEQ ID NO: 13069 - DNA, 4491 bp, Homo sapiens
acagatcaggagaacctcagtctgacgacattgaagctagccgaatgaagcgagcagctgcaaagcatctaatagaacgctactaccaccagttaactgagggctgtggaaatgaagcctgcacgaatgagttttgtgcttcctgtccaacttttcttcgtatggataataatgcagcagctattaaagccctcgagctttataagattaatgcaaaactctgtgatcctcatccctccaagaaaggagcaagctcagcttaccttgagaactcgaaaggtgcccccaacaactcctgctctgagataaaaatgaacaagaaaggcgctagaattgattttaaagatgtgacttacttaacagaagagaaggtatatgaaattcttgaattatgtagagaaagagaggattattcccctttaatccgtgttattggaagagttttttctagtgctgaggcattggtacagagcttccggaaagttaaacaacacaccaaggaagaactgaaatctcttcaagcaaaagatgaagacaaagatgaagatgaaaaggaaaaagctgcatgttctgctgctgctatggaagaagactcagaagcatcttcctcaaggataggtgatagctcacagggagacaacaatttgcaaaaattaggccctgatgatgtgtctgtggatattgatgccattagaagggtctacaccagattgctctctaatgaaaaaattgaaactgcctttctcaatgcacttgtatatttgtcacctaacgtggaatgtgacttgacgtatcacaatgtatactctcgagatcctaattatctgaatttgttcattatcgtaatggagaatagaaatctccacagtcctgaatatctggaaatggctttgccattattttgcaaagcgatgagcaagctaccccttgcagcccaaggaaaactgatcagactgtggtctaaatacaatgcagaccagattcggagaatgatggagacatttcagcaacttattacttataaagtcataagcaatgaatttaacagtcgaaatctagtgaatgatgatgatgccattgttgctgcttcgaagtgcttgaaaatggtttactatgcaaatgtagtgggaggggaagtggacacaaatcacaatgaagaagatgatgaagagcccatccctgagtccagcgagctgacacttcaggaacttttgggagaagaaagaagaaacaagaaaggtcctcgagtggaccccctggaaactgaacttggtgttaaaaccctggattgtcgaaaaccacttatcccttttgaagagtttattaatgaaccactgaatgaggttctagaaatggataaagattatacttttttcaaagtagaaacagagaacaaattctcttttatgacatgtccctttatattgaatgctgtcacaaagaatttgggattatattatgacaatagaattcgcatgtacagtgaacgaagaatcactgttctctacagcttagttcaaggacagcagttgaatccatatttgagactcaaagttagacgtgaccatatcatagatgatgcacttgtccggctagagatgatcgctatggaaaatcctgcagacttgaagaagcagttgtatgtggaatttgaaggagaacaaggagttgatgagggaggtgtttccaaagaattttttcagctggttgtggaggaaatcttcaatccagatattggtatgttcacatacgatgaatctacaaaattgttttggtttaatccatcttcttttgaaactgagggtcagtttactctgattggcatagtactgggtctggctatttacaataactgtatactggatgtacattttcccatggttgtctacaggaagctaatggggaaaaaaggaacttttcgtgacttgggagactctcacccagttctatatcagagtttaaaagatttattggagtatgaagggaatgtggaagatgacatgatgatcactttccagatatcacagacagatctttttggtaacccaatgatgtatgatctaaaggaaaatggtgataaaattccaattacaaatgaaaacaggaaggaatttgtcaatctttattctgactacattctcaataaatcagtagaaaaacagttcaaggcttttcggagaggttttcatatggtgaccaatgaatctcccttaaagtacttattcagaccagaagaaattgaattgcttatatgtggaagccggaatctagatttccaagcactagaagaaactacagaatatgacggtggctataccagggactctgttctgattagggagttctgggaaatcgttcattcatttacagatgaacagaaaagactcttcttgcagtttacaacgggcacagacagagcacctgtgggaggactaggaaaattaaagatgattatagccaaaaatggcccagacacagaaaggttacctacatctcatacttgctttaatgtgcttttacttccggaatactcaagcaaagaaaaacttaaagagagattgttgaaggccatcacgtatgccaaaggatttggcatgctgtaaaacaaaacaaaacaaaataaaacaaaaaaaaggaaggaaaaaaaaagaaaaaatttaaaaaattttaaaaatataacgagggataaatttttggtggtgatagtgtcccagtacaaaaaggctgtaagatagtcaaccacagtagtcacctatgtctgtgcctcccttctttattggggacatgtgggctggaacagcagatttcagctacatatatgaacaaatcctttattattattataattatttttttgcgtgaaagtgttacatattctttcacttgtatgtacagagaggtttttctgaatatttattttaagggttaaatcacttttgcttgtgtttattactgcttgaggttgagccttttgagtatttaaaaaatatataccaacagaactactctcccaaggaaaatattgccaccatttgtagaccacgtaaccttcaagtatgtgctacttttttgtccctgtatctaactcaaatcaggaactgtattttttttaatgatttgcttttgaaacttgaagtcttgaaaacagtgtgatgcaattactgctgttctagcccccaaagagttttctgtgcaaaatcttgagaatcaatcaataaagaaagatggaaggaagggagaaattggaatgttttaactgcagccctcagaactttagtaacagcacaacaaattaaaaacaaaaacaactcatgccacagtatgtcgtcttcatgtgtcttgcaatgaactgtttcagtagccaatcctctttcttagtatatgaaaggacagggatttttgttcttgttgttctcgttgttgttttaagtttactggggaaagtgcatttggccaaatgaaatggtagtcaagcctattgcaacaaagttaggaagtttgttgtttgtttattataaacaaaaagcatgtgaaagtgcacttaagatagagtttttattaattacttacttattacctagattttaaatagacaatccaaagtctccccttcgtgttgccatcatcttgttgaatcagccattttatcgaggcacgtgatcagtgttgcaacataatgaaaaagatggctactgtgccttgtgttacttaatcatacagtaagctgacctggaaatgaatgaaactattactcctaagaattacattgtatagccccacagattaaatttaattaattaattcaaaacatgttaaacgttactttcatgtactatggaaaagtacaagtaggtttacattactgatttccagaagtaagtagtttcccctttcctagtcttctgtgtatgtgatgttgttaatttcttttattgcattataaaataaaaggattatgtatttttaactaaggtgagacattgatatatccttttgctacaagctatagctaatgtgctgagcttgtgccttggtgattgattgattgattgactgattgttttaactgattactgtagatcaacctgatgatttgtttgtttgaaattggcaggaaaaatgcagctttcaaatcattggggggagaaaaaggatgtctttcaggattattttaattaatttttttcataattgagacagaactgtttgttatgtaccataatgctaaataaaactgtggcacttttcaccataatttaatttagtggaaaaagaagacaatgctttccatattgtgataaggtaacatggggtttttctgggccagcctttagaacactgttagggtacatacgctaccttgatgaaagggaccttcgtgcaactgtagtcatcttaaaggcttctcatccactgtgcttcttaatgtgtaattaaagtgaggagaaattaaatactctgagggcgttttatataataaattcgtgaaga

SEQ ID NO: 13070 - DNA, 2305 bp, Homo sapiens
ggcaacaggcagatttgcctgctgagggtggagacccacgagccgaggcctcctgcagtgttctgcacagcaaaccgcacgctatggctgacagccgggatcccgccagcgaccagatgcagcactggaaggagcagcgggccgcgcagaaagctgatgtcctgaccactggagctggtaacccagtaggagacaaacttaatgttattacagtagggccccgtgggccccttcttgttcaggatgtggttttcactgatgaaatggctcattttgaccgagagagaattcctgagagagttgtgcatgctaaaggagcaggggcctttggctactttgaggtcacacatgacattaccaaatactccaaggcaaaggtatttgagcatattggaaagaagactcccatcgcagttcggttctccactgttgctggagaatcgggttcagctgacacagttcgggaccctcgtgggtttgcagtgaaattttacacagaagatggtaactgggatctcgttggaaataacacccccattttcttcatcagggatcccatattgtttccatcttttatccacagccaaaagagaaatcctcagacacatctgaaggatccggacatggtctgggacttctggagcctacgtcctgagtctctgcatcaggtttctttcttgttcagtgatcgggggattccagatggacatcgccacatgaatggatatggatcacatactttcaagctggttaatgcaaatggggaggcagtttattgcaaattccattataagactgaccagggcatcaaaaacctttctgttgaagatgcggcgagactttcccaggaagatcctgactatggcatccgggatctttttaacgccattgccacaggaaagtacccctcctggactttttacatccaggtcatgacatttaatcaggcagaaacttttccatttaatccattcgatctcaccaaggtttggcctcacaaggactaccctctcatcccagttggtaaactggtcttaaaccggaatccagttaattactttgctgaggttgaacagatagccttcgacccaagcaacatgccacctggcattgaggccagtcctgacaaaatgcttcagggccgcctttttgcctatcctgacactcaccgccatcgcctgggacccaattatcttcatatacctgtgaactgtccctaccgtgctcgagtggccaactaccagcgtgacggcccgatgtgcatgcaggacaatcagggtggtgctccaaattactaccccaacagctttggtgctccggaacaacagccttctgccctggagcacagcatccaatattctggagaagtgcggagattcaacactgccaatgatgataacgttactcaggtgcgggcattctatgtgaacgtgctgaatgaggaacagaggaaacgtctgtgtgagaacattgccggccacctgaaggatgcacaaattttcatccagaagaaagcggtcaagaacttcactgaggtccaccctgactacgggagccacatccaggctcttctggacaagtacaatgctgagaagcctaagaatgcgattcacacctttgtgcagtccggatctcacttggcggcaagggagaaggcaaatctgtgaggccggggccctgcacctgtgcagcgaagcttagcgttcatccgtgtaacccgctcatcactggatgaagattctcctgtgctagatgtgcaaatgcaagctagtggcttcaaaatagagaatcccactttctatagcagattgtgtaacaattttaatgctatttccccaggggaaaatgaaggttaggatttaacagtcatttaaaaaaaaaatttgttttgacggatgattggattattcatttaaaatgattagaaggcaagtttctagctagaaatatgattttatttgacaaaatttgttgaaattatgtatgtttacatatcacctcatggcctattatattaaaatatggctataaatatataaaaagaaaagataaagatgatctactcagaaatttttatttttctaaggttctcataggaaaagtacatttaatacagcagtgtcatcagaagataacttgagcaccgtcatggcttaatgtttattcctgataataattgatcaaattcatttttttcactggagttacattaatgttaattcagcactgatttcacaacagatcaatttgtaattgcttacatttttacaataaataatctgtacgtaagaacaaaaaaaaaaaa

SEQ ID NO: 13071 - DNA, 2916 bp, Homo sapiens
atgattattcatcctcagatgagagtttatccgtcagccacttcagtttctctaaacagagccacagaccaagaactataagagacagaactagtttttcttcaaaattgcctagccataataagaaaaatagcacttttattccaagaaaaccaatgaaatgttcaaatgagaaagttgttaatcaagagcagtcgtatgaatcaatggataaatttttagatggcgttcaggaagtggcttatattcactcaaaccagaatgtaattggatcgagcaaagctgaaaatcacatgagccgatgggcagcacatgacgtatttgagttgaagcagttttctcagctgcctgctaacatagctgtttgcagttctaagacatataaagaaaaagtggatgcagatacattgccacacacaaagaaaggccagcaaccgagtgaaggcagcatttcacttcctctttacatttcaaatcctgtaaaccagaagaagaaaaaagtctaccatacaaaccagaccaccttcataattggagaaacaccaaaaggaatccgcagaaaacaatttgaagaaatggcctcttattttaactcgtcttctgtaaacgaatttgctaaacatataaccaatgccacatcagaagaacgacagaaaatgctaagagacttttatgcttctcaatatccagaggtaaaagaattttttgtggattctgtgtcacaattcaacaattcttcctttgagaaaggagagcagcgcacccggaagaaatctgataaaagagaatctcttataaaaccaaggctgtcagattctgaaaccttgtcatttaaagattctaccaacaaaatttctcaagtttgcagcctaaaaacatataaaagaaaatcagttaagtttcagaatcatatttcctatagagaagaggtgttttttaatgatgcagaaactaagaaatcacctgttagttctactcaagagattgacagtgggaaaaacagccaggcatccgaagatactgtgacatcccgttctctgaacagtgagtctgaaacacgtgagagaaggttagaaaataccatgaaagaccaacaggacctcacaagaacgggcatttcaagaaaagaaccccttctcaaattggaaaacaaaaagatagaaaatccagtgctggaaaatacttctgtgataagcttacttggtgatacctctattcttgatgacctttttaaaagtcatgggaacagtcccacacaactgccaaagaaagttctttcagggcccatggaaaaagcaaaacagagaccaaaagatttctgggacatcttgaatgagcagaatgatgagagtcttagtaaactcacagacttggcagtaatagagactctgtgtgaaaaagcacctctagcagcaccctttaaaaggagagaagagccagcaacttctctttggaaatcaaatgagaaatttttatggaagaaatttagcccaagtgatacagatgaaaacgcaaccaatacacagagtaccacataagcatataaatgaattactgcaccagtaaactgctgccatcactgtttacggcactggattccacactgattctattatcttgaacacagttgttgacatatatttttattaaattattgctttaggattttttgaagtctaaagtattgtcatggatctgtttttcttgatatttgatttgatctttcaagaatatgattgtatttatagtataaacctctgttatgaattagaaaagattctaggtttgttaataggagacctgggacatctttcttactatattacataatgatgtgacacttgccccggtgagcattgtttcccagtatgaaagatgaagagtctgtaccgaatcagcatgagtgtccttccagtttaaaaaagctttgcttcgctctcctaatggctcataggctgaatcatgtctgcccctcaaatcaggtgtataccaatgtgttttttactagcacttgggaaagttattaagtattttctttttccctgggcatcatgttctattattattttagaaaaaagtcataattggtactgaatatatggtatatataatattaaaatggtaattttgcaacagctcaaaattaaaaggttaatgttatacactttactatatgagctgtgattactaccattagccacagataccagtgcctcaactttttatgtacctattgtgatttaatgtaaataaaggtttgtatagtacttttgtagttcttaagtatgaagaaatgggtaaactttttattttgttagaaactgttatattttgagtgtaatatttatggtttatagcaaaatgaatgtgcttattgttgaatgcatgtatttagaagcctttactcagcccctgtgttctgtgctaggagcttgagctctacaggtaaggcagagctaccggtgaatgaaaggaaatcatgtcagtgaaaaatcatggtggaaagcccctggcatcacatgtgcatgctgtaggcaggacctgagctgcctccgctgcaggttcagatgcaccgctgcagctgtccttcagttagttcacagggctgcaagaggaggacacatccctccagaaaacagcctgagccgggaactggctgtgctaaagagcactgctatcaagttgaggagagagggcttccgtgtactcaggatgtagagtcattgctcagaagtgaacaaaaaatcaaaaacaaaagtcttctcaagggactgatcggccaagtatgcttttctttagagcaatgttttgccctagagaattgtaaaatttatgtcatgactcagtacatatgtgttcgtacatatatgattggaataaaatgtttatgaaatatttactcataaaaaaaaaaaa

SEQ ID NO: 13072 - DNA, 1593 bp, Homo sapiens
gcggtgcccttgcggcgcagctggggtcgcggccctgctccccgcgctttcttaaggcccgcgggcggcgcaggagcggcactcgtggctgtggtggcttcggcagcggcttcagcagatcggcggcatcagcggtagcaccagcactagcagcatgttgagccgggcagtgtgcggcaccagcaggcagctggctccggttttggggtatctgggctccaggcagaagcacagcctccccgacctgccctacgactacggcgccctggaacctcacatcaacgcgcagatcatgcagctgcaccacagcaagcaccacgcggcctacgtgaacaacctgaacgtcaccgaggagaagtaccaggaggcgttggccaagggagatgttacagcccagatagctcttcagcctgcactgaagttcaatggtggtggtcatatcaatcatagcattttctggacaaacctcagccctaacggtggtggagaacccaaaggggagttgctggaagccatcaaacgtgactttggttcctttgacaagtttaaggagaagctgacggctgcatctgttggtgtccaaggctcaggttggggttggcttggtttcaataaggaacggggacacttacaaattgctgcttgtccaaatcaggatccactgcaaggaacaacaggccttattccactgctggggattgatgtgtgggagcacgcttactaccttcagtataaaaatgtcaggcctgattatctaaaagctatttggaatgtaatcaactgggagaatgtaactgaaagatacatggcttgcaaaaagtaaaccacgatcgttatgctgagtatgttaagctctttatgactgtttttgtagtggtatagagtactgcagaatacagtaagctgctctattgtagcatttcttgatgttgcttagtcacttatttcataaacaacttaatgttctgaataatttcttactaaacattttgttattgggcaagtgattgaaaatagtaaatgctttgtgtgattgaatctgattggacattttcttcagagagctaaattacaattgtcatttataaaaccatcaaaaatattccatccatatactttggggacttgtagggatgcctttctagtcctattctattgcagttatagaaaatctagtcttttgccccagttacttaaaaataaaatattaacactttcccaagggaaacactcggctttctatagaaaattgcactttttgtcgagtaatcctctgcagtgatacttctggtagatgtcacccagtggtttttgttaggtcaaatgttcctgtatagtttttgcaaatagagctgtatactgtttaaatgtagcaggtgaactgaactggggtttgctcacctgcacagtaaaggcaaacttcaacagcaaaactgcaaaaaggtggtttttgcagtaggagaaaggaggatgtttatttgcagggcgccaagcaaggagaattgggcagctcatgcttgagacccaatctccatgatgacctacaagctagagtatttaaaggcagtggtaaatttcaggaaagcagaagtt

SEQ ID NO: 13073 - DNA, 2646 bp, Homo sapiens
atctagcgcccccgtcaggacgtgcgaaaagcgacggcgcagcacggtgcggcgcagctcctgctcgcctttcccttcgctgggcgagaggtgtctatggggcacccgctgccgccgccgctaccgccaccgccaccgccaccgccgccgagtgctgtctctatggcgaggaggaggaggaggagcgcgagctcagcgacacaagtacataaataaaggataaaatattttatgaaacaaatcttcaatcaagtataacattttgatgcttggcatctagactcccttgtgccctcactatgccagcggcaactgtagatcatagccaaagaatttgtgaagtttgggcttgcaacttggatgaagagatgaagaaaattcgtcaagttatccgaaaatataattacgttgctatggacaccgagtttccaggtgtggttgcaagacccattggagaattcaggagcaatgctgactatcaataccaactattgcggtgtaatgtagacttgttaaagataattcagctaggactgacatttatgaatgagcaaggagaataccctccaggaacttcaacttggcagtttaattttaaatttaatttgacggaggacatgtatgcccaggactctatagagctactaacaacatctggtatccagtttaaaaaacatgaggaggaaggaattgaaacccagtactttgcagaacttcttatgacttctggagtggtcctctgtgaaggggtcaaatggttgtcatttcatagcggttacgactttggctacttaatcaaaatcctaaccaactctaacttgcctgaagaagaacttgacttctttgagatccttcgattgttttttcctgtcatttatgatgtgaagtacctcatgaagagctgcaaaaatctcaaaggtggattacaggaggtggcagaacagttagagctggaacggataggaccacaacatcaggcaggatctgattcattgctcacaggaatggcctttttcaaaatgagagaaatgttctttgaagatcatattgatgatgccaaatattgtggtcatttgtatggccttggttctggttcatcctatgtacagaatggcacagggaatgcatatgaagaggaagccaacaagcagtcatgacatgaaatagtccttttatttttatttcgagctacacacatgcttgtatataggttttatctctggttgaatccctcgaacaatagacagtacctttcccccccctttcatggcccattttattgtctgcctttcagtactaagtatgaccgttcctatctcagatcttaataaaaagaaaaaaaaaaacgcattcaggttaaatttggccttaatttaatatacttgttagcaagcgtgtgtgacagagagtggggaaagctacatcattgaatattttgataaactttaccgacttgagtttggtttatttttcccttttcctaaattaactagcactgactgtaatttatttccctgtttcacgtctctcccttccattctgcaggagttttagctatttgagatcgtggaccatcagttttgcactttagagagtgtttctgactctaaacctgttttatcagaaaatttgttttttcttgatcttagctggaaaaatctgccaactttacacagtatttacttggttttgacccacagaatatagcacgttgtgcaaactgtcgattcagcgaaacttaaaaaagacaagaaactactgaggagcttagtaactgctgtttctgtacgtagtgtttaatcttccaagcacatctagtgtctgtcagtttctaattggcatgtgtaggctgctctgtgactgaagaattttcaaaccagctttacacccttcaggaaaaatcccttgtgattggatgtttactatctgccaggaaactggtactcaagatgttgaagctacagttattttatgatagcacacttcccttgatctgcttatttttattccatcaccatttaccctttttttttttttaaattttgtagccattcttatgatgctcttgatttgttggttacacaaatcaattttattaaaaatccaaagataagtctttaggtatattttgtaccaaattaaattagaagacaaaaattgtgctttcatagttgctacaaaggtaaataatggagagatttggtacaaaacaacaaaatatatatatattctcatatatatatatatagctgataaaattacctgaggagtgtaatgcttatttttttgtgtatatctttgcaatctattttatatatattgacaaaagagactgtgaaatacttagccatgcagaatatgtgaccagaccagagcatgtgtaggaagactttacggtaatcattaactctaccccgaaatgatggactacaagttataatgtgtgttacctacacttcaatcagtaatattagcaaatctccaaatgttagtcacattggtttgtctcccttgtacattctttattcatgatattacagtgctgtaactgggtggtcctttttaaacaaaacattatttgcaaaacagagggtattatttgtttttaaagcttttgtaaataaaggcttcaaaatgttttcttat

SEQ ID NO: 13074 - DNA, 1942 bp, Homo sapiens
atctagcgcccccgtcaggacgtgcgaaaagcgacggcgcagcacggtgcggcgcagctcctgctcgcctttcccttcgctgggcgagaggtgtctatggggcacccgctgccgccgccgctaccgccaccgccaccgccaccgccgccgagtgctgtctctatggcgaggaggaggaggaggagcgcgagctcagcgacacaagtacataaataaaggataaaatattttatgaaacaaatcttcaatcaagtataacattttgatgcttggcatctagactcccttgtgccctcactatgccagcggcaactgtagatcatagccaaagaatttgtgaagtttgggcttgcaacttggatgaagagatgaagaaaattcgtcaagttatccgaaaatataattacgttgctatggacaccgagtttccaggtgtggttgcaagacccattggagaattcaggagcaatgctgactatcaataccaactattgcggtgtaatgtagacttgttaaagataattcagctaggactgacatttatgaatgagcaaggagaataccctccaggaacttcaacttggcagtttaattttaaatttaatttgacggaggacatgtatgcccaggactctatagagctactaacaacatctggtatccagtttaaaaaacatgaggaggaaggaattgaaacccagtactttgcagaacttcttatgacttctggagtggtcctctgtgaaggggtcaaatggttgtcatttcatagcggttacgactttggctacttaatcaaaatcctaaccaactctaacttgcctgaagaagaacttgacttctttgagatccttcgattgttttttcctgtcatttatgatgtgaagtacctcatgaagagctgcaaaaatctcaaaggtggattacaggaggtggcagaacagttagagctggaacggataggaccacaacatcaggcaggatctgattcattgctcacaggaatggcctttttcaaaatgagagaagtatgaagacatcactgcctttttctcagttggttgttaggttgagaacattaaaaatcttgtggccaaagattttgggcaacaagtacctactaagtaaagatataattagagataccatatgagtcacatccaccacacttaaaagtattcaaaaataagtcatcttgaaatgtagttcagaaggaactgggagaacatgttcatcatagaaccaacaattttaaaacataaactacctgagaagtcatgtaggtccaaccatattatttctcaggtgagaaaacaggctaataacttccatgattaaacacattactagtgggagaactccagagttcttttctgactcccattggtgctcctcctacaaggcaaggaatctttatattaggtttattctagcatgaccccttttaaggtttaaactggtgataaatatattatttgctcatgtcattcttcagtgctttgaagattttatagagaagaactcaggctcttttactgcattgagtcttaaaaggggggttgaattccgaagggatcaaataaatccaacgtagtagttgcatcagaaaccatattaggaaaaccctccttaaacggcaaaaggcagagatcagttccttgagtataaagtgttagggatggaagaatgaaactaaatgaacccattatctactcctaagtaattaagtgatgtgcacagatacacctagctataggtaaacaggaaaattggttgtgcaaaaaacaagtgaggtttttcttgactataagttttcccttttggaaaaattcgctgtggatttgagtatattttctcttagacattaaattgagactgagaatttaaaactttttgtagcaatgtattgataatagaaagcattaaagctgttttgctaagt

SEQ ID NO: 13075 - DNA, 6611 bp, Homo sapiens
taacgagcttccttccaccgcaaaagagctggagaacaatgctaggcaacgtgctggagaccttggccctcggaacccaagtcacgcctcccatgtgagctctggagggagaactttatgtgttgcactgagggcagtctccggaaacgcgattcgcagcgggcgccggaagcggtgttgtgtctgcagctctggcagaggactgttccactagacacgctgaagggactgggtacgtgttttccttcaggaccagagctgagaggagctgggatcgcggcggcaatggaacgggcctcagaaaggcgcacggccagcgcgctttttgcggggttccgggccttgggacttttcagcaacgacattccacacgtggtgcggttcagcgcgctcaagcgccggttctatgtaacaacctgcgtgggcaagagtttccacacctatgacgttcagaaacttagtctggttgcagtaagtaattctgttccacaggatatctgctgtatggcagctgatggcagattagtctttgctgcttatggaaatgttttctctgcatttgcccgtaataaagagatagtacatacctttaagggtcataaggcagaaatccatttcttgcaaccctttggagaccacattatctctgttgatactgatggcattcttattatttggcacatatattcagaagaagaatacctgcagttgacttttgataaatcagtatttaaaatttctgcaattttgcatccaagtacctacttgaataaaatacttctgggcagtgaacaaggaagcctgcagttgtggaatgtaaaatccaataaacttctatatacatttccaggatggaaagttggagtgacagctcttcagcaggcaccagccgtggatgttgttgctattggtcttatgtcaggtcaagttatcattcacaacattaaatttaatgaaacattaatgaagtttcgtcaagactggggacccattacttcaatttcatttcgcacagatggtcatccagtaatggcagctggaagcccatgtggccatattggactctgggatctagaagacaaaaaattaatcaaccaaatgagaaatgcacactctacagcaattgccggactgacatttctccatagagagccacttcttgtcacaaatggcgctgacaatgctcttaggatatggatatttgatggtcctacaggtgaaggccgacttttgagattcagaatgggtcatagtgctcctcttaccaatatcagatattatggacagaatggacagcagattctaagtgcaagtcaagatggaactcttcagtcattttccacggtacatgaaaaattcaataagagcttgggacatggattaataaataaaaagagagttaaacgtaaaggacttcagaataccatgtcagtgagacttccacccatcacaaagtttgcagcagaggaagctcgtgaaagtgactgggatggtatcattgcttgccatcaaggtaagctatcttgctcaacctggaattatcagaaatctacaataggcgcttactttctcaagccaaaagagttgaagaaagatgacataactgcaacagcagtggatataacttcttgtggaaactttgctgtaattggcctctcatcaggaactgtagatgtatataacatgcagtctggcatacatcgaggaagttttggcaaggatcaagctcacaagggatctgttagaggtgtcgcagtggatggattaaaccagttgacagttacaactggtagtgaaggattactcaaattctggaactttaaaaacaaaattttaatccattctgtgagcctcagttcatctccaaatatcatgttgctacatagggacagtggcattctgggactcgccttggatgacttctccattagtgttctggacatagaaactaggaagattgtcagagagttttctggacaccaaggccaaataaatgacatggcttttagtcctgatggtcgttggttaataagtgctgcgatggattgctctattaggacttgggaccttccttctgggtgccttatagactgctttttgttggactcggctcctctcaatgtttctatgtctcctactggagactttctggcaacttcccatgtggaccaccttggaatttatctatggtccaatatttccctgtattcagttgtttcattacggccacttcctgcagattatgtcccttcaatagtcatgcttcctggtacttgtcaaacccaagatgtagaagtatcagaagaaacagtagaaccaagtgatgaattgatagaatatgattcgccagaacagttgaatgagcaattggtgactctttcacttcttcctgaatcacgatggaaaaaccttcttaaccttgatgttattaagaaaaagaataaaccaaaggaaccacccaaagtacccaaatcagcaccatttttcattccaacaattcctggccttgtacccagatatgctgcacctgaacaaaataatgatccccagcagtctaaagtggtaaatcttggagttttggctcaaaaatcagatttctgcttgaaacttgaagaaggactggtaaataataagtatgacactgctctcaaccttctgaaagaatcaggcccatcaggaattgaaacagagctgcgaagcttgtctcctgattgtggtgggtccatagaagttatgcagagcttcttgaaaatgattgggatgatgctggacagaaagcgtgattttgagttagcccaggcataccttgcattgtttctaaagttacaccttaaaatgcttccttcagagccagtactcctagaagaaataacaaatttgtcatcccaggtggaagaaaactggacccatttgcaatcactcttcaatcaaagcatgtgtattttaaattatctcaaaagtgctttgttgtaaaaataaatttgtgactaaacaaagactttcatattaaatgggttcaattgaactcatttcttattttccaagtgtcaatgtgaaaagaaaataaatgctagcactactgactagtcagtatatctccactttaaatgctaaatactttcttgaaataaaatcgcacctcccggccaggcatgatggataatgcctgtaattccagcactttcagaggccaaagcgggaggattgcttgaagccaggaatttgagcccagcctgggcaacatagcaagcaagatcccatctctacaaaaagttaaaaaaataaattacacctgccttttgttttgaagacttaaagaatctgctcaaatgatttattttctgagtctcttcacattaacttttatatgatttttaaaaaattattacctgcttatattttttgagtatctgtttcatataaagagatgctgcatgttcactgtgaagtattgctgaattaaattgaaaatgtcagataaaactgatacatgatgtagttataaaaatgctgttatgaagaaaaaaggaatgcttttttcctcggtggcctttgataaaaatatgaatgattgactctcagagttggaggataaactaatcatcttctagcacagccctgttgtgttgcaggagaggaatcaggctaaagtctgctggtatttcagtgacagattaaaactttctaacagtggcctagtgctttctccattgtaatgtactgaaaggaagttgttcatggatcagaaatgtgggaggcccttccttgcccaaggcaagtcgctgtagatggttaaactgataccaaggataggtaagggaaattccaaattccattggaagatggccttttactgacactgcagacatgtagataacaatagtttaatgtcctctgaaaaggtaaaaattccataaatccttgcaaacaatttttagcaatattgtttattgctaccacagccaagaatgggtatttcaaagccagggttttttttattttgttttgttttgtttttttttttttttttttggctacacttttttgggggggaccttttaatttgggaagaaaatgctgagtatacttttctttcacaaccattgcaaacccaggtagccctggagttttctttttttctcatcatcattgttttgttttttttatggttcaagacttttgcaatacatgaattaaaaataagcagttctttaaagcatagcgctctaaaaactattcttagtttataccctcaaaagttgggtctttcatgaaacacagtggtttgaatatgaacaccagtagcattctcgttcgttgttagggtaagagagttttgtagaatgatctccaaaagaagcagtcctcaaaaggcatttaccagtgatatcttttaatattcatgtttttatttaatgatgtaagatagaattaataaactactaaggaaataagccaatgtggttattgtactcaatttcgtttttcttttagaaatgtgtattgacttattaaagccactgacagaaatgttaatcatgacttaagttctaatttaaaaaactattttcctctttcctaaatactatattctaaattggaatatggcaaaatcccaatatataattctatacctagtaaagattgtaaataactaaaacaaaatgataagagctgtgaactgaaattgtattgcttacagaaatcatgaaccgaattttcttctctttttaaagtgagcataaagacttaagtgtattgttaccagagatatatttagatagaatacatcattttggcaggtaatcttctagaacctttcatgtactgtttccatcaagggagggaaagaaatagaaaatataattttatctatattttccttaaaatatatcaatctgtgcacactctttcagttttttaattactcatgtaatatatgactacattttgcttgtgtgctttttgaaaaccatcttcagtcccaatatcctctgtagaagtaatagttttaactctcctagatcttcttttagagtgtttttatgagtgtttaatgtaggaatgtgtatatattatctacagccacaggaaatgtatagttacgatttttacatacgtgtatgtatattattgtacaacttgctatttctacttgggagttttttattttggtacattcacatttacctaatctcttgtgcactgtccaacagtactttgcctataatagacacttaaggaagttttccttctttttattcctttataattacaaacaatgctgaaaggaacatcatcctacatgagccctttttgtacatataaggctctctctgtggtatatgcttaggatttgaatttcaggccagagtataaccatttttaatttgaagagatacttccatttgggttccagaatggctgtatcaagttacagttcccctgagcaagatatgagcatctgcttccccatgtaattaatgacacttgctattggatttttgtaatttaattactctgaaaaaattattttggttttaaatcagaaatttctcactagtgaagatggacatatttttgtatgtttattttagaacatataaacatttgttaattttctttttcctctcatttttctattgaatgatttgtccttttatctcatggatttgttaggagttctcttgtattttctgtattttatgtctgttgccaatgttttctcctacttagccatttggctttaattttacatggtgtctgtttaaataaatgttttatatttgtatacaatcaaattgattaattttcatgacttatttcaggatataaagcaaattattttctaagacatttacagtgtatgttttcctatgtttacatgtgctcatttcacgtcatgtattttcctctacgacatgtttctgtgtgagtagttaacatgtagatctttagaattgatttttctgaagagtgaaacagcgctgcttccaatatctgttcaaaattcatttattgaaaagtccactcatatgtctgatttgaaatgctgtttcattatgtgttaaattctttcactgagctcttccatattcctagtaaatgatgcattactttggtatgttctcagatttgggtaaagccttcctcatgttctataaaaattggttaactgctggtgagcacatctcttgaagttttgatatgggttgcacaacatttataggactgatttggagagaccgacaataccgagtgcagtcctcccttggtatctagttccaggacccctgtggataccaaaatccaagcaatgccctgcagatcatgggacctatgcatatgaaaagtcggtccttgtatttgagggttttgcatccctcaaataccatatgttttatttgtgtttggttgaaaaaagtttgcatataagtgaaacttagcatttcaaacctgtgttgttcaaagatcatttgtatttctcttcaagaacaatgaatgtcttcattaaatcatcttttgtgggagagcttttggtttcatagattttcatatatatatatgatataataaacactttttgacattcaaaaaaaaaaaaaaaaaaa

SEQ ID NO: 13076 - DNA, 8670 bp, Homo sapiens
gcggcgcgcacggtatggcggcggcggcggcggcggcggcgcgcgcctgagaagaggggacgccagcccggtcaggcctcggcgcggcctacacgctccgctcgctcgctcgctcccgcctcccgccccgcgcccggccatggcggagccgtcgtccgcccgacgcccggtgcctctcatcgagtcggagctgtacttccttatcgcccggtacctatcggcgggcccgtgtcggagagcggcccaggtgctggtgcaggagctggagcagtaccagttgttgccgaagagattggactgggagggcaacgagcacaacaggagctacgaggagttggtcttgtccaataagcatgtggctcctgatcatcttttgcaaatctgccagcgcatcggtcctatgttggataaagaaattccacccagtatttcaagagtcacttctttacttggtgcaggaaggcagtctttgctacgtacagcaaaagactgcaggcacacagtttggaagggctctgcctttgctgctcttcatagaggaagacctcctgaaatgccagtgaattatggttccccaccaaatcttgtggagatacatcgaggaaaacaactcacagggtgttccacttttagtacagcatttccaggaactatgtatcagcatataaaaatgcacagaaggattctcggacatctatctgctgtttactgtgtagcatttgataggacaggacatagaatctttacaggttcagatgactgtttggtaaagatttggtcaacacataatggccgcttgttatctacattaagaggtcattctgcagaaatttcagatatggcagtaaactatgagaatacaatgattgctgcggggagctgtgataaaattattagagtgtggtgcttgagaacttgtgccccagttgctgtgctccaaggacacacaggatcaattacatctttacagtttagcccgatggccaaaggctctcaaagatacatggtttccactggtgctgatgggacagtttgcttttggcaatgggatttagaatccttaaaatttagcccacgtcccctgaagttcactgaaaagcctaggccaggcgttcaaatgctttgttcttcttttagtgttggtggtatgtttttagccacaggtagtactgatcatgtaatcagaatgtattttttgggttttgaagcacccgaaaaaatcgcagaacttgaaagccacactgataaagtagatagtatccaattttgtaacaatggtgatcggttcctaagtggtagcagagatggaacagcacggatttggagatttgagcagttagaatggaggagcattttattggatatggctaccagaatctcaggggacttatcttccgaagaggaaaggtttatgaaacctaaagtaacaatgatagcttggaatcaaaatgatagcattgttgtcacagctgtgaatgatcatgtcctcaaagtgtggaattcttacactggacaactgcttcataacttaatgggacatgctgatgaagtatttgttctggagacacatccctttgattccagaattatgttatctgcaggacatgatggcagcatatttatatgggatattacaaaaggtaccaagatgaaacattattttaatatgattgaaggacaaggacatggagctgtgtttgactgtaagttttcacaggatggacagcattttgcctgtacagattctcatgggcaccttctgatatttggttttggatgcagcaaaccatatgaaaagattcctgatcagatgttcttccatactgactatcgaccacttattagagattctaataattatgtcttagatgagcaaactcagcaggctcctcatcttatgcctccaccattcttggtagatgtagatggaaatcctcatccaaccaagtatcagagattagtaccaggccgagaaaattctgcagatgaacatttgattccacagctgggctatgtggcaacaagtgatggagaggtgattgaacaaattataagcctgcaaaccaatgataatgatgaacgcagcccagaatcgagtattcttgatggaatgataagacagttgcagcagcagcaagatcagagaatgggagcagatcaggatactattccaagaggactttcaaatggtgaagaaacaccccggagaggttttagaaggctgagcttagacattcagtcccctccaaatattggtctgcgtcgtagtggacaagttgaaggtgttcgtcagatgcatcaaaacgctccacgcagtcagattgctacagaacgtgacctgcaggcttggaaacgaagagtggttgtaccagaggtaccactaggcatatttaggaagctggaagacttccgattagagaaaggtgaagaggaaagaaatctttatataataggaagaaaaagaaagactcttcagctctcacataagtcggattcagtggttttggtatcacagtctagacaaaggacatgtaggcgtaaatatccaaattatggtagaagaaatcgtagctggcgtgagttatcttctggaaatgagtcttcaagctctgtaagacatgagacttcctgtgatcagagtgaaggttctggttcttcagaagaggatgaatggagaagtgacagaaaaagtgagagttacagcgaaagttcaagtgactcttcatctagatattccgattggacagctgatgcgggcatcaatttgcagcctcctttaagaacatcatgtcgtcgacgaattactcgattttgtagtagttcagaagatgaaatatctactgagaatttatctcctccaaaaagaagacgaaagagaaagaaagaaaataagcctaagaaggagaatttgcggaggatgactccagcagagcttgcaaatatggagcatttatatgaatttcaccctccagtttggattactgacaccacacttagaaaatctccttttgttcctcaaatgggtgatgaggtaatatattttcgacagggtcatgaagcttatattgaggctgtaagaagaaataatatttatgaactgaaccctaataaggagccatggagaaaaatggatcttagggatcaagaattggttaaaatagttggaatacgatatgaagttgggccccctacactctgttgcctaaaactagcatttatagatccagcaactggaaaacttatggacaaatctttctctattagatatcatgatatgccagatgttattgactttcttgtattgcgtcaattttatgatgaagcaagacagaggaattggcagtcttgtgacagattccgctctattattgatgatgcttggtggtttggaacagtgttaagtcaagagccatatcaaccacagtatcctgatagtcatttccagtgttatattgttaggtgggataatactgaaattgaaaaacttagcccatgggacatggaaccaattcctgataatgttgatccacctgaagaattaggagctagtatttctgtcacaacagatgagctagagaaattgctctataaaccacaagctggtgaatggggtcagaaatcaagagatgaagaatgtgatagaattatcagtggtatagatcaacttttgaatcttgatatagcagcagcttttgcaggccctgttgatttgtgtacatacccgaagtactgtactgtagtagcttatccaaccgatctttacacaattcgaatgagacttgttaatcgattttacaggaggctgtctgcgttagtttgggaagtcagatatatagaacataatgccagaacatttaacgaacctgagagtgtaattgcaagatcagctaaaaagataactgaccaacttttaaaatttatcaagaatcaacactgtacaaatatctcagaactttctaacacatctgaaaatgatgagcaaaatgctgaggatttggatgatagtgatcttcctaaaacatcttctggaaggaggagagtccatgatgggaaaaaaagcatcagagctacgaactatgttgaaagcaactggaagaaacagtgtaaggaactagtgaacttaatttttcagtgtgaagattctgaaccatttagacaacctgttgatttggttgaatatccagactacagagatattatagataccccaatggattttggaacagtaagggaaactctagatgcgggaaattatgacagccctttggagttttgcaaagacatccggctgatatttagcaatgcaaaagcgtatacaccaaacaaaagatcaaagatttatagtatgaccttgagattatctgccttatttgaagaaaaaatgaagaaaatctcttctgattttaaaattggtcaaaaattcaatgaaaaacttcgaagaagccagaggttcaagcaacggcaaaattgtaaaggtgacagtcagcctaacaaaagtatcagaaacctcaagccgaagaggttaaaatctcagacaaaaataattcctgagttggtaggttctcctacccagtctacctcaagtaggacagcttatcttggaacccacaagacaagtgctggtatctcttcaggtgttacttctggtgactcttcagattcagcagaatcatcagaaaggaggaaaagaaatagacctataacaaatggttctacattatctgaaagtgaagtggaagattctttagctacctctttgtcatcgtcagcttccagtagttctgaggaaagcaaagagagttccagagctcgtgaatcctcctcacgcagtgggctatccagaagcagcaatctcagggtaaccagaactagagctgctcaaagaaaaactggtcccgtttcattagcaaatggatgtggcagaaaagccactcgaaagagagtctatttaagtgattctgataacaattcattggagactggtgaaattctaaaagccagagctggaaataaccgaaaagtcttaaggaagtgtgctgctgtggctgccaataaaataaagctaatgagtgatgtagaagagaattctagctctgaaagtgtctgttctggtcggaagctgcctcaccgcaatgcttctgctgtagctagaaaaaagttattacataattctgaagatgaacagagcttaaagtcagaaattgaagaagaggagctaaaagatgaaaatcaactattaccagtgtccagttctcacactgcccagagcaatgttgatgaatctgaaaacagagactcagagtcagaaagtgatttgcgggtagcccggaaaaattggcatgctaatggttacaagtcccatactccagcaccttcaaagacaaaatttcttaaaatagagtcttctgaggaagactctaaaagtcatgattcagatcatgcatgtaacagaactgctggcccatcaacgtctgtgcagaaacttaaggcagagagcatctcagaggaagcagattctgaaccaggaagatctggtggtaggaaatacaatacatttcacaagaatgcgagtttctttaaaaaaaccaagattctgagtgactcagaagactctgaatctgaagagcaagatagagaagatgggaaatgtcataaaatggaaatgaacccaatttcaggaaatctgaactgtgaccctattgctatgtcccagtgttcctcagatcatggatgtgaaactgatttagattcagatgatgacaaaatagaaaaaccaaacaattttatgaaagattctgcatcacaagacaatggactaagcagaaaaatttccaggaaaagggtctgttccagtgactcagacagtagtttacaggtggttaagaaatcatcaaaagccagaacaggtctcctgaggattactcgaagatgtgcagctacggctgccaataagatcaagctcatgagtgatgtagaagatgtcagtttagaaaatgtgcacactagaagcaaaaatggaaggaaaaaacctctccatcttgcttgtactacagctaagaagaaattgagtgattgtgaaggaagtgtacattgtgaagtaccaagtgaacagtatgcctgtgaaggcaagccacctgatcctgactccgaaggtagtacaaaagtgcttagtcaggctctaaatggagactcagactctgaagatatgttgaattcagaacacaagcacaggcataccaatattcacaaaatagatgcaccttctaaaagaaaaagttcctctgttacatcttcaggagaagattcaaaaagtcatattccagggagtgagactgataggacattttcttcagagtcaaccttggcacaaaaagctactgcagagaataattttgaagtggaactgaattatgggctgcgcaggtggaatggcagaagactcaggacctatggaaaggctccttttagtaagacaaaagtgattcatgattcacaggaaacagcagagaaggaagtaaaaaggaagagatcgcatcctgaattggaaaatgtgaaaatctctgaaacaactgggaattcaaagtttagacctgatactagttccaaatcatcagatttgggatctgtaactgaatcagatattgactgtactgataatacaaaaaccaaaaggaggaaaacgaaaggaaaagcaaaagtagttagaaaagaatttgttcctagagacagagaacccaatacaaaagtgagaacatgtatgcataatcagaaggatgcagtgcagatgcctagtgaaactctgaaagcaaaaatggtacctgagaaagttccccgcagatgtgctactgttgctgcaaataaaataaagataatgagtaatctaaaagaaacgatctcaggaccagaaaatgtctggattaggaagagtagcagaaaactgccccatcgaaatgcttctgctgcggctaagaaaaaattactgaatgtttataaagaggatgatacaaccataaattctgaaagtgaaaaagagctagaagatattaatagaaaaatgctttttttaagggggttcagatcctggaaagaaaatgcacaatagtgactatgagaatgtagaagtggcatctgaaaacaattggtacacaagtaaactggcagttacattctgctcccagctctaaaattactcccttattggcatctttggaggaattttctaaaagccataatccagtgggttcctcccagtcagctcttgtacagacatgtgctctggggaattctgaggaggaaataaattgcagagtctgtaggtggagaggtggaaagaaaagacaaatggcctgctataagactactattcctttccagaatgcaaggccttgaagacatgattccttagaggaagaatataatgggaagtgtacaggctaggaagaacttgaagtgaacaaatttcaaaatcttaacctgatgctaattttcagggttctccattacagtgtaaaaattcagaccacgacaactatggtgtcatgaggaaaaaaaatcaggcatttttccaaaggaagtgctaatgggcctatttgacttctgagtgaagcaaaaactacccagatccattccctacaattcacatccccaaaggtcaaaaacaaactaggaggacctgggaatttcagctggagatactgattattgagttctgaagtagagtgttggaaataggcaattagagaaagtccattgatgtcattttgtttataatattgcagttcatactgaatgaccacttgatatgactaattcagggaatatatatttttctatgaaagctatgaatgttactatcacggcttttccttatttttacttgtatgtagcagcatttacagaaatgccaaaaatgtgcctcattaagaggcaggtcttaatcagttagataaaaataaaatgtatagcttaagatcaaaacagtcatatttttagatacagtgaaatcttttatgtttctctacagcaccttaaaaattagaacttgaatactttgagtaaacttactacaatctcatcccaacaaactttaatggtagcatgtttggcctatttcattgtggcctgtactaggattagaaaatttggtcgtggtataacaaagaagtgtatttacaataggatttaatttgttgttaatatgtatttgttgaaattaaaattgccagattaaatgaatatactgtcgcatctttttaacatagtaacgtgttactggaaaaattaagttgttgaaagtaagttgttttcccatttaaaaatatctgaatatatgatttgcatgtgtaaatctgaaaaactaaactacagaaacctagggttttctatttcttttttaagtcaaatgcatttttttttttttgttatacagatgaaccaagtgtctaaaatacttgagaaatttgtggttgcatgtctgttttaaaaaaaaggctttttgttttttagcataagccagaatattctaacctactaagtctgtgtcctttgctccttttgtagtatactttcatctaaattactgatccccaatatgttgatacacaggtgagaaagggaagaattcctaataaactgctattacttttaggtgaaaaaaaaaaaaaaaaaaaa

SEQ ID NO: 13077 - DNA, 13003 bp, Homo sapiens
gcggcgcgcacggtatggcggcggcggcggcggcggcggcgcgcgcctgagaagaggggacgccagcccggtcaggcctcggcgcggcctacacgctccgctcgctcgctcgctcccgcctcccgccccgcgcccggccatggcggagccgtcgtccgcccgacgcccggtgcctctcatcgagtcggagctgtacttccttatcgcccggtacctatcggcgggcccgtgtcggagagcggcccaggtgctggtgcaggagctggagcagtaccagttgttgccgaagagattggactgggagggcaacgagcacaacaggagctacgaggagttggtcttgtccaataagcatgtggctcctgatcatcttttgcaaatctgccagcgcatcggtcctatgttggataaagaaattccacccagtatttcaagagtcacttctttacttggtgcaggaaggcagtctttgctacgtacagcaaaagactgcaggcacacagtttggaagggctctgcctttgctgctcttcatagaggaagacctcctgaaatgccagtgaattatggttccccaccaaatcttgtggagatacatcgaggaaaacaactcacagggtgttccacttttagtacagcatttccaggaactatgtatcagcatataaaaatgcacagaaggattctcggacatctatctgctgtttactgtgtagcatttgataggacaggacatagaatctttacaggttcagatgactgtttggtaaagatttggtcaacacataatggccgcttgttatctacattaagaggtcattctgcagaaatttcagatatggcagtaaactatgagaatacaatgattgctgcggggagctgtgataaaattattagagtgtggtgcttgagaacttgtgccccagttgctgtgctccaaggacacacaggatcaattacatctttacagtttagcccgatggccaaaggctctcaaagatacatggtttccactggtgctgatgggacagtttgcttttggcaatgggatttagaatccttaaaatttagcccacgtcccctgaagttcactgaaaagcctaggccaggcgttcaaatgctttgttcttcttttagtgttggtggtatgtttttagccacaggtagtactgatcatgtaatcagaatgtattttttgggttttgaagcacccgaaaaaatcgcagaacttgaaagccacactgataaagtagatagtatccaattttgtaacaatggtgatcggttcctaagtggtagcagagatggaacagcacggatttggagatttgagcagttagaatggaggagcattttattggatatggctaccagaatctcaggggacttatcttccgaagaggaaaggtttatgaaacctaaagtaacaatgatagcttggaatcaaaatgatagcattgttgtcacagctgtgaatgatcatgtcctcaaagtgtggaattcttacactggacaactgcttcataacttaatgggacatgctgatgaagtatttgttctggagacacatccctttgattccagaattatgttatctgcaggacatgatggcagcatatttatatgggatattacaaaaggtaccaagatgaaacattattttaatatgattgaaggacaaggacatggagctgtgtttgactgtaagttttcacaggatggacagcattttgcctgtacagattctcatgggcaccttctgatatttggttttggatgcagcaaaccatatgaaaagattcctgatcagatgttcttccatactgactatcgaccacttattagagattctaataattatgtcttagatgagcaaactcagcaggctcctcatcttatgcctccaccattcttggtagatgtagatggaaatcctcatccaaccaagtatcagagattagtaccaggccgagaaaattctgcagatgaacatttgattccacagctgggctatgtggcaacaagtgatggagaggtgattgaacaaattataagcctgcaaaccaatgataatgatgaacgcagcccagaatcgagtattcttgatggaatgataagacagttgcagcagcagcaagatcagagaatgggagcagatcaggatactattccaagaggactttcaaatggtgaagaaacaccccggagaggttttagaaggctgagcttagacattcagtcccctccaaatattggtctgcgtcgtagtggacaagttgaaggtgttcgtcagatgcatcaaaacgctccacgcagtcagattgctacagaacgtgacctgcaggcttggaaacgaagagtggttgtaccagaggtaccactaggcatatttaggaagctggaagacttccgattagagaaaggtgaagaggaaagaaatctttatataataggaagaaaaagaaagactcttcagctctcacataagtcggattcagtggttttggtatcacagtctagacaaaggacatgtaggcgtaaatatccaaattatggtagaagaaatcgtagctggcgtgagttatcttctggaaatgagtcttcaagctctgtaagacatgagacttcctgtgatcagagtgaaggttctggttcttcagaagaggatgaatggagaagtgacagaaaaagtgagagttacagcgaaagttcaagtgactcttcatctagatattccgattggacagctgatgcgggcatcaatttgcagcctcctttaagaacatcatgtcgtcgacgaattactcgattttgtagtagttcagaagatgaaatatctactgagaatttatctcctccaaaaagaagacgaaagagaaagaaagaaaataagcctaagaaggagaatttgcggaggatgactccagcagagcttgcaaatatggagcatttatatgaatttcaccctccagtttggattactgacaccacacttagaaaatctccttttgttcctcaaatgggtgatgaggtaatatattttcgacagggtcatgaagcttatattgaggctgtaagaagaaataatatttatgaactgaaccctaataaggagccatggagaaaaatggatcttagggatcaagaattggttaaaatagttggaatacgatatgaagttgggccccctacactctgttgcctaaaactagcatttatagatccagcaactggaaaacttatggacaaatctttctctattagatatcatgatatgccagatgttattgactttcttgtattgcgtcaattttatgatgaagcaagacagaggaattggcagtcttgtgacagattccgctctattattgatgatgcttggtggtttggaacagtgttaagtcaagagccatatcaaccacagtatcctgatagtcatttccagtgttatattgttaggtgggataatactgaaattgaaaaacttagcccatgggacatggaaccaattcctgataatgttgatccacctgaagaattaggagctagtatttctgtcacaacagatgagctagagaaattgctctataaaccacaagctggtgaatggggtcagaaatcaagagatgaagaatgtgatagaattatcagtggtatagatcaacttttgaatcttgatatagcagcagcttttgcaggccctgttgatttgtgtacatacccgaagtactgtactgtagtagcttatccaaccgatctttacacaattcgaatgagacttgttaatcgattttacaggaggctgtctgcgttagtttgggaagtcagatatatagaacataatgccagaacatttaacgaacctgagagtgtaattgcaagatcagctaaaaagataactgaccaacttttaaaatttatcaagaatcaacactgtacaaatatctcagaactttctaacacatctgaaaatgatgagcaaaatgctgaggatttggatgatagtgatcttcctaaaacatcttctggaaggaggagagtccatgatgggaaaaaaagcatcagagctacgaactatgttgaaagcaactggaagaaacagtgtaaggaactagtgaacttaatttttcagtgtgaagattctgaaccatttagacaacctgttgatttggttgaatatccagactacagagatattatagataccccaatggattttggaacagtaagggaaactctagatgcgggaaattatgacagccctttggagttttgcaaagacatccggctgatatttagcaatgcaaaagcgtatacaccaaacaaaagatcaaagatttatagtatgaccttgagattatctgccttatttgaagaaaaaatgaagaaaatctcttctgattttaaaattggtcaaaaattcaatgaaaaacttcgaagaagccagaggttcaagcaacggcaaaattgtaaaggtgacagtcagcctaacaaaagtatcagaaacctcaagccgaagaggttaaaatctcagacaaaaataattcctgagttggtaggttctcctacccagtctacctcaagtaggacagcttatcttggaacccacaagacaagtgctggtatctcttcaggtgttacttctggtgactcttcagattcagcagaatcatcagaaaggaggaaaagaaatagacctataacaaatggttctacattatctgaaagtgaagtggaagattctttagctacctctttgtcatcgtcagcttccagtagttctgaggaaagcaaagagagttccagagctcgtgaatcctcctcacgcagtgggctatccagaagcagcaatctcagggtaaccagaactagagctgctcaaagaaaaactggtcccgtttcattagcaaatggatgtggcagaaaagccactcgaaagagagtctatttaagtgattctgataacaattcattggagactggtgaaattctaaaagccagagctggaaataaccgaaaagtcttaaggaagtgtgctgctgtggctgccaataaaataaagctaatgagtgatgtagaagagaattctagctctgaaagtgtctgttctggtcggaagctgcctcaccgcaatgcttctgctgtagctagaaaaaagttattacataattctgaagatgaacagagcttaaagtcagaaattgaagaagaggagctaaaagatgaaaatcaactattaccagtgtccagttctcacactgcccagagcaatgttgatgaatctgaaaacagagactcagagtcagaaagtgatttgcgggtagcccggaaaaattggcatgctaatggttacaagtcccatactccagcaccttcaaagacaaaatttcttaaaatagagtcttctgaggaagactctaaaagtcatgattcagatcatgcatgtaacagaactgctggcccatcaacgtctgtgcagaaacttaaggcagagagcatctcagaggaagcagattctgaaccaggaagatctggtggtaggaaatacaatacatttcacaagaatgcgagtttctttaaaaaaaccaagattctgagtgactcagaagactctgaatctgaagagcaagatagagaagatgggaaatgtcataaaatggaaatgaacccaatttcaggaaatctgaactgtgaccctattgctatgtcccagtgttcctcagatcatggatgtgaaactgatttagattcagatgatgacaaaatagaaaaaccaaacaattttatgaaagattctgcatcacaagacaatggactaagcagaaaaatttccaggaaaagggtctgttccagtgactcagacagtagtttacaggtggttaagaaatcatcaaaagccagaacaggtctcctgaggattactcgaagatgtgcagctacggctgccaataagatcaagctcatgagtgatgtagaagatgtcagtttagaaaatgtgcacactagaagcaaaaatggaaggaaaaaacctctccatcttgcttgtactacagctaagaagaaattgagtgattgtgaaggaagtgtacattgtgaagtaccaagtgaacagtatgcctgtgaaggcaagccacctgatcctgactccgaaggtagtacaaaagtgcttagtcaggctctaaatggagactcagactctgaagatatgttgaattcagaacacaagcacaggcataccaatattcacaaaatagatgcaccttctaaaagaaaaagttcctctgttacatcttcaggagaagattcaaaaagtcatattccagggagtgagactgataggacattttcttcagagtcaaccttggcacaaaaagctactgcagagaataattttgaagtggaactgaattatgggctgcgcaggtggaatggcagaagactcaggacctatggaaaggctccttttagtaagacaaaagtgattcatgattcacaggaaacagcagagaaggaagtaaaaaggaagagatcgcatcctgaattggaaaatgtgaaaatctctgaaacaactgggaattcaaagtttagacctgatactagttccaaatcatcagatttgggatctgtaactgaatcagatattgactgtactgataatacaaaaaccaaaaggaggaaaacgaaaggaaaagcaaaagtagttagaaaaggtaaaacttttacagctaacatatctaaaactgtgagacgtcaaagacaaagcaaacgccctaggttaagtgtggatgataatgactgggaggatttggactatgcaaaatctaaaagagttcttcgacgttcaaaaataaaaacgagaaatcagggtagaaggactgtgagataccatgatggggatgatgacagaagtttagaaaatgtgttagatttcaatggttgcaccttatgaccttgagggaaagccagttcatttaagaggaaatggactggcatttatggtgaaagctggctgttaaaattatttttttgtcttacaattcagggaatatatttatatttttctatgaaaagttatgaatgtgactaaatcatgactgttatttttatttgcacttgctggtctttgtagcagcattcagcacaggtgccaaaatatgcttcattttgggggcagatctattttgacagtatttgactacatatagcaagagtttgaaatatgttaaacactagacatcctggttatcaaaaccaatgagcattactttcatggcagcaagtgtcatgcagttattttctgaatttgtcaaagaggcagtagtttctaacccctgttctatagtagttacaacaatttcacaacctatgtttacagattcttcataaatacatgcatactgacactataatcatgggaggtgtaaccatgattagtaggcgaggtacctaccacttttttttttttcttcccctggctacttgagtagaatgcattataccagatctggtcactttcattgaaatggtttctaattttcttcccaagtgctgttgggtttttttcttcttaaggaaaacgttgtcacttttatgttataaacttgaatttataaagtgctggtaaattatttttaatgatttgagtgcatgttttaaacctctaggaccagagcatagtcagagcattttcttttaaattgtgcactaacaaaatgctatataatctgtcttctgtccaagatctcctggtttccattgtaagggatttaaccaaaatcttgctcttccataatcttactctgtgaaatagaggaattcgtgtgccttagatttagaagtgtgttctttaatagagtgtacagggctaaaagagtatttaagttaatatgtaggtttcccccatctgtattccaattgtagaggtgagttttgttaagagtacaattgcaaatcttatctatataggaaaatagctaaatgtcattctccatctctttgttttagtttactgcttccatgtgcaatcctaagcattctttgctggggcaactaaatgtatctttattagtgacttctagtccaaatataagaaactgtcatgttttgtgggaaaataattttataatccatttaaagtgaaagtttatcacacaaatagtacacttattttctaaccaaatacttgataggttatgctactccagtgtagatggccattcctaacttgtttgtgcctgaagatggacttgattcaaatggtttacatatttagtgggtaagggatatgttacagtaccccacctgtaagttatttattagccctaattgtgtttgatttcagacaaaattaacccttttctcctgtgtatctttgaagtggcagataaggtgaagcatcagactggtatcaatattagacaatgttatttattagccctaattgtgtttggtttcagacaaaaccttttctcctgtgtatctttgaagtggcagacaaggcgaagcatcagactggtattaatgttagagaatgttctgaagtgttcctattttgtagttatctattccatttgacatagtagaaggtacattttctttctactctgatgcatggggaaggatgtttttggacattatcaactgagataggtgggaaacctcctctcatttgtggcttagagagctatcaccatttcagaactatgatgcttttcttctcagaacttgtgttaagtagatagtaaacagattgattcatgataattgtccttgactaagactgaaaagactaatgggatgccttttactttgctaattttaaaaactggtgatagatgtcaaatccattaatttatttaaactcttcttaaccttctcttttataatctgttctcaggttttaactccatgtttaccatcatttgcaaaaaggtaccaaaaaaatccataaataaatatggaatacattcataagtacatacattcttttggtataaaacaatattttgacagtttaggcttcattaatagaactattctgattatttggactgcattaattggtcattgactggccatccaattaccattttttctttcagtccaaaatagttagacccttgcatacagaagtggtattttggtttttaatcagatttggtttcatcagaagcagcaagaatggacctgatgtctttaaaagcatagccgacaatggtagcttctcaagttatgaaataaaactgagagataatggagaaaataatttttatgggtttttttggttatggtgctattcctaaggttaactttgaatatgtgacacacacactcctaagtacctttaaggaaaattaataaatcattaatagttaaaatgtttacattgagcactagaacatgtttggccttttttttctacgttatgcaaaatgcccagggatttaatgcacaggtgtactttaatgtttagggtcagtttgtagtattcttgagaaaaagataaagggttataatttgaatgtgaactgatccagaaataagtgctgtacctttccactgcacttgaagttcaacttaatggtgtatgtgaaaaacaaaaactactttggttgtgtatgtccaaagtcctatggttttattcatttatggttttacaggctttgaagtactcagatttgatttttgctttcttggaaagactcactttaccaagcatataaaggaaaaatgatttcaaacattgacaagatagatgagtgttaacaaagctttcttttttcgtgtcctccttatttaaaaaggtatacttacaatgtgaagtaacttatgaataaaaggaaaagtttatcccatattcaaataattcctaaggtcagcctccctttttgtaagtggcaaatatctgattaaatcatttctcagtttattaatccttggaaacaatgatatagcagttactcacagcttgtaaattacaacagaaaggttcctttcaaatagtagagctgcacctaaagaggaaattgggtttataagaaaatggaggcaaagaacttaagttttaagaaaaagcacttcaaaacagaagggcaaatggaaaaggggaatataaaacaaaccaataaaaataccatctgagggtgttactgtccaaaagtaaagaataagatgcatcactaagccctttgcactcgttatgacctcgtaagtaaaaattatcacttagaataaggggtgcacactacattccctctgtcttctagacttttttttttgtagaagaatcagaaaacaatttactaacctccctgtttgatattaaaaataggaagaattttaatattttctgttagtacaagttgaacttgattgtgccaactgaaaccccagaggtttgtatatcagtagaatgcaagaacattgttaaaggtgcttacgatcttttttgttttcctttccactccattgtatcaattttttgagtaacttttaaatggctagaaaatggtctttttgctttgcccttttaaagctgaaataaccagctccattcttttcatgaatagtaagttgatatatttatttatcaggtatcttgcagttgtcaccaaatactgtagttttcttatgttgtatggaaattatagttcaattattttaatgtgatagagtgcaacaagtcattgtagaacttttcacctgttaatgttgaagttatacctctgaatttctgctgtggatatcaaggaaataataaagcagaaaccccaagaaatttgcaacttaacagtttgagactgtctcttatcctagtatttgggaagagaaggaataaatttgtcaaaactaggtgagaaaatagagcattgtgggaaaaactgagtccaactagattagcaaatgttaattcctagctcaaactgtgaatagtaaggattgaaaagtaaagtatgtaatgctaagggctgtgttgtcttttcttacgattttaagttttaaaggctgttaaattacagagatgttgcccaaggatacatggggattctcaaaagtaagagatttttacctttttcataatctgccaagctggttcctaatatattgttaaattggtagaaaaatatctttaaattggtgtctgctcaagaattgcttttctagatttgatggagggagggggagagtcacatcatttggattctaccaatctgcaggctctatctttggcaacatgtaaataattagactatacatctgtttctcaagtatggcaagaccaatagtttgaatttaattatcaatgctatggtatactttctggtcatattttagttatgtcagttttaaggtaagttttttcatttattaaagcccttaaatgagattttagactgccaaagagaagaggcagtccaattgacctaactgaaatgagatgaccagtatatagagcctagatggactgtagcagctctacccctttgttttacaaggtaaatcattttaaaaattaccttttttgatcagtgggtaaaagttaaagggatctttaatttttgatatattcaagttaattttctaaatgtgaatcagtccttggactgcaactatatattcacctacaaaatcccaatcaaaaaattacatgagcctgtcaagcagatctttagttttccacttcacataagatcgttaatgttctaaattaatctattcatttagatgatttttgtcagttcttaaatgggatataataaatttagcattttcatcttaacaagcaaaagagttaaaaaacaaaacaaaacactactccaagccaaatacattctagctggttaattccagacttgtcccaagtggttccccaacctcttttccactggtaatttcttttcatgcaggcagaatataggggtgcgagcgctgtgagttttacatatgagcttggataggggaactgaagcgagtcaggagccctgctggaaaaggggtttgccattggattgtctgtggcctggtttctttccagtagtacagtaatagggtagattgaaaacaagtatttacttctgattctgcctgcatttagtgtgaaatgctcttaaggtattgcttctaaaaagcaaattaagcagttaagtataaagtccctgcacgaggatttcaaaataaggcttttatgagatttttattaaaaattgcaatagccatcacaaatctgagtttttctaggggtgagagaaaactgtattgtgatgagctagattagttgtagttccagaataagaacaaaaattcagagttgtgtggtgcccatcattgagtaaatgaaccctaaaaatgaataagctaatgaactagttcatggaattatttctgatggtcttttgacctgatgctgccatactgcagtgttaccagctccccctagaaaacggaactgtttaaaaacacagcaagttacagaaaccattttattctacagccattggggtacttcagtttatgggatgtttttggaaacttctgctttgggagggatgaagatcattgataaatgttatttgctttctgagttttggggtcatttcattgcttatcaatgaagggcagacagaggagagaatatctcaagtcttttctgataaaaggcttgcttgagggagcttataacttgcacctagagggtttacccactttgtggatttgatttatccaccaaccacagcaaccaataatgtcaagattctaggagtttatgaaagaggctagtatgttttcattttgagtcagacattcttttctcattctcaaatctgttttaaatgctccaattttaaaaatgccaatgaaaattttataatgcttctgtagtaaccatatgcagtttactttgaatttaggaaaacagttttgtatgatgaaatattgtgcagaatctgtaaataaggtagcttaaaaattaaaaaaaagtctaattaaaaaaaaaaaaaaaaaa

SEQ ID NO: 13078 - DNA, 4687 bp, Homo sapiens
gcgagcggcgcggcgcggcgcggccgggactttggctttgacaccgactgcgagcgggagccgtgcggctggtgctgggtctggactggctctggcggatccccgcccgagttgggcgcaggactttttgccggggtaaacgcaactgcggcggcgccgccgcaagccccggtgcagcctcggcggcgggtttcgccgccgctgccgccgcctccgagcagccctgcggcttctattcactctgggagagcgatgctaagtttctcccatagaaagagccgggacacgcagaccgaagcggcgtagtcggcttccagggcctgaccagtgacccacacccgcgcggacgcctaggctggaggcagggggcccgtgctgtcccgggctgggctcaggcttccgagccgcaggtggaagaggaaccggcgccccgcagagcggccgagaggcggccaagtgaaaggtaattttggacacgccaggcatggaagattcggtgtttgtctatagtaacctcttcagtccctgaatcctgcaccttccgtttttctgtgcttgtacggcctactgggcttcctccctagccagagagctcttctgcagtggtgcggccttcccgggagcctgatcctggcggaccatggggagcaccctgggctgccaccgctccatccccagggacccctcggacctgtcccatagccgcaagttcagcgcagcctgtaacttcagcaacattctagtgaatcaggagcggctcaacatcaacactgccacggaggaggagctgatgaccctgcctggggtgacgcgtgccgtggcacgcagcatcgtggagtaccgagagtatatcggtggcttcaagaaggtggaggacctggcattggtcagtggtgtaggcgccaccaagctggagcaggtcaagtttgagatctgtgtgagcagcaagggcagctcagcgcagcactctcccagttccctgcggcgggacctgctagcggagcagcagcctcaccacctggccacagctgtgcccctcaccccacgtgttaacatcaacacagccaccccggcccagctcatgagcgtgcgaggcctctcggagaaaatggccctcagcatcgtggacttccgccgtgagcatgggccctttcgcagcgttgaggacctagtgaggatggatggtatcaatgccgccttcctggacaggatccggcaccaggtgtttgctgagaggtccaggcccccatccacccacacgaacgggggactgaccttcaccgccaagcctcacccgagccccacttccctgagcctgcagagtgaggacctggacctgccgccaggggggcccacccagattatctccactcggccgtccgtggaggcctttggaggcacaagggatgggaggcctgtgctgaggctggccacctggaacttgcagggctgttccgtggagaaggccaacaaccccggggtgcgagaggtggtgtgcatgacactcctggaaaacagcatcaagcttctagctgtgcaagaactgcttgacagagaggccttggaaaagttctgcacggagctaaaccagccgaccctgcccaacatccgcaagtggaaggggccccggggatgctggaaggctgttgttgctgagaagccctcgagtcagctccagaagggagctgggtatgcaggattcctatgggacgcggctgccggcatggagctgagagacgcgggttcacaggagagctcgccaagcaacgggcacgggaagctggcgggccccagcccatacctcgggaggttcaaggtgggaagtcacgacctgacccttgttaaccttcacctggcagccctgaccctcctggggagcgagaatcccagcaagaatcacagtgatggccaccggttggcgagctttgcacagaccctacaggaaaccctgaaaggagaaaaggatgtcattatcttaggggattttggccaagggccagacagcaatgactatgatatcctgaggaaagaaaagttccaccacctgatccccgcgcacaccttcaccaacatcagcaccaagaaccctcaaggctcgaagtctctggacaacatctggatcagtaaaagcttaaagaaggttttcacaggtcactgggctgtggtgagagaaggcctcacgaacccttggattccggataactggtcttggggcggggtggcttctgaacactgcccagtgctagccgagttctacactgaaaaggactggagcaagaaggatgcccctcggaacggcagcggggtggccttggagcgaagtgaagccaacatcaagcacgagcgatgatgacaccaaatccatgtgtccaccctgggacccaggagggcacagccaaggaatgagccctgtggggtgacgcttcagggcagagctgccttttaatttttattctcagagcatcagcacttgaggccttgccccacgccttctctgtggaccattcaggacctccagtgggggtggcgtgccaggcgcgtaccccaccaggtgggcaaagcagaaacctgcggggagcggagacgccttttatctctggatgccacagacctgagcagcattgggctggctgtccgctgctgactggatggcagcacaaagacaatatgagcagagggaggagaagaaggggtgctcaggctgcgggccacagtccagcagcgccagaagcactcatttctgaccaccaggctatgacgttcctgctgcgcattacagaaagcttttaactgtgatcaggcactctgctcagatacattgagtggcgatttttagttttgttttgaaaaaataaacagattaacctgcctcgctgcagtgagagcatgggacaagtccgccacagccctcccccgcccccttcccccgccccccaacgcgcagtgtgtatttgcaccacggcaggtgcctctgtgtggagctagggtcaagccctgagcagcttcacttcccctgcgccttttatgtccccaccttgaggccttgcagaggcgcctctcaaggccccatcagctcgccgggacctctgtgaagcctctctgtcatctccccttcccagcccctccttcatcccctgcctccttcaccagcctggcttttgcctggagcactatttgtttagttctctttgcaggacaagaattctctcagggtggtatcacctcctccctcctccccactcactccagtttttagcccggagcctcctgtggttgactatcaggaatgtgtgctgtgtcaggatacataggaagttgacctcggggtatcatggagagtgtccctcctagtggctggaggtagggacagttggttgtggggctggagagaggttgtggggaggaagcgaggatgcgtgcctgccactaggcatctgcatccccgagcccaagccaggagggatttcccttaggcaacaccatcccagggagatctgccacaatttgcgtttcacagctgaagacgctgaggcttagagagctcgacctcctcaaggtcacaccactgggtaaatagagggatgcagactcaggttttgctatgtgctcacatttcaactttatgcttaacatgaatggaaaaatatgaaagtaaatagtgaaaaggtaagttatgagcttagattacctagattattccagtatcccatggaagctgaggacttattccgctttccacaccgaacactaaatgtggaccagtatcaagaaccctcctgtccccacgcagtgtaaacccagtggcttctctgacctggagctgatgggccgtgaagggggcctatttttctccaaaggccatccttttggggccacctggctccaagaagcatcgctggtcttggggacgggaagggaaccctcttccaggagctctaagggtacttgggaatcaattgtgtccattctgaggtctctccagtgggagggcggcagctcctgtccctgggttcaggctgtgcttctggaagcatcgaaatgggatgtctgagccttgaggaaaagcagcagggttagcattaaagtcaagaggggcagctcaggatgctaccagggagcacatcgtttctggtgcctcatctaaaggtgaaacctcccctacattcaccagccggatgtcccaaatccctttagccagattgctttttgcaaccaaagctgtggacagaaaagcctccttaagtgagctgaggggacaggaaatccaatcagatgacctttgtgttcgtaatcgggcttgagccagaggctggggagctgagtcccagccaaacctcactggcccttttgcttttcacgcccagggctcagtggcccaggaagtgtgctgggcagcctgttcttactccagctcaacccattgggtgttggctgtttttggttttagttgttgttttgtattttgttgttttaattaataggctttatttgtaagagcagttttatgtttacagaaaaattaggcacaaagggattcccatatccctcctcttctttgcatatttccccctctaattagcatgttgcattagcatggcactttgttacaactgatgaacttgtattcattattagctacagtgttcatagtttatattaaagttcactctttgtgttgtgcatccta

SEQ ID NO: 13079 - DNA, 2609 bp, Homo sapiens
cctgcggcgggctttagggagtggtccctggctgtggatagatctgctgatgagtccaggccccggtccattctcctcgcgctgcaaggatgctcctgggatttcggagaggccgcaggagtcatttcaaacacatcatccatggccttttacctgcagccagcgttgctccgaaggcagctgtgccacgcacacctcctccccgcagccccaacccatctccagagagaccaagatctgctctggcagcagccattctggcgacaacattgactgggcggacggttgctattcctcagcctcgccagaggtcccggtctgagagtgatgtgagcagtgttgaacaggacagcttcatcgagccctatgccaccacctcacagctgaggcctcggccaaattggcagagtgagatgggaagaagatcttctttgccatcctttgaaacactggactatggggacgaagaggacattgaaactcagctgtcatccagcggcaaggaattgggggatgtcagtgcccgggaggacagaggaggccacagtgatgacctgtacgctgtgccacacagaaatcaggtgccattgttacatgaggtgaacagtgaagacgatgaaaatatttctcatcaagatgggtttccaggctcccctcctgcaccacagcggacacaacaaaaagatggtaaacaccctgttctgaatttaaaggatgaaaaacctccattatgtgagaaacctccaccctccccagatataactggtagagcacgtcaaagatatacagaaataaccagagaaaagtttgaggcattaaaagaagaaaatatggacctaaacaatatgaatcaaagccttacccttgaactaaacacaatgaaacaagcaatgaaagaactacagttaaaacttaagggaatggaaaaagagaagagaaagctcaaagaggctgagaaggcgtcgtcacaggaagttgctgcacctgaattactttatctgcgaaaacaagctcaagaactggtggatgaaaatgatggattgaaaatgactgtccatcgtttgaatgtagaactcagtcgatatcagacaaaattcaggcatttgtccaaggaagagagcttaaatattgaaggcctcccatccaagggccctataccaccctggttgttggatataaagtacctgtcaccattgttgctggcttatgaagatatgatgaaagagaaggacgagctcaatgccaccctcaaggaggaaatgagaatgtttaggatgcgagtccaagaagtggtgaaagaaaatgaagaattgcaccaagagttaaataagagtagtgctgttaccagtgaggaatggcgtcagcttcagactcaagcaaaactggttttagaggaaaacaagttgttgctggagcagttggagattcagcaaaggaaagccaaggacagccaccaggagcgcctccaagaagtttctaagctgactaaacaactaatgctcctggaggcaaaaacccacggccaggaaaaggagctggcggagaacagggaacagctggagattttacgtgccaaatgccaagaactcaaaacacactcggatggcaaaatcgcagtggaagttcataaatcaattgtgaatgaattaaaaagccaattacagaaggaagaagagaaagaaagggctgagatggaggagttgatggagaagctgacagtcctgcaagcgcagaagaagagcctgctgttagagaagaacagtttgacagagcaaaacaaagcactggaagccgaacttgaacgagcacagaaaatcaataggaaatctcaaaagaaaattgaggtcctcaaaaagcaggtggaaaaagccatggggaacgaaatgtctgctcatcagtacctggcaaaccttgttggcctggcagaaaatataacccaggaacgtgacagtcttatgtgtttggcaaaatgtttagaaagtgagaaggatggagtgcttaataaagtcataaaaagcaacattcgcctgggaaagttagaggaaaaagtcaagggctacaagaagcaggcagcactgaagctgggggacatcagtcaccgtctgctggagcagcaggaggacttcgccggcaagacagcccagtaccggcaggagatgcggcacctgcaccaggtgctgaaggacaagcaggaggtgctggaccaggcgctgcagcagaacagagaaatggaaggtgaacttgaagttatttgggaatctaccttcagggaaaaccgaagaatccgagaacttctccaggacacactcacgaggacaggcgtgcaggacaaccccagagctctggttgcccccagcctcaatggcgtctctcaggcagacctgctggacggctgcgatgtctgctcctatgacctgaagtctcatgcccccacctgctagaatctgcgggagcccgtggtgtagcctcctctggcctgaaaggtctgcctcacacaggccttccctgcagggcagcccatggtggcagccggaggtgcgtaagcccactgaacgctgcagggcagggaagaaataaatggtctcatagtttaatccattgataaaaaa

SEQ ID NO: 13080 - DNA, 5338 bp, Homo sapiens
ggccgcgagtgcatcttccacgaacctaattcatctctccagcaaaggacacatctctccagcaaaggacacctctctccagcaaaggacacctgcagagatgtccccagtccttcacttctatgttcgtccctctggccatgagggggcagcccctggacacactcggaggaaactgcaagggaaactgccagagctgcagggcgtcgagactgaactgtgctacaacgtgaactggacagctgaggccctccccagtgctgaggagacaaagaagctgatgtggctgtttggttgccccttactgctggatgatgttgctcgggagtcctggctccttcctggctccaatgacctgctgctggaggtcgggcccaggctgaacttctccaccccaacatccaccaacatcgtgtcagtgtgccgcgccactgggctggggcctgtggatcgtgtggagaccacccggcgctaccggctctcgtttgcccaccccccgtcagctgaggtggaagccattgctctggctaccctgcacgaccggatgacagagcagcacttcccccatcccatccagagtttctcccctgagagcatgccggaacccctcaatggccctatcaatatactgggtgagggccggcttgcgctggagaaggccaaccaggagcttggtctggctttagactcttgggacctagacttctacaccaagcgcttccaggagctacagcggaacccgagcactgtggaggcctttgacttggcgcagtccaatagcgagcacagccgacactggttcttcaagggccagctccacgtggatgggcagaagctggtgcactcactgtttgagtccatcatgagcacccaggaatcctcgaaccccaacaacgtcctcaaattctgtgataacagcagtgcaatccagggaaaggaagtccgattcctacggcctgaggaccccacacggccaagccgcttccagcaacagcaagggctgagacatgttgtcttcacagcagagactcacaactttcccacaggagtatgcccctttagtggtgcaaccactggcacagggggccggattcgagatgtccagtgcacaggccgcggggcccacgtggtggctggcactgccggctattgctttggaaatctgcatattccaggttacaatctgccctgggaggatccaagcttccagtatcctgggaattttgcccggcccctggaggttgccattgaagccagtaatggagcttctgactatggcaacaagtttggggaaccagtgctggctggcttcgcccgctccttgggcctccagctcccagacggccagcggcgtgagtggatcaagcccatcatgtttagtgggggcattgggtccatggaagctgaccacataagcaaggaggccccagagccaggcatggaagttgtaaaggttggaggtcccgtctacaggattggagttggaggtggagctgcttcatctgtgcaggtgcagggagataacaccagtgacctggactttggggctgtgcagcgaggagacccggagatggaacagaagatgaaccgtgtgatcagggcttgtgtggaggcccccaagggaaaccccatctgcagccttcatgatcagggcgctggtggcaatggcaatgtcctaaaagagctgagtgacccagctggagccatcatttacaccagccgcttccagcttggggacccaaccctgaatgccctggaaatctggggggctgagtaccaggaatcaaatgctcttctgctgaggtcccccaaccgggacttcctgactcatgtcagtgcccgtgaacgttgcccggcttgcttcgtgggcaccatcactggagaccggagaatagtgctggtggacgatcgggagtgtcctgtcagaagaaatggccagggggatgcccccccgacacccctgccaacccctgtggacctggagctcgaatgggtgctgggcaagatgcctcggaaggagttcttcctgcagaggaagccccccatgctgcagcctctggccttgcccccagggctgagcgtgcaccaggctctggagagggttctgaggctgcccgccgtggccagcaagcgctacctcaccaataaggtggaccgctctgtgggaggcctggtggcccagcagcagtgcgtggggcccctgcaaactcctctggcagatgtagcggttgtggcactgagccatgaggagctcataggggctgccacagccttgggagaacagccagtcaagagcctgctggacccaaaagtcgccgcccggctggccgtggccgaagccctcaccaacctggtgtttgctctggtcactgacctccgggatgtgaagtgtagcgggaactggatgtgggcagccaagctcccaggggagggcgcagctttggcggatgcctgtgaggctatggtggcagtgatggcagccctgggtgtggcagtggatggtggcaaggactccctcagcatggctgctcgggttggcactgagaccgtgcgggctcctgggtcactggtcatctcagcctatgccgtctgcccagacatcacagccactgtgaccccagacctcaagcatcctgaagggagaggccatctgctctatgtggctctgagccctgggcagcaccggctcgggggcacagctctggcccagtgcttctcccagcttggggaacaccctccagacctggaccttcctgagaacttggtgcgggccttcagcatcactcaggggctgctgaaagaccgcctcctctgctcaggccacgatgtcagtgacggaggcctcgtcacatgcctgctggagatggcctttgctggaaattgcgggctacaggtggatgtgcctgtccccagggttgatgtcctgtctgtgctgttcgctgaggagccaggcctcgtgctggaggtgcaggagccagacctggcccaggtgctgaagcgttaccgggatgctggcctccattgcctggagctgggccacacaggcgaggccgggccccacgccatggtccgggtgtcagtgaacggggctgtggttctggaggagcctgttggggagctgcgagccctctgggaggagacgagtttccagctggaccggctacaggcagagcctcgctgtgtggcagaggaggaacggggcctgagggagcggatggggcccagctattgcctgccccccacctttcccaaagcctccgtgccccgtgagcctggtggtcccagcccccgagtcgccatcttgcgagaggagggcagtaatggagaccgggagatggccgatgccttccacttagctgggtttgaggtatgggacgtgaccatgcaggacctctgctctggggcaattgggctggacactttccgtggcgtggccttcgtgggcggcttcagctatgcagatgtcctgggctctgccaaagggtgggcagctgctgtgacctttcatcccagggctggggctgagctgaggcgcttccggaagcggccagacaccttcagcctgggcgtgtgtaatggctgtcaactgctggctctgctcggctgggtgggaggcgaccccaatgaggatgctgcagagatgggccctgactcccagccagcccggccaggccttctgctacgccacaacctgtctgggcgctacgagtctcgctgggccagcgtgcgtgtggggcctgggccagccctgatgctgcgagggatggagggcgccgtgctgcccgtgtggagtgcgcacggggaaggttacgtagcattttcttctccggaactccaagctcagattgaggccaggggcttggctccactgcactgggctgatgatgacgggaaccccacagagcagtaccctctgaatcccaatgggtccccagggggcgtggctggcatctgctcctgtgatggccgccacctggctgtcatgcctcaccctgagcgggccgttaggccttggcagtgggcatggcgaccccctccatttgatactctgaccacctccccctggctccagctctttatcaatgcccgaaactggaccctggaagggagctgctgactggccacaggggctcacctgggccccatggcttttcacctaagtgggtcctgccccctcccccatgaccttcaggagcaccccatattatttccaaaaatatcttggacagacaaggaccaaaatgccaaaatctcagcggactcgataatctgcctgctgatgttccttctgtggctgtgtctattttcagttctgctctaacatggcatgccctttctcagcccaggaaacagcatgtggttcagagaaaagagcgacaaggaaaagttaggactcctgaggtccgaacaggggcttctgttgcccacttcacaacacccagtgatcaccggtgtgcaattgcctccttggctctgagggatgttttgcgctcccttttctcatcattggggttagcgggtgcagacaaattcagcaatagtatgcagatcagcccctcaccacctcattgttctcatctggaactgaaactttctggatttctcttgaagtgctacactgcactgaatgtaaggaattgttgcttgtggaagtttctcagcgtttctggctgtcttagggctggcctcagaacccagcattcctgttatttgcttctaaattagcagctctctttttttttttttttttgaggcagtctcactctgtcacccaggctggagtacaatggcgtgatctcggcccactgcaacctctgcctcctgggttcaagcaattttcctgcctcagcctcccgagtagctgggagtacaggcacacaccaccacacccagctaatttttgtatttttagtagagatagggtttcaccatgtctcccaggctggtctcaaactcctaacctcaagtgattcgcctgcctcggcctcccaaagtgctgggattacaggtgggagccactacagctggcccagcagctctgtttctgatagaggtggttggggctctcatccctagatcctaaccctttagtatgctggaattctactcttcacttactgcattgactgttgttgattagttattattgcaaagcactgtcaccggcctcagggagtttatgtgtaatagaattaaaaataatagctgtgtataacacttagctcaagccacgcatgtgtgaggcatttggtatgtatctgaattaattctcactaaaattcagcaaaggacttgatagcccctccccgccttttcaataaaggatgaatgaaggttg

SEQ ID NO: 13081 - DNA, 6215 bp, Homo sapiens
gcagggagtgcgggtcggttctgcgtgcgctgccggacgaggctcccgccgccgattgacccgcgctccgcccgtagtcgggccgttctgttccaagagataaccattgggaccttggtagctaatgtccgaagaaagtgactctctgagaaccagcccttctgtggcctcactctctgaaaatgagctgccaccaccacctgagcctccgggctatgtgtgctcactgacagaagacctggtcaccaaagcccgggaagagctgcaggaaaagccggaatggagacttcgagatgtgcaggcccttcgtgacatggtgcggaaggagtaccccaacctgagcacatccctcgacgatgccttcctgctgcgcttcctccgagcccgcaagtttgattacgaccgggccctgcagctcctcgtcaactaccacagctgtagaagaagctggcccgaagtcttcaataacttgaagccatcagccttaaaagatgtccttgcttccgggttcctcaccgtgctgccccacactgaccccaggggctgccatgtcgtctgcatccgcccagacagatggataccaagcaactatccaattactgaaaacatccgagccatatacttgaccttagaaaaactcattcagtctgaagaaacccaggtgaatggaattgtaattcttgcagactacaaaggagtgagtttatcaaaagcatctcactttggcccttttatagccaaaaaggtgattggcatcctccaggatggtttccccattcggataaaagcagtccatgtggtgaatgaacctcgaatatttaaaggcatttttgccatcataaaaccatttctaaaggagaaaatagcaaacagattcttcctccatgggtctgacttgaactctctccacacaaaccttccaagaagcatcctccccaaggagtatgggggcacggctggggagctggacactgccacctggaacgcggtactgctggcttcagaagacgattttgtgaaagagttctgccaacctgttcctgcctgtgacagcatcctgggccagacgctgctgcccgagggcctgacctcagatgcacagtgtgacgactccttgcgagctgtgaagtcacagctgtactcctgctactagcccgtcccccagggtcaccatctttaattcttttccttcttttctttggagaggcacaaggagaatttaagggtccatggattcagtcttgctccttgtaattaaactgcaggatggaggaacagcctgagatatgagcatgagcccattttggggtaagcctttggttactttaattactccatggaagacatggaaaatgtccccactgattcttaaacatttggaatcccagtctgcaactattaatctggaggctatatctattttgttttgctttttggttggggggtggtgatctggttcttacacatcttggaagcaagaacaatcaggaccaaagtcactttgatcccacttttccaggagaaaaaccacctgtttggccagtgagaactacttgtatgaaataatttggccaaaccttcagtgtgaccaaatgtgagactgggagtttgtgtttttcacaggaaccctaagtatagacctctgctgctcatcaggaaacttactggagatgaaggccccagctgttgtcaccgggtttggaaagcaccttaactgaatcatgtaagcatcaggacataagcagcactttgtggtcaaatgtggaagccggagacttcaaagcacctctgggacccactggttgaagtttgcaatagaaacttaagttttcccaaatccataaagccttagccctggttctcaatagaatcagggacctagcaggaaatgattttactcaacctaaaatgctggatcccaggcccgtgtagctataagaattctggcctggatcccaggtgtacaactatggacaagatatgggcctctactttctcctctataaaatgaggctggatgaaatgtcagctagggccattttggctgctgaggctctgggatttggtttagttactgaatgttagattttctgcctagaaagataactatctagatacaagtggttggatcctgtttttgtttgtggtacatgtgtctttccaagagagatgtgtcaccaattagccctgcctttaaagaaactattatgtgtattcctgggactcactgacaccaattttctttttatagtgatggttcaattttgaaaagatggcttttgtgaggccaggttaaggtgaccaggatcttgtatgatgaattccttccatccctgagactctggtactatattgtaaacctggctacagtagttaattacttgagattctttaattttggtctctgagctgggcgtggtggttcatgcctgtaatcccagcactttgggaggccaaggtgtgcggatcacaaggtcaggagttcgagacccgcctggccaagatggtgaaaccccatctctactaaaaatacaaaaattagctgggcgtggtggcgggctcctgtagtcccagctactcgggaggctgaggcagaagaatcacgtgaacccaggaggcagaagtggcagtgagccaagatcgcaccactgcactccagcctgggcgacagagcaagactctgcctcaaaaaaaaaaaaaaaaaaaaaaaatttttttttttttggtctctggaaatgaacacaagggcaggttattcctgggtcacttctgggcccccctgccctcccagccccacttgagtttctctctctggtgtgggtgaaccagtcagcctgaatgttctgcatttcagcactttagaacctccctgtgaagattttagccttagcccaaacatcaaattagacggttcacatgatggtttttgacctatttcctttctaatgtattccacatgatcatggtgttaaatagtgaaaagtactgtgttgtgtgtgcaccttctccgtgcatttattagactaaccagtcaagcagacagctcagttagggagaaaacaatactctgaaatttgaaggccaatctgttgttactaagctgtttatctctattgcctttttaaatgtctggataagttgttggtggaaattaagttacttaacctcattaataccaattctagagaaagttcttttcaccatggatagtaaccctggatcctctacggtactggctgagctggaagtgccaaaaagcactcctggctgcttctggttccatctgatgatgatgtgacacacactgctgaaaaggcccaagcagggcaagtgggatggctgaaggagggaaggagggggttcagaacccactggcctggatgggagaactgggtggaggcttccccaagagggaagacagataaacaaaacaaaacaaaaactgggtaaagaggaatgaatcactcagccctgatgtttcaattctacactgcattcctggccagtcgcatttgttttaatgcaggcatggccacagctctcctagagaattatctcaaagaccagaagggacctggagaggcctatttcttaggtttttccagttggacaaggaaggagtggtttcactcagcttctagaaggagttggagcctaagtttatctgcctccgggagctgcttgctttgttttggctccgaagaggtatcagatagttttgacacctcaggaaacttgaaccaagctgtgaaaccaagacctccctgcgtgaaaatcaaggtggtctccttgtggcttcaccaggatgtttgtgtcaggctgtctcagcagggtggggaatgaccagccagggagcacagtgagccttactcagcactggggagcgcactggtgaggcaaacccatgaacctcaagaactgggagtatgttccttcagggagaagttctggcccattgcacaaacacttggaaattaacttttccctaaattcaagatagtgtggtgtcggaaggaaatgggacagtaaattaggagacgcgggctccacctttaccttactacgtggcctttgatgagctggcttaacatccctgagtgattccatgatagagatctatactccaaactttattcctggtatctagttggcttcactgccacagacactgtactctctctttttagaagtttttttccttttttttccccctcaattggcttatttagtaaatttaggtctgaatgaattggtacctaaaagcttccaaatctatacatttcagaatatgggaattttcttcctcttcttcccccatatcccaacatggaattctggaaaactgtgcctcttcccctgttctgccttcatgggggagagactggatgaaatctacaaaaacagccaaaagtgccaccctggcttcatgtcttgaatttctaacttgctcttggcaaaggtcgctttattttttaatttttttccttgcattttcttttttattctattgctgctgcaaaaattaaggcaaaagtagctttcgatctttcatatttcatcctggtttcacaaggagtcacttatcttaggaggtctgtaagtcaggttacaaggccgggagcggtggctcacacctgtaatcccaacactttgagcggctgaggtgggtgtatcacctgaagtccggagtttgagaccagcctggccaacatggtgaaaccccgtctctactaaaaatacaaaaaattggctgggcatggtggtgggtgcctgtaatcccagctacttgggaagctgaagcaggagaatcacttaaacccaggtggcggaggttgcagtgagccgacatcgcgccattgcactccagcctgggtgacgagtgaaactccatctcaaaaataaaaattgaaaaatcaggttacaaaacaccatttttcccgaaataagacaataagaggcttttctctgaattcctttatattgagcctttcagaattctccctgggtgggcaatttctttaaatagtatttgaccctcagatcaatcctgggaatttttttcatttgggtagcaaaagctagagtattgctgtggcgattataatacttttaaaaagttttaccattttaaagttgccaacatttaattaaggttttcctttgaagcctcctttaatttagggagtaaaatgttagctaaaccaattatatactatatactatacactgtatctcctgtggccatgagaggtgtggctataccgaacagaaacatgcctactgttcaggaaagatgtcagttctggtaacacctctctgtattgggatctgttaattttgtaaatctaaattcttctgctcttggccaggtgcagtagttcatgccctgtaatcctagaactttgggaggctgaagggggggcggatcatttgaggtcaggagtttgagaccagcctggccaacatggtgaaaccccatctctactaaaaagtacaaaaattagctgggtgtggtggtgcgtgcctgtaatcccaactacttgggaggctgaggcaggagaatcgcttgaacctgggaggcagcggttgcagtaagccaagactatgccactgcactcccgcctgggtgacaaagcaatattctgtgtcaaataaataaattcattcttctgctctcctgacttagagaaatggtttgcttaaaatgctagtaacaaacatcacagtcaacaggagcttgcttcatgcgaaggatcaatgtgatttgtggatggagatgatagtgatgaaattcctgtttcatggggctgtttttcttttcatctcactgggcagcaggtttagtgaggcagtgagatgctgctgctgtggattcttgtagctatgcctcggcttcttggcatatcaggtaggaacctgttacaagtgaaatacttgaaacctctctgaccaagagcctctgatggagtgggaggtgagctaattctctgaccagcttggggcactgtttcagccactggtcacattccttgcttcaaactgaaattcagtttggctttgagtatagggatacatggtggattcatgtacttcagtgtttgttttgaccaaagtttatttttctagtgcattttctaagtcaaagtggtgaaaatatgtaataattttagtatgcatgactcagtctgaaacaataaaaatctctgaaaaatgtg

SEQ ID NO: 13082 - DNA, 6182 bp, Homo sapiens
ggtccccggctgcccgcagcccgctcgcggcgcttctccggcccggctccttctccgctcgttaacgtcgccaaccccccccacccctcatatctctctccacccacccaaccgccccccgctccttctcgccgcctcgagtccgcttgggggaaaacttcaaagagccggatcgcaggctccctgcctactcccccaccggggatttcagactagacgcttgaagcaaagctgccatcccagaagacgacatgctctcagcaacccccctgtatgggaacgttcacagctggatgaacagcgagagggtccgcatgtgtggggcgagcgaagacaggaaaatccttgtaaatgatggtgacgcttcaaaagccagactggaactgagggaagagaatcccttgaaccacaacgtggtggatgcgagcacggcccataggatcgatggcctggcagcactgagcatggaccgcactggcctgatccgggaagggctgcgggtcccgggaaacatcgtctattctagcttgtgtggactgggctcagagaaaggtcgggaggctgccacaagcactctaggtggccttgggttttcttcggaaagaaatccagagatgcagttcaaaccgaatacacccgagacagtggaggcttctgccgtctctggaaaacccccaaatggcttcagtgctatatacaaaacaccgcctggaatacaaaaaagtgctgtagccacagcagaagcgctgggcttggacaggcctgccagcgacaaacagagccctctcaacatcaatggtgctagttatctgcggctgccctgggtcaatccttacatggagggtgccacgccagccatctaccctttcctcgactcgccaaataagtattcactgaacatgtacaaggccttgctacctcagcagtcctacagcttggcccagccgctgtattctccagtctgcaccaatggggagcgctttctctacctgccgccacctcactacgtcggtccccacatcccatcgtccttggcatcacccatgaggctctcgacaccttcggcctccccagccatcccgcctctcgtccattgcgcagacaaaagcctcccgtggaagatgggcgtcagccctgggaatcctgttgattcccacgcctatcctcacatccagaacagtaagcagcccagggttccctctgccaaggcggtcaccagtggcctgccgggggacacagctctcctgttgcccccctcgcctcggccgtcaccccgagtccaccttcccacccagcctgctgcagacacctactcggagttccacaagcactatgccaggatctccacctctccttcagttgccctgtcaaagccatacatgacagttagcagcgagttccccgcggccaggctctccaatggcaagtatcccaaggctccggaagggggcgaaggtgcccagccagtgcccgggcatgcccggaagacagcggttcaagacagaaaagacggcagctcacctcctctgttggagaagcagaccgttaccaaagacgtcacagataagccactagacttgtcttctaaagtggtggatgtagatgcttccaaagctgaccacatgaaaaagatggctcccacggtcctggttcacagcagggctggaagtggcttagtgctctccggaagtgagattccgaaagaaacactatctcctccaggaaatggttgtgctatctatagatctgaaatcatcagcactgctccctcatcctgggtggtgcccgggccaagtcctaacgaagagaacaatggcaaaagcatgtcgctgaaaaacaaggcattggactgggcgataccacagcagcggagttcatcatgcccgcgcatgggcggcaccgatgctgtcatcactaacgtttcagggtcagtgtcgagtgcaggccgcccagcctccgcatcacccgcccccaatgccaatgcagatggcaccaaaaccagcaggagctctgtagaaaccacaccatccgttattcagcacgtgggccagcccccggccactcctgccaagcacagtagcagcaccagcagcaagggcgccaaagccagcaacccagaaccgagtttcaaagcaaacgagaacggccttccaccaagctctatatttctgtctccaaatgaggcattcaggtccccaccaattccctaccccaggagttacctcccttacccagcccctgagggcattgctgtaagtcccctctccttacatggcaaaggacctgtctaccctcacccagttttgttacccaatggcagtctgtttcctgggcaccttgccccaaagcctgggctgccctatgggcttcccaccggccgtccagagtttgtgacctaccaagatgccctggggttgggcatggtgcatcccatgttgataccacacacgcccatagagattactaaagaggagaaaccagagaggagatcccggtcccatgagagagcccgttacgaggacccaaccctccggaatcggttttccgagattttggaaactagcagcaccaagttacatccagatgtccccaccgacaagaacctaaagccgaaccccaactggaatcaagggaagactgttgtcaaaagcgacaagcttgtctacgtagaccttctccgagaagaaccagatgctaaaactgacacaaacgtgtccaaacccagctttgcagcagagagtgttggccagagcgctgagccccccaagccctcagttgagccggccctgcagcagcaccgtgatttcatcgccctgagagaggagttggggcgcatcagtgacttccacgaaacttatactttcaaacagccagtcttcaccgtaagcaaggacagtgttctggcaggtaccaacaaagagaacctagggttgccagtctcgactccattcctggagccacctctggggagcgatggccctgctgtaacttttggtaaaacccaagaggatcccaaaccattttgtgtgggcagtgccccaccaagtgtggatgtgacccccacctataccaaagatggagctgatgaggctgaatcaaatgatggcaaagttctgaaaccgaagccatctaagctggcaaagagaatcgccaactcagcgggttacgtgggtgaccgattcaaatgtgtcactaccgaactgtatgcagattccagtcagctcagccgggagcaacgggcattgcagatggaaggattacaagaggacagtattttatgtctacccgctgcttactgtgagcgtgcaatgatgcgcttctcagagttggagatgaaagaaagagaaggtggccacccagcaaccaaagactccgagatgtgcaaattcagcccagccgactgggaaaggttgaaaggaaatcaggacaaaaagccaaagtcggtcaccctggaggaggccattgcagaacagaacgaaagtgagagatgcgagtatagtgttggaaacaagcaccgtgatccctttgaagccccagaggacaaagatcttcctgtggagaagtactttgtggagaggcagcctgtgagcgagcctcccgcagaccaggtggcctcggacatgcctcacagccccaccctccgggtggacaggaaacgcaaagtctcaggtgacagcagccacactgagaccactgcggaggaggtgccagaggaccctctgctgaaagccaaacgccgacgagtctctaaagggctccatcctaaaaaacaacgccacttgctgcaccttagagaacgatgggagcagcaggtgtcggcagcagatggcaaacctggccggcaaagcaggaaggaagtgacccaggccactcagcctgaggccattcctcaggggactaacatcactgaagagaaacctggcaggaaaagggcagaggccaaaggcaacagaagctggtcggaagagtctcttaaacccagtgacaatgaacaaggcttgcctgtgttctccggctctccgcccatgaagagtctttcatccaccagtgcaggcggcaaaaagcaggctcagccaagctgcgcaccagcctccaggccgcctgccaaacagcagaaaattaaagaaaaccagaagacagatgtgctgtgtgcagacgaagaagaggattgccaggctgcctccctgctgcagaaatacaccgacaacagcgagaagccatccgggaagagactgtgcaaaaccaaacacttgatccctcaggagtccaggcggggattgccactgacaggggaatactacgtggagaatgccgatggcaaggtgactgtccggagattcagaaagcggccggagcccagttcggactatgatctgtcaccagccaagcaggagccaaagcccttcgaccgcttgcagcaactgctaccagcctcccagtccacacagctgccatgctcaagttcccctcaggagaccacccagtctcgccctatgccgccggaagcacggagacttattgtcaataagaacgctggcgagacccttctgcagcgggcagccaggcttggctatgaggaagtggtcctgtactgcttagagaacaagatttgtgatgtaaatcatcgggacaacgcaggttactgcgccctgcatgaagcttgtgctaggggctggctcaacattgtgcgacacctccttgaatatggcgctgatgtcaactgtagtgcccaggatggaaccaggcctctgcacgatgctgttgagaacgatcacttggaaattgtccgactacttctctcttatggtgctgaccccaccttggctacgtactcaggtagaaccatcatgaaaatgacccacagtgaacttatggaaaagttcttaacagattatttaaatgacctccagggtcgcaatgatgatgacgccagtggcacttgggacttctatggcagctctgtttgtgaaccagatgatgaaagtggctatgatgttttagccaaccccccaggaccagaagaccaggatgatgatgacgatgcctatagcgatgtgtttgaatttgaattttcagagacccccctcttaccgtgttataacatccaagtatctgtggctcaggggccacgaaactggctactgctttcggatgtccttaagaaattgaaaatgtcctcccgcatatttcgctgcaattttccaaacgtggaaattgtcaccattgcagaggcagaattttatcggcaggtttctgcaagtctcttgttctcttgctccaaagacctggaagccttcaaccctgaaagtaaggagctgttagatctggtggaattcacgaacgaaattcagactctgctgggctcctctgtagagtggctccaccccagtgatctggcctcagacaactactggtgagcaagctggacccaccatgtacagtgtgttatagtgttaatccttgtgcatatgtgtcataatacaactatttctgtaaagaaaggacactattacatatgaaaatatctcttctttatataagagaaattactccagtcagaaggacttagaaacatgtttttttccttttaaacttttaagtcagtttttatgaagttgttataatgtttctttacttttcaatgcacacatgctttgggatacgtttgtttttacttggaacatttgtttcttttcttttttaaggagaaaaaaaaatgagtaaaaggagctccacactttgacttaatttcatacaaagctctgatgacaggccatgactgtagagtggtcagaactgtgtggttggtttgagggagcgaattcggggaaggcacttggtgatataactttgttttgtttacagagtacctgctcgggccaggtaaatgctattggatgtaatccagtagtgtgtaatataaattcaaaccatatccacacacaacaactaattgtatgaaacttttatatcctaatttaaaagctgtgaaattagttttcacgcatcaaaccggattgtttatatgtttaaacattttatgctcttatttaaagaagactttgagctatttttttctgtaccctgtaaaatattgaaaactaacataatatgttgaggttgcttggaaatgtacataaaactaaaattttctgaatcgtgaaaaaaaaaaaaaaaaaaaa

SEQ ID NO: 13083 - DNA, 6750 bp, Homo sapiens
ccctaggcccgggtcccggatccccgcgcacccggccaggctctggcacgttttgggggaggtgcctgcaggacccaacatactcaatgagcttccagcgcaatgtccgatcgctcggggccgactgccaagggaaaggatggaaagaagtattcctcgctcaacctgtttgatacgtataagggcaagtccttagagatccagaaacccgctgttgcccctcgccatggcctgcagagtctcgggaaagttgccattgcccggcgtatgccacctccagccaaccttccaagcctgaaagccgagaacaaaggcaatgaccccaatgtctcactagtgccaaaagacggaacaggatgggcaagcaaacaggagcagtccgaccccaagagttccgatgcctcaaccgctcagccgccggaatcgcagccactgccggcttcacagacgcctgcctccaaccagccgaaacgacccccagcagcccccgagaacactcctttggttccaagcggggtaaagtcctgggcacaagccagcgtcacccatggagcacatggagatggtggaagggcatcaagcctactgtcacgattctctcgagaggaatttccgaccctgcaggcggctggcgaccaggacaaggctgccaaggaaagggagtctgccgaacagtcgtctgggcccggaccaagcctccgcccccaaaattctacaacttggagggacggaggtgggcgtggccctgatgagctggagggcccggactccaaacttcatcatggtcatgatccccggggtgggctacagccttcaggcccaccccagttccctccctaccgcggaatgatgccgcctttcatgtatcccccatatctcccgttccctccgccctatggaccccaggggccttaccgataccccactcctgatgggcccagccgttttccccgtgtggcgggcccccgaggctcagggccaccaatgcgcttagtagagcctgtgggtcgtccctctattctcaaagaggataatctcaaagagtttgatcagttggatcaggagaatgatgatggttgggcaggggcccatgaagaggttgactacactgaaaagctcaagttcagcgatgaggaagatgggcgagactctgatgaggagggagctgagggccacagggattcccaatcagcttctggtgaggaacggccccctgaagcagatggcaaaaagggcaactcccccaacagcgaaccgcccactcctaagacggcctgggcagaaacctctcggcctccagagacagagccgggacctcctgccccaaagcctcccctacccccacctcaccggggccccgccgggaactggggcccccctggggactacccagatcgtgggggtcctccctgcaagcccccagcacctgaagatgaggatgaggcatggcggcagcgacgaaagcagtcgtcatctgagatttccctggcagtggagcgggcccggcgacggcgagaagaagaggagcggcgcatgcaagaagagcgccgggcagcctgtgctgagaagctcaagcgactcgatgaaaagtttggggcacctgacaagcggctcaaagcagagcctgctgccccacctgctgccccttctaccccagctccaccacctgcagtccctaaagaactccctgcacctccagctccacctccagcatcagccccaacaccagagaaagaacctgaagagccagcacaggcccctcctgcccaatctactcctactccaggtgtggctgcggctcccactctggtgagtggtggtggcagtaccagtagcaccagcagtggcagcttcgaagccagcccagtggaaccacaactgccctcaaaagagggtcctgaaccaccagaagaggttcctcctcctaccacacccccagttccaaaggtggaacccaagggtgatgggattggtcccacccgccagccccctagtcagggcttgggctaccccaaatatcagaagtcgttgcctcctcgtttccagcggcagcagcaggagcagctcctgaagcagcagcagcagcaccagtggcagcagcatcaacagggctctgcccctcctaccccagtgcccccatcaccaccacagcctgtgaccctgggggctgtgccagctccacaggctccacccccgccccccaaggccctgtacccaggtgctctgggccggcccccacccatgcccccaatgaactttgatccccgatggatgatgattcctccttatgtggacccccggctcctccagggtcgtccccctctagacttctaccctcctggtgtgcatccctctggcctagttccccgagagcgttcagacagtgggggctcaagctcagagccatttgaccgtcatgcacctgctatgttacgggaacggggcactccaccggtggatccaaagttggcctgggtaggagatgtcttcaccgccacacccgctgaaccccgcccacttacctcacctctgcgccaggctgcggatgaggatgacaaggggatgaggagcgagactcctccagtacctcccccaccaccctatctggccagttatccaggctttcctgagaatggagcccctgggcccccaatctctcgctttcctctggaggaaccagggccccgtccactcccctggcccccaggcagtgatgaagtggccaagatacaaactccaccacccaagaaggagccccctaaggaggagactgcacagctgacggggccagaagcaggccgaaagcctgcccgcggagtcgggagtggaggccagggccccccaccaccacgcagagagagtcgcacagagacccgctggggccctcgtccagggagcagtcgtcgtggaatccctccagaggagccaggggccccaccccgccgggctgggcctataaagaaacctccaccacctacaaaagtagaagagctgcctcccaagcccctcgaacagggggatgaaacccccaaacccccaaagccagacccactcaagataaccaaggggaagctagggggccccaaggagaccccacccaatggaaatctttcccctgccccaaggcttcggagggactattcgtatgaaagagtgggtcctacctcttgccggggtcggggccgaggcgagtattttgccagagggaggggttttcgggggacctatgggggacgagggcggggagcccgaagccgggaattccgcagttaccgagagtttcgaggagatgatgggcgtggaggtgggacagggggaccaaaccaccctcctgctccccgaggccgcactgccagcgagacacggagcgagggttcagagtatgaggaaatccccaagcggcgccggcagcggggctcagaaacaggcagcgagacccatgagagtgatctggctccttcagacaaggaggctcccacacccaaggagggaacactcacccaggtccctctcgctcccccaccaccaggagccccaccttcaccagccccagcccgcttcactgcccggggtgggcgagtcttcactcccagaggggtgccatctcgccggggccgaggaggagggaggccccctcctcaagtttgcccaggctggagccctccagccaagtctctggctcccaagaaacctcccacaggccctttgccaccaagtaaggagcctttgaaagagaagttgatcccagggcctctgtcccctgtggcgcgcggaggcagcaatggaggtagcaatgtgggcatggaagatggggagcgaccccgaaggaggcgacatgggagggctcagcagcaggataaaccgcctcgtttccggaggctgaagcaggaacgggagaatgccgcaagggggtctgagggcaagccctccctaacccttccagcctccgctcctgcacctgaggaggccctcacaacagtcacagtggccccagcacctcgccgggcagctgccaagtctcctgatctgtcaaaccagaactcagaccaagccaatgaggaatgggagactgcatcagagagcagtgacttcaccagtgagcgccgaggggacaaagaggcacccccaccagtactgctgacacccaaggctgtgggaactcctgggggaggtggaggtggagccgtaccaggtatttcagccatgtcccgcggagatctgagccagagagccaaggatttgagtaaacggagcttctcaagtcagcggccaggcatggaacggcagaatcggcgccctggcccagggggcaaggctggcagcagtggcagcagcagtggaggaggcggtgggggtcctggaggaaggaccgggccaggacgaggcgacaagaggagctggccctctcccaagaaccgaagtcgtcctccagaggagcgtcccccggggcttcccctgcctcccccacctcccagcagttctgctgtcttccgcctggaccaagttatccacagcaaccctgctggcatccaacaggctctggcccagcttagtagccgtcaagggagtgtaactgcaccagggggtcatccaaggcacaagcctgggcctccccaagcccctcagggcccctctcctaggcccccaacccgatacgagccccagagggtcaacagcggcctcagttctgacccccactttgaggagccggggccaatggtgagaggggtgggtgggactcctcgggactctgccggggttagtccctttccccctaaacgtcgggagcggcctcccagaaaaccagagctgctacaggaggaatctttgccacctcctcatagctctggattcttgggctctaagcctgagggcccaggccctcaggcagagtccagagatacaggcacagaggccctgacccctcacatctggaaccgtttacatactgccactagccgaaagagttaccggcccagctccatggagccttggatggagcccctgagtccttttgaggatgtggctggcacagaaatgagtcagtctgacagtggggtggacctgagtggggattctcaggtgtcatcaggtccctgcagccagcgaagttcccctgatggaggactcaagggggcagcagagggaccccccaagaggcctggaggctcctcacccctgaatgctgttccttgtgagggtccacctggctctgaacctcctaggagaccaccacctgccccccacgatggggacagaaaggagctgccccgggagcagcctctgccccctggccccattggcacagaacgatcacagcatacagaccgaggcacagagcctggccccattcggccatcccatcgacctggtcccccagtccagtttggcactagtgacaaggactcagacttacgcctagtggtaggagacagcttgaaagcagagaaggagctaacagcatcagtcactgaggccattcctgtatcacgagactgggagctgcttcccagtgctgctgcctctgctgagccacaatccaagaacctggattctgggcactgtgtcccggagcccagctcctcaggccagcgcctgtatcctgaggttttctatggcagtgctgggccttccagttctcagatctctgggggagccatggactctcaattacatccaaacagtggaggcttccgccctgggacaccctcactgcacccttacagatcacagcccctatacctaccccccggcccagcccctccctcagcactgctctctggggtagctctcaagggccagtttctggatttctccacaatgcaagctacagagctggggaagttgccggctggaggagttctctaccctccaccttccttcctctactctccggctttctgccccagtcctttgcctgacacatcgttgcttcaggtacgccaggatctgccatccccttcggatttttattctactcctctgcagcctggtggccaaagtggctttctcccttcaggggctcctgcccagcagatgcttctacccatggtagactcacagctgcctgtggtgaactttggctccctgccgccagcaccacctcctgccccacctcccctttctctgttacctgtgggccctgctctgcagccccccagcctggctgtgcggcccccacctgctcctgctactcgggtgctgccttcacctgccaggcccttccccgctagcttggggcgagcagagctgcatccagtggaactaaagccgttccaggattatcaaaaactgagcagcaaccttgggggacctggatcatcacggactcccccaactggaaggtccttctctggcctcaattcccgtctcaaggccacgccttccacctacagtggagtcttccgcacccagcgcgtcgacctttaccagcaggcctccccaccagatgccctgcgctggatacctaagccttgggagcggacagggctgccacctcgagaagggccctcccgacgggcagaggagcctgggtcccgaggggacaaggagcctgggttgcccccaccccgctgagggagttcctcttgccccctacccccggggcttgtatatagattataaatatataagggggaaaggggtgggcggggaggggttgtggggctggggcctcacttcccctcctcccccttcccctggtcccctgtccctggggctgtttgttaaaaaagagtaataaaaggattt

SEQ ID NO: 13084 - DNA, 6714 bp, Homo sapiens
ccctaggcccgggtcccggatccccgcgcacccggccaggctctggcacgttttgggggaggtgcctgcaggacccaacatactcaatgagcttccagcgcaatgtccgatcgctcggggccgactgccaagggaaaggatggaaagaagtattcctcgctcaacctgtttgatacgtataagggcaagtccttagagatccagaaacccgctgttgcccctcgccatggcctgcagagtctcgggaaagttgccattgcccggcgtatgccacctccagccaaccttccaagcctgaaagccgagaacaaaggcaatgaccccaatgtctcactagtgccaaaagacggaacaggatgggcaagcaaacaggagcagtccgaccccaagagttccgatgcctcaaccgctcagccgccggaatcgcagccactgccggcttcacagacgcctgcctccaaccagccgaaacgacccccagcagcccccgagaacactcctttggttccaagcggggtaaagtcctgggcacaagccagcgtcacccatggagcacatggagatggtggaagggcatcaagcctactgtcacgattctctcgagaggaatttccgaccctgcaggcggctggcgaccaggacaaggctgccaaggaaagggagtctgccgaacagtcgtctgggcccggaccaagcctccgcccccaaaattctacaacttggagggacggaggtgggcgtggccctgatgagctggagggcccggactccaaacttcatcatggtcatgatccccggggtgggctacagccttcaggcccaccccagttccctccctaccgcggaatgatgccgcctttcatgtatcccccatatctcccgttccctccgccctatggaccccaggggccttaccgataccccactcctgatgggcccagccgttttccccgtgtggcgggcccccgaggctcagggccaccaatgcgcttagtagagcctgtgggtcgtccctctattctcaaagaggataatctcaaagagtttgatcagttggatcaggagaatgatgatggttgggcaggggcccatgaagaggttgactacactgaaaagctcaagttcagcgatgaggaagatgggcgagactctgatgaggagggagctgagggccacagggattcccaatcagcttctggtgaggaacggccccctgaagcagatggcaaaaagggcaactcccccaacagcgaaccgcccactcctaagacggcctgggcagaaacctctcggcctccagagacagagccgggacctcctgccccaaagcctcccctaccccctggggactacccagatcgtgggggtcctccctgcaagcccccagcacctgaagatgaggatgaggcatggcggcagcgacgaaagcagtcgtcatctgagatttccctggcagtggagcgggcccggcgacggcgagaagaagaggagcggcgcatgcaagaagagcgccgggcagcctgtgctgagaagctcaagcgactcgatgaaaagtttggggcacctgacaagcggctcaaagcagagcctgctgccccacctgctgccccttctaccccagctccaccacctgcagtccctaaagaactccctgcacctccagctccacctccagcatcagccccaacaccagagaaagaacctgaagagccagcacaggcccctcctgcccaatctactcctactccaggtgtggctgcggctcccactctggtgagtggtggtggcagtaccagtagcaccagcagtggcagcttcgaagccagcccagtggaaccacaactgccctcaaaagagggtcctgaaccaccagaagaggttcctcctcctaccacacccccagttccaaaggtggaacccaagggtgatgggattggtcccacccgccagccccctagtcagggcttgggctaccccaaatatcagaagtcgttgcctcctcgtttccagcggcagcagcaggagcagctcctgaagcagcagcagcagcaccagtggcagcagcatcaacagggctctgcccctcctaccccagtgcccccatcaccaccacagcctgtgaccctgggggctgtgccagctccacaggctccacccccgccccccaaggccctgtacccaggtgctctgggccggcccccacccatgcccccaatgaactttgatccccgatggatgatgattcctccttatgtggacccccggctcctccagggtcgtccccctctagacttctaccctcctggtgtgcatccctctggcctagttccccgagagcgttcagacagtgggggctcaagctcagagccatttgaccgtcatgcacctgctatgttacgggaacggggcactccaccggtggatccaaagttggcctgggtaggagatgtcttcaccgccacacccgctgaaccccgcccacttacctcacctctgcgccaggctgcggatgaggatgacaaggggatgaggagcgagactcctccagtacctcccccaccaccctatctggccagttatccaggctttcctgagaatggagcccctgggcccccaatctctcgctttcctctggaggaaccagggccccgtccactcccctggcccccaggcagtgatgaagtggccaagatacaaactccaccacccaagaaggagccccctaaggaggagactgcacagctgacggggccagaagcaggccgaaagcctgcccgcggagtcgggagtggaggccagggccccccaccaccacgcagagagagtcgcacagagacccgctggggccctcgtccagggagcagtcgtcgtggaatccctccagaggagccaggggccccaccccgccgggctgggcctataaagaaacctccaccacctacaaaagtagaagagctgcctcccaagcccctcgaacagggggatgaaacccccaaacccccaaagccagacccactcaagataaccaaggggaagctagggggccccaaggagaccccacccaatggaaatctttcccctgccccaaggcttcggagggactattcgtatgaaagagtgggtcctacctcttgccggggtcggggccgaggcgagtattttgccagagggaggggttttcgggggacctatgggggacgagggcggggagcccgaagccgggaattccgcagttaccgagagtttcgaggagatgatgggcgtggaggtgggacagggggaccaaaccaccctcctgctccccgaggccgcactgccagcgagacacggagcgagggttcagagtatgaggaaatccccaagcggcgccggcagcggggctcagaaacaggcagcgagacccatgagagtgatctggctccttcagacaaggaggctcccacacccaaggagggaacactcacccaggtccctctcgctcccccaccaccaggagccccaccttcaccagccccagcccgcttcactgcccggggtgggcgagtcttcactcccagaggggtgccatctcgccggggccgaggaggagggaggccccctcctcaagtttgcccaggctggagccctccagccaagtctctggctcccaagaaacctcccacaggccctttgccaccaagtaaggagcctttgaaagagaagttgatcccagggcctctgtcccctgtggcgcgcggaggcagcaatggaggtagcaatgtgggcatggaagatggggagcgaccccgaaggaggcgacatgggagggctcagcagcaggataaaccgcctcgtttccggaggctgaagcaggaacgggagaatgccgcaagggggtctgagggcaagccctccctaacccttccagcctccgctcctgcacctgaggaggccctcacaacagtcacagtggccccagcacctcgccgggcagctgccaagtctcctgatctgtcaaaccagaactcagaccaagccaatgaggaatgggagactgcatcagagagcagtgacttcaccagtgagcgccgaggggacaaagaggcacccccaccagtactgctgacacccaaggctgtgggaactcctgggggaggtggaggtggagccgtaccaggtatttcagccatgtcccgcggagatctgagccagagagccaaggatttgagtaaacggagcttctcaagtcagcggccaggcatggaacggcagaatcggcgccctggcccagggggcaaggctggcagcagtggcagcagcagtggaggaggcggtgggggtcctggaggaaggaccgggccaggacgaggcgacaagaggagctggccctctcccaagaaccgaagtcgtcctccagaggagcgtcccccggggcttcccctgcctcccccacctcccagcagttctgctgtcttccgcctggaccaagttatccacagcaaccctgctggcatccaacaggctctggcccagcttagtagccgtcaagggagtgtaactgcaccagggggtcatccaaggcacaagcctgggcctccccaagcccctcagggcccctctcctaggcccccaacccgatacgagccccagagggtcaacagcggcctcagttctgacccccactttgaggagccggggccaatggtgagaggggtgggtgggactcctcgggactctgccggggttagtccctttccccctaaacgtcgggagcggcctcccagaaaaccagagctgctacaggaggaatctttgccacctcctcatagctctggattcttgggctctaagcctgagggcccaggccctcaggcagagtccagagatacaggcacagaggccctgacccctcacatctggaaccgtttacatactgccactagccgaaagagttaccggcccagctccatggagccttggatggagcccctgagtccttttgaggatgtggctggcacagaaatgagtcagtctgacagtggggtggacctgagtggggattctcaggtgtcatcaggtccctgcagccagcgaagttcccctgatggaggactcaagggggcagcagagggaccccccaagaggcctggaggctcctcacccctgaatgctgttccttgtgagggtccacctggctctgaacctcctaggagaccaccacctgccccccacgatggggacagaaaggagctgccccgggagcagcctctgccccctggccccattggcacagaacgatcacagcatacagaccgaggcacagagcctggccccattcggccatcccatcgacctggtcccccagtccagtttggcactagtgacaaggactcagacttacgcctagtggtaggagacagcttgaaagcagagaaggagctaacagcatcagtcactgaggccattcctgtatcacgagactgggagctgcttcccagtgctgctgcctctgctgagccacaatccaagaacctggattctgggcactgtgtcccggagcccagctcctcaggccagcgcctgtatcctgaggttttctatggcagtgctgggccttccagttctcagatctctgggggagccatggactctcaattacatccaaacagtggaggcttccgccctgggacaccctcactgcacccttacagatcacagcccctatacctaccccccggcccagcccctccctcagcactgctctctggggtagctctcaagggccagtttctggatttctccacaatgcaagctacagagctggggaagttgccggctggaggagttctctaccctccaccttccttcctctactctccggctttctgccccagtcctttgcctgacacatcgttgcttcaggtacgccaggatctgccatccccttcggatttttattctactcctctgcagcctggtggccaaagtggctttctcccttcaggggctcctgcccagcagatgcttctacccatggtagactcacagctgcctgtggtgaactttggctccctgccgccagcaccacctcctgccccacctcccctttctctgttacctgtgggccctgctctgcagccccccagcctggctgtgcggcccccacctgctcctgctactcgggtgctgccttcacctgccaggcccttccccgctagcttggggcgagcagagctgcatccagtggaactaaagccgttccaggattatcaaaaactgagcagcaaccttgggggacctggatcatcacggactcccccaactggaaggtccttctctggcctcaattcccgtctcaaggccacgccttccacctacagtggagtcttccgcacccagcgcgtcgacctttaccagcaggcctccccaccagatgccctgcgctggatacctaagccttgggagcggacagggctgccacctcgagaagggccctcccgacgggcagaggagcctgggtcccgaggggacaaggagcctgggttgcccccaccccgctgagggagttcctcttgccccctacccccggggcttgtatatagattataaatatataagggggaaaggggtgggcggggaggggttgtggggctggggcctcacttcccctcctcccccttcccctggtcccctgtccctggggctgtttgttaaaaaagagtaataaaaggattt

SEQ ID NO: 13085 - DNA, 2726 bp, Homo sapiens
cggcacgaggctggttgccggggcaggggcggaggcggaggcagaggtggaggcgctttgaaagccgtcattgtgtggcactggacggggaatcaagagacccggtttctaatccctgctctgtcactaacaagctgcgtgatcttcggaaaaaagtaatcctcttggaaagctggaaacatagtccgaagcttaagtgaaaatgatacatgttagaagacatgaaacaaggagaaattctaagagtcacgtgcctgagcagaaatctcgagttgattggaggcgaactaaaagaagtagtatctcacaattacttgatagtgatgaagagcttgatagtgaagaatttgatagtgatgaagagcttgatagtgatgaaagttttgaaaatgatgaagagcttgatagtaacaagggacctgattgtaataaaacaccaggaagtgaaagagagctcaacttaagtaaaattcaaagtgaaggaaatgacagtaagtgtctcattaactctggcaacggttcaacatatgaagaagaaacgaacaaaatcaaacataggaatattgacttacaagatcaggaaaaacatttaagtcaagaggataatgatctcaacaaacaaactggacaaataatagaggatgatcaggaaaaacatttaagtcaagaggataatgatctcaacaaacaaactggacaaataatagaggatgatttagaagaagaagacatcaagcgaggaaaaagaaaaaggctatcctctgtgatgtgtgacagtgatgagagtgatgacagcgatatcctagttagaaaagtaggtgttaaacgtccccgtagagtggttgaagatgaaggttcttcagtggaaatggagcaaaagactcctgaaaaaacattagctgcacaaaagcgagaaaaacttcagaagctcaaagaactctcaaaacaaagatctcgtcagagacgcagtagtggtagagattttgaggactctgaaaaggaatcttgcccaagcagtgatgaagttgatgaggaggaagaagaggataattatgaatctgatgaagatggagatgattatattatcgatgactttgtagtgcaagatgaggagggtgatgaagagaataaaaaccaacaaggagaaaaattgactacatcacaactgaaattagtaaaacagaattctctttattcttttagtgaccactatactcattttgaaagagttgtgaaggctcttctgatcaacgctttagatgaatcttttctgggaacattatatgatggcacaaggcaaaaatcatatgcaaaagatatgctaacatctcttcattatttggataaccgctttgttcagcctcgtctagagagcttggtatctagaagtcgttggaaagagcaatataaggagcgagtagaaaattattctaatgtaagtattcatttgaagaatcctgaaaactgttcctgccaggcttgtggactgcatcgctactgtaaatattcagtgcatttatcaggagagttgtataacaccaggaccatgcaaatagataatttcatgtcacatgataaacaggtgttcactgttggcagaatttgtgccagccgtaccagaatttatcataaactgaaacattttaaattcaaactataccaggaatgttgcaccattgcaatgacagaagaagttgaagatgaacaagttaaagaaacagtggaaagaattttcaggcggtcaaaagaaaatggctggattaaggagaaatatggtcaacttgaagaatatctcaattttgcggattactttcaagaagagaagtttgagttgtaacacatttccatcagagaagattttttaaattcctgtaaatgtgaagatcatgattcttgtttttctgtatcatgtgacatgtttgtacattttatctatatcttcatggcaaaatattttgtttaaaacatgattatcttaattcctgtgaagtggcactctacactctaattaaacttttatctgatgtacataaaagcattatcttaatttttaagtctgtaaatatattttaaagttatataataatggctttataacagatgactgtcaagtgaatgagctgttgatatcctgtcagtttagtcaaaatatattgtatcttaaaaatgtatttagactaacgtctacatgtatttttacggaattcctggccagatctgtttattcttttacagtattaaatgattttcactaatatattttttactgctatcatctaaatcagtgggccatggaagaaacctcatatatcattcagttcaatcccattgcttcagaatcagatcatagcatatctattctaagtagaggaatgcttttttccttttcttgaaagtttctctttcaaatagatttcaggcctctagagtctttcaaccctcacattcaggaataattttatgtaaattttcatgctttataatgttcttacttttttctattcaattttgtctatatattgatgattaagatgtattttatttatttttatccatagctttttccatataagtatgtatcttagggtcagaactgctgaaagagacaaactcagccaaaaacacttggaaagcatattttggtatctgcattgctttgcatatctaaattttcccataaagtaataaagtaaaatggttgcagaggaaaaaaaaagaaaaaaaaa

SEQ ID NO: 13086 - DNA, 2783 bp, Homo sapiens
gattgcgagccaggaggaggaagccggcggtggccccgtcagcagccggctgctgagaggccggtaggcggcggcggtcccgaggggcggcggccgcgctgctccctgagaacgggtcccgcagctgggcaggcgggcggcctgagggcgcggagccatgaagctgtacagcctcagcgtcctctacaaaggcgaggccaaggtggtgctgctcaaagccgcatacgatgtgtcttccttcagctttttccagagatccagcgttcaggaattcatgaccttcacgagtcaactgattgtggagcgctcatcgaaaggcactagagcttctgtcaaagaacaagactatctgtgccacgtctacgtccggaatgatagtcttgcaggtgtggtcattgctgacaatgaatacccatcccgggtggcctttaccttgctggagaaggtactagatgaattctccaagcaagtcgacaggatagactggccagtaggatcccctgctacaatccattacccagccctggatggtcacctcagtagataccagaacccacgagaagctgatcccatgactaaagtgcaggccgaactagatgagaccaaaatcattctgcacaacaccatggagtctctgttagagcgaggtgagaagctagatgacttggtgtccaaatccgaggtgctgggaacacagtctaaagccttctataaaactgcccggaaacaaaactcatgctgtgccatcatgtgatgcagcctgccagaggcccaatgctggaatggcaccatcattcacatcagaactgcagcccctggaaaagaagagacagccatagacgaggagccagagtgggggcagactggccatttttattttgaagttcctgcgagaaatggatggtggaagggtggcgaatgttcaaattcatatgtgtggtagtgattcttggaaagaatttgaggtccccaaaggtgtatttttgggcaaatgaaaccataaactccgactggcttctgtagatgccaaagggctctttttcagctaaccctgggaaggctctgtgggagggaggtcggagccagctgtttctcgatctttggtatatctttggatcttatttgtacattaatgatattaacactccagtggggggtggggagtccctgatgctagggctggggtgggtggagtttgaagactcttgggaaagcctctcctggggccactgttgggggtgggagtgagcccaccacagaggccacaggcaggcccccacttcaggcccaaggcctggggcggggggaacagtcactgggtctcagattctgagactgttgtttagcttacctttctgctaggattggcttcccgcagagggcagggcccatcctaagcagcttccaagtcccacaaaggtggcttgtgggaggatttggaaggagctgcattgtgggcggggagtgtgtgggttgggttcgtaccagcaagtagactaggaactgagcccaggaaagggggatgttttcctggtgtttggatggtcagctgggagtgtccatcatcaggggaagatcaaacacaggtgcactcagctgcccagggcctctgggacacttgccttgacttgcaacttgccttgaacatcacgatcaaagcagcaggtgctgtggtctctcaaaattgatttttatttgactctgtggctctaagactgccttgaaccgcctgaggcctatgcatctgaacaagtgggtctctcccttgagcaccaggagtgggtgccagccggccccgaggattcccagcaccccacctatggtcttgccagcataggcttgctagttccttcttggtcagaggtagctgcagaggggggaggccaagggtttggtctaagctgtgccctgccacctggcaggaggcccactcactgcccaagtcatggcaacaggctggagcagcccaggagatgggcctaaaatgttctggatcccttgggtcctagtgttatgttccagtctgcccacctgtgctcaggatgcagccctgggatccagcacccatggaagcttctgctgggatggtgtcacctatgggttttgaaccagtgtggtatggtccttgggagctctgctctgagcttgccacactgctgagagcacccactgtcctgaccagagtctcagtggtcctgacccccaatgtgggcaggggctgggcaggagggtggggtctgctgtgggttcagaggactccacctcctggctggtttacctgctgctgcccattttctctgggtactgctggccagaggactttagcctacccctgaagagcctgtccatgtcattttcctactgccatagataccctaagcccagggccccttgaggcccagactcagcctgcccactggtgccggagacggagtggagtgggcctggatccgagggatgctacctctccctttcccacttgaggaccctggggagagatgggggcggggaaaatggaggtatgaatttggggtaagaggaagtgagatctccgcttgcaggtcagcccctgccttgcagggcgggctggcttgactcaggccctgtgagatagagggcccagcccagccccacccacagatcccctgctcctgttgtgttctgttgtaaatcatttggcgagactgtattttagtaactgctgcctaacttccctgtgttctatttgagaggcgcctgtctggataaagttgtcttgaaatttcaaaaaaaaaaaaaaaaaa

SEQ ID NO: 13087 - DNA, 3256 bp, Homo sapiens
cggactgctgtcctccagattcaggccggtgggtctggggagcccggattggtcttggaggagcaacggctgcgcaggtgactcggtggcctcaagtgtgtacaaaactcaaaacatgaacaacaatatatattaccaatcttcaaacctggtttgcctagaactggaatacagttgcctgcgacatattttagaagaactagaaaagtcaaagtaatggataacagaaaagagcctccattcttcaatgatgataacatgggaccattttactacagacttcatttctgtgataccatggagctcttcattgaaacattaactggaacatgttttgagctgagagtttcaccttttgaaactgttatttctgtgaaagcaaaaattcgaagattggaaggtattcccatctgtcgacaacacttaatttggaataacatggaacttgaaaatgattattgcttgaatgattacaacatttcagaagggtgtaccttgaagctagttttggctatgcgtggcggacctataaatactagaagagttcctacagacgatccacttaggaagatggcagagtacttggattccagtcgagttgaggtctgggagaagacctcctgcagcaaacaagttacatttttggtataccgagaaggagatcaattgaatttctttcctgcagtagataggggagatggcactttaacaccgttatctgactcttcaaagaaaatagattttcatttgcatgtcctacggagaaaaggagaacatcgtatgagtggtggttctatgtataattcagatacagatgaggatgaagaaactgagccttcttcttctgggcaacagataattgaaaattcaataactatgaataagatgaagctgctgaaggctaagatgaagaacatgaatctcagcaaaaagcctaagaaagctgtcaagataaaacctcacccacctgtagctcctcgaccttctagtggttccactgcaccatctcgccaccgattgttaagggtcctccccaacattggtcaatcttgttcacctgcttttgggaatgcatatccgcccgaaatctccaggaatggaatttcaagtttggcaactcaactctctgctgagagatacatatcttctatcactggtgaatttcttaaggaagataatagctgggagaataacacactgtctcacttcagtagcaacgtcaaactacctcctcagataccccatttggagttgggaaatgaccaggagcttgctgactctgttctccatcttggatcatccctgcctaggcaaacaaaacattttttaggaaacttgccatctagtaatgggaacattgtcttaccttcagaagaatgtgtaaccgaacaatcacttctacctaaagtgggctcaccggcttcatttgcagaaggaaatgctgatgaacagagcagcggcttagaaggtgcgtgcaaagtgaatctggagttgctactcactaatgctgacaaagggttgaaagctccagagcagcatctcaagcatgttgcaggagtgctgaatggggaatcagtagagacttcagttcttaactaccgggaattaagtcctcacaagaatagactcttgtcacctcttcgctgttctgcatcaatgtcgctacataattctctggtgaaaccagagagacagtccaaatgttttgagtttgggaagctacagccttcttcttctcagtcactggatgttcaaaacataactgattcttctttctctaggactacttgctttcaaggtgttaaagttgattcacttgggaaaagatctgatgttatttccaaagttgaggctcgggatatcacagaaatgactaacaaggcttccaaagagcctgttggttgtgtaaataatatcagttttcttgcctcactggccgggagcacaagcagaaatagattacagagcacacgtggggcaggcaggcttcagaactctggaactgggctgtctacaaacctccagcattttcaggaagaaaactttaggaaaagttctccccagttagaacatacaggagtttttttgtctacccatggtgttggaatgaatggaaataatgcagcagcagggaaaagcgtaggagaatgtactactcatcacctcccacctgtgaaagcccctcttcagacaaagaagaaaacaacaaatcattgttttctttgtggaaagaaaacaggactggctagtagctacgaatgcagatgtggaaacaacttctgtgcatctcatcgttatgcagaaactcatggctgtacctatgattacaagagtgcagggaggagatacttgcacgaggcaaatcctgtggttaatgcaccaaagcttccaaaaatctaactcttcctctacatcttactgttctgcccgggattcgtattataatgacagaagaaatgttgtttagactattatttttgttcgactctaaaagatttgccaaataacaaaagcatacaatgcatactgttggagaacaagaatgctactgtattttacatctttatttcttggtgaaacaaaagttttaaaagtagttttaacaactttacactggaatgatttagctttgttattgcatgtcttgtgttaagtgttttgtatatgatattgcagttttactaggcaaatcttcaaaagatgcactttaggaaacgaaatatttcctaaataaccaggcttccacattgtacagaatgagcagtcatgtaatgaatggctctactcagattgaccatatgggttttttctttttctttcttttattcttctccttctttttttttcagaggtgggatgggtggagattttttaaaaatcccacgtgtgaaagtttactggctttattagcaagttcctttttacttcaagctactttttataaaaaagaacatttttccagtgtggtttttaacagataatacatttcttccacattcagattagattcggacatgaatccattctataaaacacatcgtgttcatgatagtgtatattttactactttttgaatgttaattttaaaatagaagatgtcccacttgccattaaatatagaagccaactttttaccttttgaaatatggctacatttaaaacaaaatctcacagctcggtttttcttatttgttgagtgctattaccaggagaaatacaaataaatattcaatttcattaaaaaaaaaaaaaaaaa

SEQ ID NO: 13088 - DNA, 10452 bp, Homo sapiens
ctcggcccaacaaaatggcggcggcagcggtgtcgctttgtttccgcggctcctgcggcggtggcagtggtagcggcctttgagctgtggggaggttccagcagcagctacagtgacgactaagactccagtgcatttctatcgtaaccgggcgcgggggagcgcagatcggcgcccagcaatcacagaagccgacaaggcgttcaagcgaaaacatgaccgctgagcccatgagtgaaagcaagttgaatacattggtgcagaagcttcatgacttccttgcacactcatcagaagaatctgaagaaacaagttctcctccacgacttgcaatgaatcaaaacacagataaaatcagtggttctggaagtaactctgatatgatggaaaacagcaaggaagagggaactagctcttcagaaaaatccaagtcttcaggatcgtcacgatcaaagaggaaaccttcaattgtaacaaagtatgtagaatcagatgatgaaaaacctttggatgatgaaactgtaaatgaagatgcgtctaatgaaaattcagaaaatgatattactatgcagagcttgccaaaaggtacagtgattgtacagccagagccagtgctgaatgaagacaaagatgattttaaagggcctgaatttagaagcagaagtaaaatgaaaactgaaaatctcaaaaaacgcggagtgctgtggtgatatccttatatttgattccttgtgcacatgtgggagaaaatctccaaagaattacctagttttgcttaattcttgagcgatgtatgcaccaaagcacatagaagatacttaaagatgggcttcatgggattgtgagctgcactgcttgtggacaacaggtcaatcattttcaaaaagattccatttatagacacccttcattgcaagttcttatttgtaagaattgctttaagtattacatgagtgatgatattagccgtgactcagatggaatggatgaacaatgtaggtggtgtgcggaaggtggaaacttgatttgttgtgacttttgccataatgctttctgcaagaaatgcattctacgcaaccttggtcgaaaggagttgtccacaataatggatgaaaacaaccaatggtattgctacatttgtcacccagagcctttgttggacttggtcactgcatgtaacagcgtatttgagaatttagaacagttgttgcagcaaaataagaagaagataaaagttgacagtgaaaagagtaataaagtatatgaacatacatccagattttctccaaagaagactagttcaaattgtaatggagaagaaaagaaattagatgattcctgttctggctctgtaacctactcttattccgcactaattgtgcccaaagagatgattaagaaggcaaaaaaactgattgagaccacagccaacatgaactccagttatgttaaatttttaaagcaggcaacagataattcagaaatcagttctgctacaaaattacgtcagcttaaggcttttaagtctgtgttggctgatattaagaaggctcatcttgcattggaagaagacttaaattccgagtttcgagcgatggatgctgtaaacaaagagaaaaataccaaagagcataaagtcatagatgctaagtttgaaacaaaagcacgaaaaggagaaaaaccttgtgctttggaaaagaaggatatttcaaagtcagaagctaaactttcaagaaaacaggtagatagtgagcacatgcatcagaatgttccaacagaggaacaaagaacaaataaaagtaccggtggtgaacataagaaatctgatagaaaagaagaacctcaatatgaacctgccaacacttctgaagatttagacatggatattgtgtctgttccttcctcagttccagaagacatttttgagaatcttgagactgctatggaagttcagagttcagttgatcatcaaggggatggcagcagtggaactgaacaagaagtggagagttcatctgtaaaattaaatatttcttcaaaagacaacagaggaggtattaaatcaaaaactacagctaaagtaacaaaagaattatatgttaaactcactcctgtttccctttctaattccccaattaaaggtgctgattgtcaggaagttccacaagataaagatggctataaaagttgtggtctgaaccccaagttagagaaatgtggacttggacaggaaaacagtgataatgagcatttggttgaaaatgaagtttcattacttttagaggaatctgatcttcgaagatccccacgtgtaaagactacacccttgaggcgaccgacagaaactaaccctgtaacatctaattcagatgaagaatgtaatgaaacagttaaggagaaacaaaaactatcagttccagtgagaaaaaaggataagcgtaattcttctgacagtgctatagataatcctaagcctaataaattgccaaaatctaagcaatcagagactgtggatcaaaattcagattctgatgaaatgctagcaatcctcaaagaggtgagcaggatgagtcacagttcttcttcagatactgatattaatgaaattcatacaaaccataagactttgtatgatttaaagactcaggcggggaaagatgataaaggaaaaaggaaacgaaaaagttctacatctggctcagattttgatactaaaaagggcaaatcagctaagagctctataatttctaaaaagaaacgacaaacccagtctgagtcttctaattatgactcagaattagaaaaagagataaagagcatgagtaaaattggtgctgccagaaccaccaaaaaaagaattccaaatacaaaagattttgactcttctgaagatgagaaacacagcaaaaaaggaatggataatcaagggcacaaaaatttgaagacctcacaagaaggatcatctgatgatgctgaaagaaaacaagagagagagactttctcttcagcagaaggcacagttgataaagacacgaccatcatggaattaagagatcgacttcctaagaagcagcaagcaagtgcttccactgatggtgtcgataagctttctgggaaagagcagagttttacttctttggaagttagaaaagttgctgaaactaaagaaaagagcaagcatctcaaaaccaaaacatgtaaaaaagtacaggatggcttatctgatattgcagagaaattcctaaagaaagaccagagcgatgaaacttctgaagatgataaaaagcagagcaaaaagggaactgaagaaaaaaagaaaccttcagactttaagaaaaaagtaattaaaatggaacaacagtatgaatcttcatctgatggcactgaaaagttacctgagcgagaagaaatttgtcattttcctaagggcataaaacaaattaagaatggaacaactgatggagaaaagaaaagtaaaaaaataagagataaaacttctaaaaagaaggatgaattatctgattatgctgagaagtcaacagggaaaggagatagttgtgactcttcagaggataaaaagagtaagaatggagcatatggtagagagaagaaaaggtgcaagttgcttggaaagagttcaaggaagagacaagattgttcatcatctgatactgagaaatattccatgaaagaagatggttgtaactcttctgataagagactgaaaagaatagaattgagggaaagaagaaatttaagttcaaagagaaatactaaggaaatacaaagtggctcatcatcatctgatgctgaggaaagttctgaagataataaaaagaagaagcaaagaacttcatctaaaaagaaggcagtcattgtcaaggagaaaaagagaaactccctaagaacaagcactaaaaggaagcaagctgacattacatcctcatcttcttctgatatagaagatgatgatcagaattctataggtgagggaagcagcgatgaacagaaaattaagcctgtgactgaaaatttagtgctgtcttcacatactggattttgccaatcttcaggagatgaagccttatctaaatcagtgcctgtcacagtggatgatgatgatgacgacaatgatcctgagaatagaattgccaagaagatgcttttagaagaaattaaagccaatctttcctctgatgaggatggatcttcagatgatgagccagaagaagggaaaaaaagaactggaaaacaaaatgaagaaaacccaggagatgaggaagcaaaaaatcaagtcaattctgaatcagattcagattctgaagaatctaagaagccaagatacagacataggcttttgcggcacaaattgactgtgagtgacggagaatctggagaagaaaaaaagacaaagcctaaagagcataaagaagtcaaaggcagaaacagaagaaaggtgagcagtgaagattcagaagattctgattttcaggaatcaggagttagtgaagaagttagtgaatccgaagatgaacagcggcccagaacaaggtctgcaaagaaagcagagttggaagaaaatcagcggagctataaacagaaaaagaaaaggcgacgtattaaggttcaagaagattcatccagtgaaaacaagagtaattctgaggaagaagaggaggaaaaagaagaggaggaggaagaggaggaggaggaggaagaggaggaggaagatgaaaatgatgattccaagtctcctggaaaaggcagaaagaaaattcggaagattcttaaagatgataaactgagaacagaaacacaaaatgctcttaaggaagaggaagagagacgaaaacgtattgctgagagggagcgtgagcgagaaaaattgagagaggtgatagaaattgaagatgcttcacccaccaagtgtccaataacaaccaagttggttttagatgaagatgaagaaaccaaagaacctttagtgcaggttcatagaaatatggttatcaaattgaaaccccatcaagtagatggtgttcagtttatgtgggattgctgctgtgagtctgtgaaaaaaacaaagaaatctccaggttcaggatgcattcttgcccactgtatgggccttggtaagactttacaggtggtaagttttcttcatacagttcttttgtgtgacaaactggatttcagcacggcgttagtggtttgtcctcttaatactgctttgaattggatgaatgaatttgagaagtggcaagagggattaaaagatgatgagaagcttgaggtttctgaattagcaactgtgaaacgtcctcaggagagaagctacatgctgcagaggtggcaagaagatggtggtgttatgatcataggctatgagatgtatagaaatcttgctcaaggaaggaatgtgaagagtcggaaacttaaagaaatatttaacaaagctttggttgatccaggccctgattttgttgtttgtgatgaaggccatattctaaaaaatgaagcatctgctgtttctaaagctatgaattctatacgatcaaggaggaggattattttaacaggaacaccacttcaaaataacctaattgagtatcattgtatggttaattttatcaaggaaaatttacttggatccattaaggagttcaggaatagatttataaatccaattcaaaatggtcagtgtgcagattctaccatggtagatgtcagagtgatgaaaaaacgtgctcacattctctatgagatgttagctggatgtgttcagaggaaagattatacagcattaacaaaattcttgcctccaaaacacgaatatgtgttagctgtgagaatgacttctattcagtgcaagctctatcagtactacttagatcacttaacaggtgtgggcaataatagtgaaggtggaagaggaaaggcaggtgcaaagcttttccaagattttcagatgttaagtagaatatggactcatccttggtgtttgcagctagactacattagcaaagaaaataagggttattttgatgaagacagtatggatgaatttatagcctcagattctgatgaaacctccatgagtttaagctccgatgattatacaaaaaagaagaaaaaagggaaaaaggggaaaaaagatagtagctcaagtggaagtggcagtgacaatgatgttgaagtgattaaggtctggaattcaagatctcggggaggtggtgaaggaaatgtggatgaaacaggaaacaatccttctgtttctttaaaactggaagaaagtaaagctacttcttcttctaatccaagcagcccagctccagactggtacaaagattttgttacagatgctgatgctgaggttttagagcattctgggaaaatggtacttctctttgaaattcttcgaatggcagaggaaattggggataaagtccttgttttcagccagtccctcatatctctggacttgattgaagattttcttgaattagctagtagggagaagacagaagataaagataaaccccttatttataaaggtgaggggaagtggcttcgaaacattgactattaccgtttagatggttccactactgcacagtcaaggaagaagtgggctgaagaatttaatgatgaaactaatgtgagaggacgattatttatcatttctactaaagcaggatctctaggaattaatctggtagctgctaatcgagtaattatattcgacgcttcttggaatccatcttatgacatccagagtatattcagagtttatcgctttggacaaactaagcctgtttatgtatataggttcttagctcagggaaccatggaagataagatttatgatcggcaagtaactaagcagtcactgtcttttcgagttgttgatcagcagcaggtggagcgtcattttactatgaatgagcttactgaactttatacttttgagccagacttattagatgaccctaattcagaaaagaagaagaagagggatactcccatgctgccaaaggataccatacttgcagagctccttcagatacataaagaacacattgtaggataccatgaacatgattctcttttggaccacaaagaagaagaagagttgactgaagaagaaagaaaagcagcttgggctgagtatgaagcagagaagaagggactgaccatgcgtttcaacataccaactgggaccaatttaccccctgtcagtttcaactctcaaactccttatattcctttcaatttgggagccctgtcagcaatgagtaatcaacagctggaggacctcattaatcaaggaagagaaaaagttgtagaagcaacaaacagtgtgacagcagtgaggattcaacctcttgaggatataatttcagctgtatggaaggagaacatgaatctctcagaggcccaagtacaggcgttagcattaagtagacaagccagccaggagcttgatgttaaacgaagagaagcaatctacaatgatgtattgacaaaacaacagatgttaatcagctgtgttcagcgaatacttatgaacagaaggctccagcagcagtacaatcagcagcaacagcaacaaatgacttatcaacaagcaacactgggtcacctcatgatgccaaagcccccaaatttgatcatgaatccttctaactaccagcagattgatatgagaggaatgtatcagccagtggctggtggtatgcagccaccaccattacagcgtgcaccacccccaatgagaagcaaaaatccaggaccttcccaagggaaatcaatgtgattttgcactaaaagcttaatggattgttaaaatcatagaaagatcttttatttctttaggaatcaatgacttaacagaactcaactgtataaatagtttggtccccttaaatgccaatcttccatattagttttacttttttttttttttaaatagggcataccatttcttcctgacatttgtcagtgatgttgcctagaatcttcttacacacgctgagtacagaagatatttcaaattgttttcagtgaaaacaagtccttccataatagtaacaactccacagatttcctctctaaatttttatgcctgcttttagcaaccataaaattgtcataaaattaataaatttaggaaagaataaagatttatatattcattctttacatataaaaacacacagctgagttcttagagttgattcctcaagttatgaaatacttttgtacttaatccatttcttgattaaagtgattgaaatggttttaatgttcttttgactgaagtctgaaactgggctcctgctttattgtctctgtgactgaaagttagaaactgagggttatctttgacacagaattgtgtgcaatattcttaaatactactgctctaaaagttggagaagtcttgcagttatcttagcattgtataaacagccttaagtatagcctaagaagagaattcctttttcttctttagtccttctgccattttttattttcagttatatgtgctgaaataattactggtaaaatttcagggttgtggattatcttccacacatgaattttctctctcctggcacgaatataaagcacatctcttaactgcatggtgccagtgctaatgcttcatcctgttgctggcagtgggatgtggacttagaaaatcaagttctagcattttagtaggttaacactgaagttgtggttgttaggttcacaccctgttttataaacaacatcaaaatggcagaaccattgctgactttaggttcacatgaggaatgtacttttaacaattcccagtactatcagtattgtgaaataattcctctgaaagataagaatcactggcttctatgcgcttcttttctctcatcatcatgttcttttaccccagtttccttacatttttttaaattgtttcagagtttgttttttttttagtttagattgtgaggcaattattaaatcaaaattaattcatccaatacccctttactagaagttttactagaaaatgtattacattttattttttcttaatccagttctgcaaaaatgacctataaatttattcatgtacaattttggttacttgaattgttaaagaaaacattgtttttgactatgggagtcaactcaacatggcagaaccatttttgagatgatgatacaacaggtagtgaaacagcttaagaattccaaaaaaaaaaaaaaaaaaaaaaaaaaagaaaactgggtttgggctttgctttaggtatcactggattagaatgagtttaacattagctaaaactgctttgagttgtttggatgattaagagattgccatttttatcttggaagaactagtggtaaaacatccaagagcactaggattgtgatacagaatttgtgaggtttggtggatccacgcccctctcccccactttcccatgatgaaatatcactaataaatcctgtatatttagatattatgctagccatgtaatcagatttatttaattgggtggggcaggtgtgtatttactttagaaaaaatgaaaaagacaagatttatgagaaatatttgaaggcagtacactctggccaactgttaccagttggtatttctacaagttcagaatattttaaacctgatttactagacctgggaattttcaacatggtctaattatttactcaaagacatagatgtgaaatttaggcaaccttctaaatcttttcaccatggatgaaactataacttaaagataatacttagaagggttaattggaaatcagagtttgaaataaaacttggaccactttgtatacactcttctcacttgacattttagctatataatatgtactttgagtataacatcaagctttaacaaatatttaaagacaaaaaaatcacgtcagtaaaatactaaaaggctcatttttatatttgttttagatgttttaaatagttgcaatggattaaaaatgatgatttaaaatgttgcttgtaatacagttttgcctgctaaattctccacattttgtaacctgttttatttctttgggtgtaaagcgtttttgcttagtattgtgatattgtatatgttttgtcccagttgtatagtaatgtttcagtccatcatccagctttggctgctgaaatcatacagctgtgaagacttgcctttgtttctgttagactgcttttcagttctgtattgagtatcttaagtactgtagaaaagatgtcacttcttcctttaaggctgttttgtaatatatataaggactggaattgtgtttttaaagaaaagcattcaagtatgacaatatactatctgtgttttcaccattcaaagtgctgtttagtagttgaaacttaaactatttaatgtcatttaataaagtgaccaaaatgtg

SEQ ID NO: 13089 - DNA, 10216 bp, Homo sapiens
ctcggcccaacaaaatggcggcggcagcggtgtcgctttgtttccgcggctcctgcggcggtggcagtggtagcggcctttgagctgtggggaggttccagcagcagctacagtgacgactaagactccagtgcatttctatcgtaaccgggcgcgggggagcgcagatcggcgcccagcaatcacagaagccgacaaggcgttcaagcgaaaacatgaccgctgagcccatgagtgaaagcaagttgaatacattggtgcagaagcttcatgacttccttgcacactcatcagaagaatctgaagaaacaagttctcctccacgacttgcaatgaatcaaaacacagataaaatcagtggttctggaagtaactctgatatgatggaaaacagcaaggaagagggaactagctcttcagaaaaatccaagtcttcaggatcgtcacgatcaaagaggaaaccttcaattgtaacaaagtatgtagaatcagatgatgaaaaacctttggatgatgaaactgtaaatgaagatgcgtctaatgaaaattcagaaaatgatattactatgcagagcttgccaaaagaagatgggcttcatgggattgtgagctgcactgcttgtggacaacaggtcaatcattttcaaaaagattccatttatagacacccttcattgcaagttcttatttgtaagaattgctttaagtattacatgagtgatgatattagccgtgactcagatggaatggatgaacaatgtaggtggtgtgcggaaggtggaaacttgatttgttgtgacttttgccataatgctttctgcaagaaatgcattctacgcaaccttggtcgaaaggagttgtccacaataatggatgaaaacaaccaatggtattgctacatttgtcacccagagcctttgttggacttggtcactgcatgtaacagcgtatttgagaatttagaacagttgttgcagcaaaataagaagaagataaaagttgacagtgaaaagagtaataaagtatatgaacatacatccagattttctccaaagaagactagttcaaattgtaatggagaagaaaagaaattagatgattcctgttctggctctgtaacctactcttattccgcactaattgtgcccaaagagatgattaagaaggcaaaaaaactgattgagaccacagccaacatgaactccagttatgttaaatttttaaagcaggcaacagataattcagaaatcagttctgctacaaaattacgtcagcttaaggcttttaagtctgtgttggctgatattaagaaggctcatcttgcattggaagaagacttaaattccgagtttcgagcgatggatgctgtaaacaaagagaaaaataccaaagagcataaagtcatagatgctaagtttgaaacaaaagcacgaaaaggagaaaaaccttgtgctttggaaaagaaggatatttcaaagtcagaagctaaactttcaagaaaacaggtagatagtgagcacatgcatcagaatgttccaacagaggaacaaagaacaaataaaagtaccggtggtgaacataagaaatctgatagaaaagaagaacctcaatatgaacctgccaacacttctgaagatttagacatggatattgtgtctgttccttcctcagttccagaagacatttttgagaatcttgagactgctatggaagttcagagttcagttgatcatcaaggggatggcagcagtggaactgaacaagaagtggagagttcatctgtaaaattaaatatttcttcaaaagacaacagaggaggtattaaatcaaaaactacagctaaagtaacaaaagaattatatgttaaactcactcctgtttccctttctaattccccaattaaaggtgctgattgtcaggaagttccacaagataaagatggctataaaagttgtggtctgaaccccaagttagagaaatgtggacttggacaggaaaacagtgataatgagcatttggttgaaaatgaagtttcattacttttagaggaatctgatcttcgaagatccccacgtgtaaagactacacccttgaggcgaccgacagaaactaaccctgtaacatctaattcagatgaagaatgtaatgaaacagttaaggagaaacaaaaactatcagttccagtgagaaaaaaggataagcgtaattcttctgacagtgctatagataatcctaagcctaataaattgccaaaatctaagcaatcagagactgtggatcaaaattcagattctgatgaaatgctagcaatcctcaaagaggtgagcaggatgagtcacagttcttcttcagatactgatattaatgaaattcatacaaaccataagactttgtatgatttaaagactcaggcggggaaagatgataaaggaaaaaggaaacgaaaaagttctacatctggctcagattttgatactaaaaagggcaaatcagctaagagctctataatttctaaaaagaaacgacaaacccagtctgagtcttctaattatgactcagaattagaaaaagagataaagagcatgagtaaaattggtgctgccagaaccaccaaaaaaagaattccaaatacaaaagattttgactcttctgaagatgagaaacacagcaaaaaaggaatggataatcaagggcacaaaaatttgaagacctcacaagaaggatcatctgatgatgctgaaagaaaacaagagagagagactttctcttcagcagaaggcacagttgataaagacacgaccatcatggaattaagagatcgacttcctaagaagcagcaagcaagtgcttccactgatggtgtcgataagctttctgggaaagagcagagttttacttctttggaagttagaaaagttgctgaaactaaagaaaagagcaagcatctcaaaaccaaaacatgtaaaaaagtacaggatggcttatctgatattgcagagaaattcctaaagaaagaccagagcgatgaaacttctgaagatgataaaaagcagagcaaaaagggaactgaagaaaaaaagaaaccttcagactttaagaaaaaagtaattaaaatggaacaacagtatgaatcttcatctgatggcactgaaaagttacctgagcgagaagaaatttgtcattttcctaagggcataaaacaaattaagaatggaacaactgatggagaaaagaaaagtaaaaaaataagagataaaacttctaaaaagaaggatgaattatctgattatgctgagaagtcaacagggaaaggagatagttgtgactcttcagaggataaaaagagtaagaatggagcatatggtagagagaagaaaaggtgcaagttgcttggaaagagttcaaggaagagacaagattgttcatcatctgatactgagaaatattccatgaaagaagatggttgtaactcttctgataagagactgaaaagaatagaattgagggaaagaagaaatttaagttcaaagagaaatactaaggaaatacaaagtggctcatcatcatctgatgctgaggaaagttctgaagataataaaaagaagaagcaaagaacttcatctaaaaagaaggcagtcattgtcaaggagaaaaagagaaactccctaagaacaagcactaaaaggaagcaagctgacattacatcctcatcttcttctgatatagaagatgatgatcagaattctataggtgagggaagcagcgatgaacagaaaattaagcctgtgactgaaaatttagtgctgtcttcacatactggattttgccaatcttcaggagatgaagccttatctaaatcagtgcctgtcacagtggatgatgatgatgacgacaatgatcctgagaatagaattgccaagaagatgcttttagaagaaattaaagccaatctttcctctgatgaggatggatcttcagatgatgagccagaagaagggaaaaaaagaactggaaaacaaaatgaagaaaacccaggagatgaggaagcaaaaaatcaagtcaattctgaatcagattcagattctgaagaatctaagaagccaagatacagacataggcttttgcggcacaaattgactgtgagtgacggagaatctggagaagaaaaaaagacaaagcctaaagagcataaagaagtcaaaggcagaaacagaagaaaggtgagcagtgaagattcagaagattctgattttcaggaatcaggagttagtgaagaagttagtgaatccgaagatgaacagcggcccagaacaaggtctgcaaagaaagcagagttggaagaaaatcagcggagctataaacagaaaaagaaaaggcgacgtattaaggttcaagaagattcatccagtgaaaacaagagtaattctgaggaagaagaggaggaaaaagaagaggaggaggaagaggaggaggaggaggaagaggaggaggaagatgaaaatgatgattccaagtctcctggaaaaggcagaaagaaaattcggaagattcttaaagatgataaactgagaacagaaacacaaaatgctcttaaggaagaggaagagagacgaaaacgtattgctgagagggagcgtgagcgagaaaaattgagagaggtgatagaaattgaagatgcttcacccaccaagtgtccaataacaaccaagttggttttagatgaagatgaagaaaccaaagaacctttagtgcaggttcatagaaatatggttatcaaattgaaaccccatcaagtagatggtgttcagtttatgtgggattgctgctgtgagtctgtgaaaaaaacaaagaaatctccaggttcaggatgcattcttgcccactgtatgggccttggtaagactttacaggtggtaagttttcttcatacagttcttttgtgtgacaaactggatttcagcacggcgttagtggtttgtcctcttaatactgctttgaattggatgaatgaatttgagaagtggcaagagggattaaaagatgatgagaagcttgaggtttctgaattagcaactgtgaaacgtcctcaggagagaagctacatgctgcagaggtggcaagaagatggtggtgttatgatcataggctatgagatgtatagaaatcttgctcaaggaaggaatgtgaagagtcggaaacttaaagaaatatttaacaaagctttggttgatccaggccctgattttgttgtttgtgatgaaggccatattctaaaaaatgaagcatctgctgtttctaaagctatgaattctatacgatcaaggaggaggattattttaacaggaacaccacttcaaaataacctaattgagtatcattgtatggttaattttatcaaggaaaatttacttggatccattaaggagttcaggaatagatttataaatccaattcaaaatggtcagtgtgcagattctaccatggtagatgtcagagtgatgaaaaaacgtgctcacattctctatgagatgttagctggatgtgttcagaggaaagattatacagcattaacaaaattcttgcctccaaaacacgaatatgtgttagctgtgagaatgacttctattcagtgcaagctctatcagtactacttagatcacttaacaggtgtgggcaataatagtgaaggtggaagaggaaaggcaggtgcaaagcttttccaagattttcagatgttaagtagaatatggactcatccttggtgtttgcagctagactacattagcaaagaaaataagggttattttgatgaagacagtatggatgaatttatagcctcagattctgatgaaacctccatgagtttaagctccgatgattatacaaaaaagaagaaaaaagggaaaaaggggaaaaaagatagtagctcaagtggaagtggcagtgacaatgatgttgaagtgattaaggtctggaattcaagatctcggggaggtggtgaaggaaatgtggatgaaacaggaaacaatccttctgtttctttaaaactggaagaaagtaaagctacttcttcttctaatccaagcagcccagctccagactggtacaaagattttgttacagatgctgatgctgaggttttagagcattctgggaaaatggtacttctctttgaaattcttcgaatggcagaggaaattggggataaagtccttgttttcagccagtccctcatatctctggacttgattgaagattttcttgaattagctagtagggagaagacagaagataaagataaaccccttatttataaaggtgaggggaagtggcttcgaaacattgactattaccgtttagatggttccactactgcacagtcaaggaagaagtgggctgaagaatttaatgatgaaactaatgtgagaggacgattatttatcatttctactaaagcaggatctctaggaattaatctggtagctgctaatcgagtaattatattcgacgcttcttggaatccatcttatgacatccagagtatattcagagtttatcgctttggacaaactaagcctgtttatgtatataggttcttagctcagggaaccatggaagataagatttatgatcggcaagtaactaagcagtcactgtcttttcgagttgttgatcagcagcaggtggagcgtcattttactatgaatgagcttactgaactttatacttttgagccagacttattagatgaccctaattcagaaaagaagaagaagagggatactcccatgctgccaaaggataccatacttgcagagctccttcagatacataaagaacacattgtaggataccatgaacatgattctcttttggaccacaaagaagaagaagagttgactgaagaagaaagaaaagcagcttgggctgagtatgaagcagagaagaagggactgaccatgcgtttcaacataccaactgggaccaatttaccccctgtcagtttcaactctcaaactccttatattcctttcaatttgggagccctgtcagcaatgagtaatcaacagctggaggacctcattaatcaaggaagagaaaaagttgtagaagcaacaaacagtgtgacagcagtgaggattcaacctcttgaggatataatttcagctgtatggaaggagaacatgaatctctcagaggcccaagtacaggcgttagcattaagtagacaagccagccaggagcttgatgttaaacgaagagaagcaatctacaatgatgtattgacaaaacaacagatgttaatcagctgtgttcagcgaatacttatgaacagaaggctccagcagcagtacaatcagcagcaacagcaacaaatgacttatcaacaagcaacactgggtcacctcatgatgccaaagcccccaaatttgatcatgaatccttctaactaccagcagattgatatgagaggaatgtatcagccagtggctggtggtatgcagccaccaccattacagcgtgcaccacccccaatgagaagcaaaaatccaggaccttcccaagggaaatcaatgtgattttgcactaaaagcttaatggattgttaaaatcatagaaagatcttttatttctttaggaatcaatgacttaacagaactcaactgtataaatagtttggtccccttaaatgccaatcttccatattagttttacttttttttttttttaaatagggcataccatttcttcctgacatttgtcagtgatgttgcctagaatcttcttacacacgctgagtacagaagatatttcaaattgttttcagtgaaaacaagtccttccataatagtaacaactccacagatttcctctctaaatttttatgcctgcttttagcaaccataaaattgtcataaaattaataaatttaggaaagaataaagatttatatattcattctttacatataaaaacacacagctgagttcttagagttgattcctcaagttatgaaatacttttgtacttaatccatttcttgattaaagtgattgaaatggttttaatgttcttttgactgaagtctgaaactgggctcctgctttattgtctctgtgactgaaagttagaaactgagggttatctttgacacagaattgtgtgcaatattcttaaatactactgctctaaaagttggagaagtcttgcagttatcttagcattgtataaacagccttaagtatagcctaagaagagaattcctttttcttctttagtccttctgccattttttattttcagttatatgtgctgaaataattactggtaaaatttcagggttgtggattatcttccacacatgaattttctctctcctggcacgaatataaagcacatctcttaactgcatggtgccagtgctaatgcttcatcctgttgctggcagtgggatgtggacttagaaaatcaagttctagcattttagtaggttaacactgaagttgtggttgttaggttcacaccctgttttataaacaacatcaaaatggcagaaccattgctgactttaggttcacatgaggaatgtacttttaacaattcccagtactatcagtattgtgaaataattcctctgaaagataagaatcactggcttctatgcgcttcttttctctcatcatcatgttcttttaccccagtttccttacatttttttaaattgtttcagagtttgttttttttttagtttagattgtgaggcaattattaaatcaaaattaattcatccaatacccctttactagaagttttactagaaaatgtattacattttattttttcttaatccagttctgcaaaaatgacctataaatttattcatgtacaattttggttacttgaattgttaaagaaaacattgtttttgactatgggagtcaactcaacatggcagaaccatttttgagatgatgatacaacaggtagtgaaacagcttaagaattccaaaaaaaaaaaaaaaaaaaaaaaaaaagaaaactgggtttgggctttgctttaggtatcactggattagaatgagtttaacattagctaaaactgctttgagttgtttggatgattaagagattgccatttttatcttggaagaactagtggtaaaacatccaagagcactaggattgtgatacagaatttgtgaggtttggtggatccacgcccctctcccccactttcccatgatgaaatatcactaataaatcctgtatatttagatattatgctagccatgtaatcagatttatttaattgggtggggcaggtgtgtatttactttagaaaaaatgaaaaagacaagatttatgagaaatatttgaaggcagtacactctggccaactgttaccagttggtatttctacaagttcagaatattttaaacctgatttactagacctgggaattttcaacatggtctaattatttactcaaagacatagatgtgaaatttaggcaaccttctaaatcttttcaccatggatgaaactataacttaaagataatacttagaagggttaattggaaatcagagtttgaaataaaacttggaccactttgtatacactcttctcacttgacattttagctatataatatgtactttgagtataacatcaagctttaacaaatatttaaagacaaaaaaatcacgtcagtaaaatactaaaaggctcatttttatatttgttttagatgttttaaatagttgcaatggattaaaaatgatgatttaaaatgttgcttgtaatacagttttgcctgctaaattctccacattttgtaacctgttttatttctttgggtgtaaagcgtttttgcttagtattgtgatattgtatatgttttgtcccagttgtatagtaatgtttcagtccatcatccagctttggctgctgaaatcatacagctgtgaagacttgcctttgtttctgttagactgcttttcagttctgtattgagtatcttaagtactgtagaaaagatgtcacttcttcctttaaggctgttttgtaatatatataaggactggaattgtgtttttaaagaaaagcattcaagtatgacaatatactatctgtgttttcaccattcaaagtgctgtttagtagttgaaacttaaactatttaatgtcatttaataaagtgaccaaaatgtg

SEQ ID NO: 13090 - DNA, 4089 bp, Homo sapiens
ccttcgcccctcctccgccagtcactggaatcaattccgtggggaatcggctccgccgccgcgaaggacagcctttccgcgcgggactccggggcgccacgggggccatgtaagcagctatcttccagagggccacactgggcatggacacccttttccctgcctggaggagcacaggtgatagtgtaattttccagtcacgaaactgctaaggccatctcaggggcgtgtgcgccaggataggcaggcggcgtccgaggaccacatagccatgccttttggtctgaagctccgccggacacggcgctacaacgtcctgagcaagaactgctttgtcacacggattcgcctgctggacagcaatgttatcgagtgcacgctgtcggtggaaagcacagggcaagaatgcctggaggctgtggcccagaggctggagctgcgagagacgcactactttggcctttggtttctcagcaagagccagcaagcacgatgggtggagctggagaaacctctgaagaaacatctggacaaattcgctaatgagcctttgcttttctttggagtcatgttctatgtgccaaatgtgtcatggcttcagcaagaggccacaagatatcagtattacctgcaagtcaaaaaagatgtgcttgaagggcgattacgatgtacattggaccaggtgattcggctagccggcctagctgtgcaagctgattttggagactataatcagtttgattctcaagatttcctcagagagtatgtgctatttcctatggatttggccctggaagaggctgttctggaggagctgacccagaaggtagcccaagaacacaaagcccacagtggaatcctgccagcagaagctgaactgatgtacatcaatgaagttgaacgtttggatggatttggacaggaaatcttccctgtaaaggacaatcatggaaactgtgtacaccttggcattttctttatggggattttcgtgaggaacagaattggaagacaagcggtaatatacaggtggaatgacatggggaatatcactcataacaagtcgaccattctagtggagctcatcaacaaagaagagactgccctctttcacacggatgatatcgaaaatgccaagtatatttctcggttgtttgccacacgacacaagttttacaaacaaaacaaaatctgcactgaacagtcaaattctccaccccccatcagacgccagcccacctggagccgatcctctctgcccaggcagcagccgtacatcctgcctcccgttcacgtccagtgtggtgagcactactcggaaacgcacacctcgcaagacagcatttttcatgggaatgaagaagccttgtattgcaactctcacaacagcctggacttaaattatttaaatggcactgtcaccaatggcagcgtgtgtagcgttcacagcgtcaactccctcaactgctcgcaaagtttcatccaggcctcccctgtatcctccaacctcagtatccctgggagtgacatcatgcgggccgactacatcccgagccaccggcacagcgcgatcatcgtgccctcgtacaggccaacccccgattatgagacagtcatgcgccagatgaagagggggatcctgcatacagacagccagagccagtctctgagaaacctcaacattatcaacacccatgcctacaaccagccagaggatctggtgtacagccaaccggagatgcgggagaggcacccctacactgtcccttatgggccacagggggtctacagcaacaaacttgtcagtccatctgaccagaggaacccaaagaataatgtggtaccaagcaagccgggggcaagcgccatctcgcacacggtgagcaccccagagctggccaacatgcagctgcagggcagccataactacagcacggcccacatgcttaagaactatctcttcaggccaccgcccccctacccacggccacgacctgccaccagcaccccagacctggccagccaccgccacaagtacgtcagcggcagcagcccggacctggtgacccggaaggtgcagctctcggtgaagaccttccaagaggacagctctccggtggttcatcagtctctccaggaggtgagcgagcccctcacggccaccaagcaccacggcactgtgaacaagcgccacagcctggaggtgatgaacagcatggtgcggggcatggaggccatgacgctcaagtcgctccacctccccatggctcgccgcaacacgctccgggagcagggaccgcccgaggaggggtcaggcagccacgaggtcccccagctccctcagtatcaccacaagaagaccttctctgatgccactatgctaatccacagcagcgagagtgaggaggaggaggaggaggctccagaatcggtgccccagatccccatgctccgggagaagatggagtacagtgcccagctgcaggcggccctggcccgcatccccaacaagcccccgcctgagtaccccggtccaaggaagagtgtgagcaatggggctctgaggcaggaccaagccagccttcctcccgccatggccagagccagggtgctgaggcatgggccagccaaggccatcagcatgtctcggactgacccgccggctgtcaacggggcctctctcggcccatccatctcggaacccgacctgactagtgtgaaggagcgggtcaaaaaagagcctgtgaaggagagacctgtgtctgaaatgttttccctggaagacagcattatagagagagagatgatgatcaggaatctagagaagcagaagatggcaggcctggaggcacagaagaggccgctgatgttggcagcattgaatgggctctcggtggctcgagtctcagggcgggaagagaatcgagttgatgccacccgggttcccatggacgagaggttcagaaccctgaagaagaaactagaagagggaatggtgttcacagaatatgagcaaattccaaagaaaaaggcgaatggcattttcagcacagcagctctgccagaaaacgccgagcgcagccgaatccgtgaagttgtcccctatgaggagaatcgagtagagctgataccaaccaaagaaaataacacaggatacattaatgcctcccacatcaaggtggtggttggcggggcagaatggcactacatagccacccaggggcccctgccacacacgtgccacgacttctggcagatggtgtgggagcagggagtgaatgtgattgccatggtcactgcagaggaggagggtggacgaaccaaaagccaccgatactggcccaaactaggttcaaagcacagctcagccacctatggcaagttcaaggtcaccacgaagtttcgaacggattctgtttgctatgcaaccacgggcttgaaggtcaagcaccttttgtctgggcaagaaaggacggtgtggcatttacaatatactgactggccagatcacggctgtccagaagatgtccaaggatttttatcctacttggaggagatccagtcggtccgtcgccataccaacagcatgctggaaggcaccaagaaccggcacccgcccatcgtggtccactgtagtgctggggtgggaaggaccggcgtgctcattctttctgagctgatgatctactgcttggaacataacgaaaaggtggaagtgcccatgatgctgaggctcctcagggagcagaggatgttcatgatccagactatcgctcagtacaagtttgtctaccaagtcctcatccagttcctccaaaactccagactcatttaatcaccccaatccagctcctggaggagggacccagctccatcgcgctggaggagagtcacctccagacaacatctgctccccccacaggggtgcaggtggctggcagcaaacaggctctctgaagacagtagccaagattattcacacataccatgtattattttatatgagataatttatttttttcccctttggaataacttttgtgaattattataatgcagtttccctagtaatatagtacttttcatttg

SEQ ID NO: 13091 - DNA, 4234 bp, Homo sapiens
gcccatgagcgcgccgcggcccgggctggcgtgcgggtgcggctgcggcggccgcgcggcggggccccgggaggcgggtcgctgagcggggcgcgcggccccgaggatgcgggagcgggagcgggagcagcgctggcgtcaatgctcccttcctcgggccattggagactccgttgctttttaatggcggcagcggctgctgggtgagcagctggaggccggacagtgttcgtcccatccggagaggatcgctttctcctggcgtcaccagcgctgggttggtgggggtagcttttccctctttgctcctccattcttgaagaaagaagaagatgccactgccatttgggttgaaactgaaacgcacccggcgctacacggtgtccagcaagagttgcctggttgcccggatccaactgcttaataacgagtttgtggagttcaccctgtccgtggagagcactggccaggaaagcctcgaggccgtggcccagaggctggagctgcgggaggtcacttacttcagcctctggtactacaacaagcaaaatcagcgccggtgggtagatttggaaaaacctttgaagaagcagctggataaatatgcattggaacctaccgtctattttggagtggtgttttatgtgccttcagtttctcagctgcagcaggagattaccaggtatcagtattatctgcaactgaagaaagatatcttggaaggaagtattccttgtaccttagaacaagcaattcagctagcaggcttagctgttcaagcggattttggtgactttgatcagtatgaatcccaggactttcttcagaaatttgccttgtttcctgtgggatggttacaagatgaaaaagtattggaagaagcaacccaaaaagtggccttactacatcagaaatacagagggctcacagctcctgatgctgaaatgctgtacatgcaggaggtagagagaatggatggctatggagaagagagctaccctgctaaggatagccaaggaagtgacatatccattggagcgtgtcttgaaggtatctttgtgaaacacaagaatggaaggcatcctgtggtatttaggtggcatgacattgccaacatgtcccacaacaagtccttttttgcattagagctggcaaataaagaggagaccattcaatttcaaactgaagacatggaaacagcaaaatacatttggagactctgtgttgcgcgacacaagttttacagactaaaccagtgtaacctgcaaactcagactgtcacagtgaacccaatcaggaggaggtcttcttcaaggatgtctctgcctaaaccccagccctacgtgatgcctcccccaccgcagttgcactataatggacattatacagaaccatatgcttcttcccaagataacctctttgtgcccaaccagaacggatactactgtcactctcagacaagcttggatagagcccagattgacttcaacggtcggatccgtaatggcagtgtctacagtgcacacagcaccaactccttaaataatcctcagccctacttgcagccctcgccgatgtcgtccaaccctagcatcaccgggagtgacgtcatgaggcctgactacctcccgtcccatcggcacagcgccgtgatacccccgtcctaccgccccaccccagactatgagactgtgatgaagcagctcaacaggggcctggtgcatgcggaacggcagagccactcgctgcgaaacctcaacatcggcagctcgtacgcctacagcaggcccgcggcgctggtctacagccagcccgagatccgcgagcacgcacagctcccctcgccagcggccgcacactgcccgttcagcctgagctacagcttccacagcccgtctccctacccctaccctgccgagcggcggcccgtggtgggcgcggtcagcgtgccggagctgaccaatgcgcagctgcaggcgcaggactacccgtctcccaacatcatgcggacgcaggtgtaccggccacccccaccctacccgccccccaggcccgccaacagcacgccagacctgtcccgccacctttacatcagcagcagcaaccccgacctcatcacgcggcgcgtgcaccactcggtgcaaacgttccaggaggacagcctgcccgtggcgcactcgctgcaggaggtcagcgagcccctcaccgccgcgcgccacgcgcagctgcacaaacggaacagcatcgaggtggccgggctcagccacggcctggagggcctgcggctcaaggagcgcaccctatccgcgtcggcggcagaggtggcgccgcgagccgtctcggtgggctcccagcccagcgttttcaccgagaggacacagcgagaagggccggaggaggcggagggcttgaggtacggccataagaagtccctgtcggacgccaccatgctaatccacagcagcgaggaggaggaggacgaggacttcgaggaggagagcggggcccgggcgccccctgcacgtgcgcgcgagcctcggcccggcctggcccaggacccacctggctgccctcgcgtcctgctcgccgggcccctgcacatcctggagcccaaggcccacgtcccagacgcggagaagaggatgatggacagcagccccgtccgcacgaccgcagaggcccagcggccctggagagacgggctgctgatgccctccatgtcggagtccgacctcaccacgtcaggccgctaccgagcccggagggactctctgaagaaaaggccggtgtcggaccttctctctgggaagaagaacatcgtggaagggctcccgcctctagggggaatgaaaaagactcgagtagatgcaaaaaaaattggtcctcttaaactggctgccctaaatggactctccctatctcgagtgcctctgcctgatgaaggaaaggaagtggctaccagagcaacgaatgatgaaaggtgtaaaattctggaacaacgattagaacaaggaatggtattcacagaatatgaaagaattcttaagaaacggctagttgatggggagtgctcaacagcacgactccctgaaaatgcagaaagaaatcgattccaagatgttcttccttatgatgatgcgagagtggagttggtcccaactaaagaaaacaacactggttacatcaacgcatcacatattaaggtctctgtcagtggaatcgaatgggattatattgccacacagggaccattacagaatacctgtcaagatttttggcagatggtatgggaacagggaattgcaattatagcaatggtgacagcagaagaggagggtggaagggagaagagctttaggtactggccacgacttggttccaggcacaacactgtcacctatggaaggtttaagatcacgacccggttccgcacagactctggctgctatgccaccacaggcctgaagatgaagcacctccttaccgggcaagagaggaccgtctggcacctccaatacacagactggcctgaacatggctgtccagaagacctcaagggatttttatcatatcttgaagagatccagtctgttcgacgccatacaaatagcacaagtgatccccaaagccccaaccctccgttgttggtccactgcagtgctggggtaggaaggactggcgtggtgattttgtcggagatcatgatcgcctgcctggaacacaatgaggtgctggacatcccgagagtgctggacatgctgaggcaacagagaatgatgctggtgcagactctctgccagtacacatttgtgtacagagtcctcatccagttcctgaaaagctccaggctcatctaagctcccacaatttcttacggggccagtcatgtgaagcgtttacagcttaaaaaaaaagcgcttgcctaactcatactttcccgttgacacttgatccacgcagcgtggcactgggacgtaagtggcgcagtctgaatggcggcacgctgaaggaaacgtgcgaagcacaggctgaagaggggtttctaacctgggaaaggtgctcaaggaggacttggtttcaagggccttgccctgccccggtctgtccggtttgcagtacttgcacacattttggagattgtattttctagacaattctctattttactgaagctatgctgggcaattctggcaatcattaaagtgcatagatttctatcttaaaaaaaaaaaaa

SEQ ID NO: 13092 - DNA, 2163 bp, Homo sapiens
agaggcggaagtaaaagcgaactacagtggatgggtgcagttcaggagatagctgttctccagcctttctggagggatgcagagcctttccttaggacaaacaagcatttcaaaaggtttgaactacctaaccattatggcaccaggaaacctctggcatatgagaaataactttctctttggttcaagatgttggatgactcgattttcagcagaaaacatcttcaaatcagtttcatttaggctttttggtgtgaagtgtcataatacagacagtgagcctttgaaaaatgaggacctactgaaaaacttacttactatgggagtagatattgacatggcaaggaaacgacagcctggagtttttcataggatgattaccaatgagcaggacctgaagatgttccttctttccaaaggagctagcaaagaagtgatcgctagcatcatatcaagatatccacgagcaataacacgtactcccgagaatctttcaaaacggtgggatctgtggagaaagattgtgacatcagaccttgaaattgtaaatattttggaacgttctcctgaatccttttttcggtccaataacaacctaaacttagagaataatataaagttcctctactcagttggattgacccgtaaatgcctttgtcgattgttgaccaatgcccctcgtaccttctccaatagtcttgatctgaataaacagatggttgaatttttgcaggcagccggtttgtcattgggtcacaatgatcccgcagattttgtcagaaagataatttttaaaaacccttttatcttaattcagagcaccaagcgggtgaaagctaacattgaattcttacggtcaactttcaatttgaacagtgaggaactgctggttctgatatgtggtccaggagctgaaatcctagacctttccaatgactatgccagaagaagctacgcaaacatcaaagagaagctgttttctcttggatgtactgaagaagaggtacagaagtttgtcttaagctatccagatgtgatcttcttggcagagaaaaagtttaatgataaaatagactgcctcatggaagaaaacattagcatttcacaaataatcgaaaatcctcgggttctggattcaagcataagtactttaaaaagtcgaatcaaagaattggtaaatgctggctgtaacttgagtactttaaacatcactcttctatcttggagtaaaaaaagatatgaagctaaattgaaaaagttaagcagatttgcctaaggatgccaatgtttttaattctcaggaactgtgaatatgttatgccacattgcaaaagaattttgcagaagtgattaatttaaaatgttattaagggccttgagatggggagattatcctgaattactttggagggcctaatataattgtagggatctttaaaagttgaagagggaggcaaaagaggaggtcagagtgatcctgtataagaaagacaactacttttgaaggaagttaaaaggtggctttgaaggaggaagacaccttgagccaaggaatgaagggggcctgtaaaaaaagattgaaaaggcaaggaaacagattctccattagagtccccagaaaggaatgcagccttgctggcacctttttagcccagtgagatcaatgtcaaacttctgacccacagaaccataagatggtaaatttgtgttgttttaaaccactgagtcagtgataatttgctgaagaagcaaatagattaacatagcaactaagtagatgattagttgcattataggtgaagtcaaaaatacagtcctttagtaaagtctctatttcttccttttataagagtaattatatttaaaaaatctacctacccttctggaattgctaatgttagtgtttataaagtcttaaatgtgtgcataaaaaactaaatgtgaatataaaatctaaataaaggaatatgtttgcctaatatagtttaaggaaatgataatcatttctgtgcattttgttggcatttcagctaatattaaagagtaattttcagaggcattgacttaaaaaatggcaaatcagataatgtcggtattttcaagatacaatctagctctgacataaactgaaagacgtgagacaaattatatgaccttaatttt

SEQ ID NO: 13093 - DNA, 4456 bp, Homo sapiens
gatggggcttttttccagatcttcgcgccgagagccggggacggccaacctgccggcatgcgataaaggccggggaatgtctagctggggccgcgctgagccgagtgcggacccgctttgtgtgcgcgtttgtttgtctccgctgcggtccgaaccgctgccgcgacccccgaggaggcggggcctccgcgcgcccggctccgcctggtgagggtttcacggcctctgctgccgccgccgccgccctcgtttgttccgttagatcgcgcagccccgaccgctgcacccggatcctagcaagccgggcgaggctgcccgggagccctcgatggccttcatttcacccaagcccgcttcttgctttccccggcgcttcccctcttttcctggttaacagcttatgggcggggagctcggcaaaactcagactaaaaacagaaaaagagaaaagaaaggacaaattcgatacacccgcgtcggtcctccagagtttgtgaaggggtgtaaacatgtcggagtctggggagatgagtgaatttggctacatcatggaattgatagctaaaggcaaggttaccattaagaatatcgaaagggagctcatttgcccagcatgcaaggagctgtttacccacccattgattctcccttgccaacatagtatctgtcataaatgtgtaaaagaactcctgctgactctcgatgattcattcaacgatgtgggatcagacaactccaatcaaagcagtcctcgacttcggctcccctcccctagtatggataaaattgaccgaattaacagaccaggctggaagcgcaattcattgaccccgaggacaactgttttcccttgccctggctgtgagcatgatgtggatcttggagaacgaggaatcaatggtctgtttcgaaacttcactttggaaactattgtggaaagatatcgtcaagcagctagggcagccacagccattatgtgtgacctttgtaaaccaccacctcaagaatccacaaaaagctgcatggactgtagtgcaagttactgcaatgaatgcttcaaaattcatcacccttggggtactataaaagctcaacatgagtatgttggtccaactactaacttcagacccaagattttaatgtgcccagaacatgaaacagagagaataaacatgtactgtgaattatgtaggaggccagtttgccatctgtgtaagttgggtggtaatcatgccaaccaccgtgtaaccactatgagcagtgcctacaaaaccttaaaggaaaagctttcaaaggatattgattaccttattggtaaggaaagccaggtgaagagtcaaatatctgaactaaacttgttaatgaaagaaacagagtgtaatggagagagggctaaagaagaagcaattacacattttgaaaagctctttgaagttctggaagagaggaaatcatctgttttgaaagcaattgactcctctaagaaactaagattagacaaatttcagactcaaatggaagagtaccagggacttctagagaacaatggacttgtgggatatgctcaagaagtgctaaaggagacagatcagtcttgctttgtgcagacagcaaagcagctccacctcagaatacagaaagccacagaatctttgaagagctttagacctgcagctcagacttcttttgaagactatgttgttaatacctctaaacaaacagaacttcttggagaattatcctttttctctagtggcatagacgtgccagagatcaatgaggaacagagcaaagtttataacaatgccttgataaattggcaccatccagaaaaggataaagctgatagctatgttcttgaatatcggaaaatcaatagagatgatgaaatgtcatggaatgagatagaagtgtgtggaacaagtaaaataattcaagacttggaaaacagtagtacctatgctttcagagtaagagcttacaagggttcaatctgtagtccttgcagcagagaattgattcttcatactcctccagctccagttttcagcttcctctttgatgaaaaatgtggctataataatgaacacctcctgctgaacttgaagagagaccgtgtagagagtagagctggatttaatcttctgcttgctgcagaacgcatccaagtgggttattacacaagcttagactacatcattggagatactggcattacaaaaggaaaacacttctgggccttccgtgtggaaccatattcatacctggtaaaagtgggagttgcttctagcgataaactacaagaatggctccgttctccccgggatgcagttagtccaagatatgagcaagacagtgggcatgacagtggaagtgaggatgcctgttttgattcttcacaaccatttaccttagttactataggcatgcagaaattttttatacccaagtcacctacttcttctaatgaacctgaaaatagagttctccctatgccaacaagtattgggattttccttgactgtgataaaggcaaagtagatttctatgatatggatcagatgaaatgcctttatgaacgccaagtggactgttcacatacactgtatccagcatttgcattaatgggcagtggaggaattcagcttgaagaacccatcacagcaaaatatctggaataccaagaggacatgtagttgaaacatctgatgtgactcaggataaaaactgtaaacaaagcaatgccttagcgttaaccttcgtaactaattacatatcgctgagtgttctgtcaccccacttgtgtttgagtatgattcttcttgaaatacagaaaatctaaacagccttgtgtcttcatgtcgttgttctgcctttcacaaatgatgaaagtgaagatgttctttccaagttaatactgaagtggttaactttgcaactggactgtcttttactttatgtacaggatatctaatttatttctgtcagctggtgttgctgacactttccttatggtgggggggatacaaaagtatttattatgattctcttctgtttgacttttcatttttatatcatgtttatgtcctaagagaagatattttttaaatgccttatggataggaattagtactaagcaatgtgtcttgcatttgttttcaataggaaaacaaagttctagataggttaaaagaaaaacaccataaaagtggtagtatatttaagtggaaaattatgtattttaaagtgtgtaactattaaaaatatattgcctggaaaaggaatactactgttttgttttgttaagaccacaaactgtattgctaaggacattttaagagtctgcttagccataacactcatttaacagcatgggtagtaagcatggtttcttgcagaaaacacaaagttctcagctaacacattaaacttctcactttatatactttttttcagagaaatttatctttagtttttcttattctgtgaaaatatttgttcttatgtcaaagaattatttttcagatatattggtaaagatggactgatattaaaagtcatatttattcttttacccccttactgtgttttgtgattttcatttttggcccaattattacatatcaggttttcctgatttatatttacatgtttgaaaagttcattatatattttagtagcgttacatatattataaatttttgtaacatttaaatgttcacttatgtggcattttctgtttctcattggtaataagcatttctaatataagcaagtaaaaatacaaatttaattacttagaaatgataactaagatcacaatgactgtgtaccctttaaaatatcttttaatttgaggaattacattctatctaaattgtgtgtctgtttttgaaaggtgttgctttcaagtaggtggtttttatttaaagtacttatttttttgaggttaaaatattcagaaactacttttatgcattgtagcagtaatcatttatggaatgcttttgacatgttttaacagggtaaccaaaacttttaggcctgttttttttggttgtccttgttgttatatttttaatggaaatctgttactcaggctggtagcattaaattagctttttaccctcaactcaagtagcaaatatcatggagaacttcagtgtttagcaggctgttaatttcccatctatgaatagcactttatgatgtaggctaaactaagcaaataatgcagcgttatgtggatcattatgcaataaagctgctaaagtcacatttgtggttgatactcaagccttgtacaagcacatatgatgtagacatttttaaatgtgaagctttaacaggaataggatagctgtttcaaaccttgtgcaattgtaaataaattgtttagctgtgtttctttcatttttaataaaaaattaaaaagaaaaaaaaaaaaaaaaaaaaa

SEQ ID NO: 13094 - DNA, 2162 bp, Homo sapiens
gcggacgtgagcgataatggcggatatggaggatctcttcgggagcgacgccgacagcgaagctgagcgtaaagattctgattctggatctgactcagattctgatcaagagaatgctgcctctggcagtaatgcctctggaagtgaaagtgatcaggatgaaagaggtgattcaggacaaccaagtaataaggaactgtttggagatgacagtgaggacgagggagcttcacatcatagtggtagtgataatcactctgaaagatcagacaatagatcagaagcttctgagcgttctgaccatgaggacaatgacccctcagatgtagatcagcacagtggatcagaagcccctaatgatgatgaagacgaaggtcatagatcggatggagggagccatcattcagaagcagaaggttctgaaaaagcacattcagatgatgaaaaatggggcagagaagataaaagtgaccagtcagatgatgaaaagatacaaaattctgatgatgaggagagggcacaaggatctgatgaagataagctgcagaattctgacgatgatgagaaaatgcagaacacagatgatgaggagaggcctcagctttccgatgatgagagacaacagctatctgaggaggaaaaggctaattctgatgatgaacggccggtagcttctgataatgatgatgagaaacagaattctgatgatgaagaacaaccacagctgtctgatgaagagaaaatgcaaaattctgatgatgaaaggccacaggcctcagatgaagaacacaggcattcagatgatgaagaggaacaggatcataaatcagaatctgcaagaggcagtgatagtgaagatgaagttttacgaatgaaacgcaagaatgcgattgcatctgattcagaagcggatagtgacactgaggtgccaaaagataatagtggaaccatggatttatttggaggtgcagatgatatctcttcagggagtgatggagaagacaaaccacctactccaggacagcctgttgatgaaaatggattgcctcaggatcaacaggaagaggagccaattcctgagaccagaatagaagtagaaatacccaaagtaaacactgatttaggaaacgacttatattttgttaaactgcccaactttctcagtgtagagcccagaccttttgatcctcagtattatgaagatgaatttgaagatgaagaaatgctggatgaagaaggtagaaccaggttaaaattaaaggtagaaaatactataagatggaggatacgccgagatgaagaaggaaatgaaattaaagaaagcaatgctcggatagtcaagtggtcagatggaagcatgtccctgcatttaggcaatgaagtgtttgatgtgtacaaagccccactgcagggcgaccacaatcatctttttataagacaaggtactggtctacagggacaagcagtctttaaaacgaaactcaccttcagacctcactctacggacagtgccacacatagaaagatgactctgtcacttgcagataggtgttcaaagacacagaagattagaatcttgccaatggctggtcgtgatcctgaatgccaacgcacagaaatgattaagaaagaagaagaacgtttgagggcttccatacgtagggaatctcagcagcgccgaatgagagagaaacagcaccagcgggggctgagcgccagttacctggaacctgatcgatacgatgaggaggaggaaggcgaggagtccatcagcttggctgccattaaaaaccgatataaagggggcattcgagaggaacgagccagaatctattcatcagacagtgatgagggatcagaagaagataaagctcaaagattactcaaagcaaagaaacttaccagtgatgaggaaggtgaaccttccggaaagagaaaagcagaagatgatgataaagcaaataaaaagcataagaagtatgtgatcagcgatgaagaggaagaagatgatgattgaagtatgaaatatgaaaacattttatatattttattgtacagttataaatatgtaaacatgagttattttgattgaaatgaatcgatttgcttttgtgtaattttaattgtaataaaacaatttaaaagcaaaaaaaaaaaaaaaa

SEQ ID NO: 13095 - DNA, 3822 bp, Homo sapiens
ctcctggggacaattcccttttcctttcttcagcctaacccgcggtggccctcgcggagtccggtcagccccggggagcgcaacccgggaggggcgtccaaggggcgtctcgcgtctgggaacggccgggcccccagcgggctgtggtcgcggggtgggggccggagcggcgaggccccccttaccgggctgcgcaggccgcccagggcccccgggctgagacggggccggagcggcgccccggccgcccgcgcggggtctcccccatggtgcagcggggttcgggatgtcgaagacgctgaagaagaagaagcactggctcagcaaggtgcaggagtgcgccgtgtcctgggccgggcccccgggcgacttcggcgcggagatccgcggtggcgcggagcgtggcgaattcccctacctggggcggctccgcgaagaacccggcgggggcacctgctgcatcgtctcgggcaaggcgcccaacccaagcgatgtgctgctggaggtaaacgggacgcctgtcagcgggctcaccaaccgggacaccctggctgtcatccgccacttccgcgagcccatccgtctcaagactgtgaaaccaggcaaagtcattaataaagatttgcggcattacctaagtcttcagtttcaaaaaggatcaattgaccacaaactgcagcaagtgatcagagataatctctacttgagaaccattccatgcactacaagggcccccagggatggagaagtaccaggagtggattataatttcatttccgttgaacagttcaaagcactggaggagagtggagcattgttagaaagtgggacatatgatggaaacttctatggaactcccaagcctccagcagaacccagcccttttcagccagatccagttgatcaagtcctctttgataatgagtttgatgcagaatctcaaagaaaacgaacgacatctgtcagcaagatggaaagaatggatagctctcttcctgaagaggaagaagatgaggacaagggagctattaatggcagtggaaacgcagaaaacagagagaggcattctgagtcatctgactggatgaagactgttccaagttacaaccaaacaaatagctccatggactttagaaattatatgatgagagatgagactctggaaccactgcccaaaaactgggaaatggcctacactgacacagggatgatctacttcattgaccacaataccaagacaaccacttggttggatcctcgtctttgtaagaaagccaaagcccctgaagactgtgaagatggagagcttccttatggctgggagaaaatagaggaccctcagtatgggacatactatgttgatttcactcttgtcgcccaagctggagtgcaatggcatgatctcggctcactgcaacctccgcctcctgggttcaatcaccttaaccagaaaacccagtttgaaaatccagtggaggaagccaaaaggaaaaagcagttaggacaggttgaaattgggtcttcaaaaccagatatggaaaaatcacacttcacaagagatccatcccagcttaaaggtgtccttgttcgagcatcactgaaaaaaagcacaatgggatttggttttactattattggtggagatagacctgatgagttcctacaagtgaaaaatgtgctgaaagatggtcccgcagctcaggatgggaaaattgcaccaggcgatgttattgtagacatcaatggcaactgtgtcttcggtcacactcatgcagatgttgtccagatgtttcaattggtacctgtcaatcagtatgtaaacctcactttatgtcgtggttatccacttcctgatgacagtgaagatcctgttgtggacattgttgctgctacccctgtcatcaatggacagtcattaaccaagggagagacttgcatgaatcctcaggattttaagccaggagcaatggttctggagcagaatggaaaatcgggacacacttcgactggtgatggtctcaatggaccatcagatgcaagtgagcagagagtatccatggcatcgtcaggcagctcccagcctgaactagtgactatccctttgattaagggccctaaagggtttgggtttgcaattgctgacagccctactggacagaaggtgaaaatgatactggatagtcagtggtgtcaaggccttcagaaagaagatataattaaggaaatataccatcaaaatgtgcagaatttaacacatctccaagtggtagaggtgctaaagcagtttccagtaggtgctgatgtaccattgcttatcttaagaggaggtcctccttcaacaaccaaaactgccaaaatgaaaacagataaaaaggaaaatgcaggaagtttggaggccataaatgagcctattcctcagcctatgccttttccaccgagcattatcaggtcaggatccccaaaattggatccttctgaggtctacctgaaatctaagactttatatgaagataaaccaccaaacaccaaagatttggatgtttttcttcgaaaacaagagtcagggtttggcttcagggtgctaggaggagatggacctgaccagtctatatatattggggctattattcccctgggagcagctgagaaagatggtcggctccgcgcagctgatgaactaatgtgcattgatggaattcctgttaaagggaaatcacacaaacaagtcttggacctcatgacaactgctgctcgaaatggccatgtgttactaactgtcagacggaagatcttctatggagaaaaacaacccgaggacgacagctctcaggccttcatttcaacacagaatggatctccccgcctgaaccgggcagaggtcccagccaggcctgcaccccaggagccctatgatgttgtcttgcaacgaaaagaaaatgaaggatttggctttgtcatcctcacctccaaaaacaaaccacctccaggagttattcctcataaaattggccgagtcatagaaggaagtccggctgaccgctgtggaaaactgaaagttggagatcatatctctgcagtgaatgggcagtccattgttgaactgtctcatgctaacattgttcagctgatcaaagatgctggtgtcaccgtcacactaacggtcattgctgaagaagagcatcatggtccaccatcaggaacaaactcagccaggcaaagcccagccctgcagcacaggcccatgggacagtcacaggccaaccacatacctggggacagaagtgccctagaaggtgaaattggaaaagatgtctccacttcttacagacattcttggtcagaccacaagcaccttgcacagcctgacaccgcagtaatttcagttgtaggcagtcggcacaatcagaaccttggttgttatccagtagagctggagagaggcccccggggctttggattcagcctccgaggggggaaggagtacaacatggggctgttcatccttcgtcttgctgaagatggtcctgccatcaaagatggcagaattcatgttggtgaccaaattgttgaaatcaatggggaacctacacaaggaatcacacatactcgagcaattgagctcattcaggctggtggaaataaagttcttcttcttttgaggccaggaactggcttgatacctgaccatggtttggctccttccggtctgtgctcctacgtgaaacccgagcaacattaaggctttcagggcttttcttggtctttccttaaaaagacttggtaaatttgcatgtcttgtaaatcactttcttcttttgtttt

SEQ ID NO: 13096 - DNA, 3504 bp, Homo sapiens
atgtcgaagacgctgaagaagaagaggcactggctcagcaaggtgcaggagtgcgccgtgtcctgggccgggcccccgggagacttcggcgcggagatccgcggtggcgcggagcgtggcgagttcccctacctggggcggctccgcgaggagcccggcgggggcacctgctgcgtcgtctcgggcaaggcgcccagcccaggcgatgtgctgctggaggtaaacgggacgcctgtcagcgggctcaccaaccgggacaccctggctgtcatccgccacttccgcgagcccatccgtctcaagactgtgaaaccaggcaaagtcattaataaagatttgcggcattacctaagtcttcagtttcaaaaaggatcaattgaccacaaactgcagcaagtgatcagagataatctctacttgagaaccattccatgcactacaagggcccccagggatggagaagtaccaggagtggattataatttcatttccgttgaacagttcaaagcactggaagagagtggagcattgttagaaagtgggacatatgatggaaacttctatggaactcccaagcctccagcagaacccagcccttttcagccagatccagttgatcaagtcctctttgataatgagtttgatgcagaatctcaaagaaaacgaacgacatctgtcagcaagatggaaagaatggatagctctcttcctgaagaggaagaagatgaggacaaggaagctattaatggcagtggaaacgcagaaaacggagagaggcattctgagtcatctgactggatgaagactgttccaagttacaaccaaacaaatagctccatggactttagaaattatatgatgagagatgagactctggaaccactgcccaaaaactgggaaatggcctacactgacacagggatgatctacttcattgaccacaataccaagacaaccacctggttggatcctcgtctttgtaagaaagccaaagcccctgaagactgtgaagatggagagcttccttatggctgggagaaaatagaggaccctcagtatgggacatactatgttgatcaccttaaccagaaaacccagtttgaaaatccagtggaggaagccaaaaggaaaaagcagttaggacaggttgaaattgggtcttcaaaaccagatatggaaaaatcacacttcacaagagatccatcccagcttaaaggtgtccttgttcgagcatcactgaaaaaaagcacaatgggatttggttttactattattggtggagatagacctgatgagttcctacaagtgaaaaatgtgctgaaagatggtcccgcagctcaggatgggaaaattgcaccaggcgatgttattgtagacatcaatggcaactgtgtcctcggtcacactcatgcagatgttgtccagatgtttcaattggtacctgtcaatcagtatgtaaacctcactttatgtcgtggttatccacttcctgatgacagtgaagatcctgttgtggacattgttgctgctacccctgtcatcaatggacagtcattaaccaagggagagacttgcatgaatcctcaggattttaagccaggagcaatggttctggagcagaatggaaaatcgggacacactttgactggtgatggtctcaatggaccatcagatgcaagtgagcagagagtatccatggcatcgtcaggcagctcccagcctgaactagtgactatccctttgattaagggccctaaagggtttgggtttgcaattgctgacagccctactggacagaaggtgaaaatgatactggatagtcagtggtgtcaaggccttcagaaaggagatataattaaggaaatataccatcaaaatgtgcagaatttaacacatctccaagtggtagaggtgctaaagcagtttccagtaggtgctgatgtaccattgcttatcttaagaggaggtcctccttcaccaaccaaaactgccaaaatgaaaacagataaaaaggaaaatgcaggaagtttggaggccataaatgagcctattcctcagcctatgccttttccaccgagcattatcaggtcaggatccccaaaattggatccttctgaggtctacctgaaatctaagactttatatgaagataaaccaccaaacaccaaagatttggatgtttttcttcgaaaacaagagtcagggtttggcttcagggtgctaggaggagatggacctgaccagtctatatatattggggctattattcccctgggagcagctgagaaagatggtcggctccgcgcagctgatgaactaatgtgcgttgatggaattcctgttaaagggaaatcacacaaacaagtcttggacctcatgacaactgctgctccaaatggccatgtgttactaactgtcagacggaagatcttctatggagaaaaacaacccgaggacgacagctctcaggccttcatttcaacacagaatggatctccccgcctgaaccgggcagaggtcccagccaggcctgcaccccaggagccctatgatgttgtcttgcaacgaaaagaaaatgaaggatttggctttgtcatcctcacctccaaaaacaaaccacctccaggagttattcctcataaaattggccgagtcatagaaggaagtccggctgaccgctgtggaaaactgaaagttggagatcatatctctgcagtgaatgggcagtccattgttgaactgtctcatgataacattgttcagctgatcaaagatgctggtgtcaccgtcacactaacggtcattgctgaagaagagcatcatggtccaccatcaggaacaaactcagccaggcaaagcccagccctgcagcacaggcccatgggacagtcacaggccaaccacatacctggggacagaagtgccctagaaggtgaaattggaaaagatgtctccacttcttacagacattcttggccagaccacaagcaccttgcacagcctgacaccgcagtaatttcagttgtaggcagtcggcacaatcagaaccttggttgttatccagtagagctggagagaggcccccggggctttggattcagcctccgaggggggaaggagtacaacatggggctgttcatccttcgtcttgctgaagatggtcctgccatcaaagatggcagaattcatgttggtgaccagattgttgaaatcaatggggaacctacacaaggaatcacacatactcgagcaattgagctcattcaggctggtggaaataaagttcttcttcttttgaggccaggaactggcttgatacctgaccatggtttggctccttccggtctgtgctcctacgtgaaacccgagcaacattaaggctttcagggcttttcttggtctttccttaaaaagacttggtaaatttgcatgtcttgtaaatcactttcttcttttgttttcttttaaattaaaaatgatgctattaaatacatctatttctat

SEQ ID NO: 13097 - DNA, 5942 bp, Homo sapiens
aaaaggcggcaaggagccgagaggctgcttcggagtgtgaggaggacagccggaccgagccaacgccggggactttgttccctccgcggaggggactcggcaactcgcagcggcagggtctggggccggcgcctgggagggatctgcgccccccactcactccctagctgtgttcccgccgccgccccggctagtctccggcgctggcgcctatggtcggcctccgacagcgctccggagggaccgggggagctcccaggcgcccgggactggagactgatgcatgagggggctacggaggcgcaggagcggtggtgatggtctgggaagcggagctgaagtgccctgggctttggtgaggcgtgacagtttatcatgaccgtgttcaggcaggaaaacgtggatgattactacgacaccggcgaggaacttggcagtggacagtttgcggttgtgaagaaatgccgtgagaaaagcaccggcctccagtatgccgccaaattcatcaagaaaaggaggactaagtccagccggcggggtgtgagccgcgaggacatcgagcgggaggtcagcatcctgaaggagatccagcaccccaatgtcatcaccctgcacgaggtctatgagaacaagacggacgtcatcctgatcttggaactcgttgcaggtggcgagctgtttgacttcttagctgaaaaggaatctttaactgaagaggaagcaactgaatttctcaaacaaattcttaatggtgtttactacctgcactcccttcaaatcgcccactttgatcttaagcctgagaacataatgcttttggatagaaatgtccccaaacctcggatcaagatcattgactttgggttggcccataaaattgactttggaaatgaatttaaaaacatatttgggactccagagtttgtcgctcctgagatagtcaactatgaacctcttggtcttgaggcagatatgtggagtatcggggtaataacctatatcctcctaagtggggcctccccatttcttggagacactaagcaagaaacgttagcaaatgtatccgctgtcaactacgaatttgaggatgaatacttcagtaataccagtgccctagccaaagatttcataagaagacttctggtcaaggatccaaagaagagaatgacaattcaagatagtttgcagcatccctggatcaagcctaaagatacacaacaggcacttagtagaaaagcatcagcagtaaacatggagaaattcaagaagtttgcagcccggaaaaaatggaaacaatccgttcgcttgatatcactgtgccaaagattatccaggtcattcctgtccagaagtaacatgagtgttgccagaagcgatgatactctggatgaggaagactcctttgtgatgaaagccatcatccatgccatcaacgatgacaatgtcccaggcctgcagcaccttctgggctcattatccaactatgatgttaaccaacccaacaagcacgggacacctccattactcattgctgctggctgtgggaatattcaaatactacagttgctcattaaaagaggctcgagaatcgatgtccaggataagggcgggtccaatgccgtctactgggctgctcggcatggccacgtcgataccttgaaatttctcagtgagaacaaatgccctttggatgtgaaagacaagtctggagagatggccctccacgtggcagctcgctatggccatgctgacgtggctcagttactgtgcagcttcggctcaaatcccaatatccaggacaaggaagaagaaacccccctgcactgtgctgcttggcacggctattactctgtggccaaagccctttgtgaagccggctgtaacgtgaacatcaagaaccgagaaggagagacgcccctcctgacagcctctgccaggggctaccacgacatcgtggagtgtctggccgaacatggagccgaccttaatgcttgcgacaaggacggacacattgcccttcatctggctgtaagacggtgtcagatggaggtaatcaagactctcctcagccaagggtgtttcgtcgattatcaagacaggcacggcaatactcccctccatgtggcatgtaaagatggcaacatgcctatcgtggtggccctctgtgaagcaaactgcaatttggacatctccaacaagtatgggcgaacgcctctgcaccttgcggccaacaacggaatcctagacgtggtccggtatctctgtctgatgggagccagcgttgaggcgctgaccacggacggaaagacggcagaagatcttgctagatcggaacagcacgagcacgtagcaggtctccttgcaagacttcgaaaggatacgcaccgaggactcttcatccagcagctccgacccacacagaacctgcagccaagaattaagctcaagctgtttggccactcgggatccgggaaaaccacccttgtagaatctctcaagtgtgggctgctgaggagctttttcagaaggcgtcggcccagactgtcttccaccaactccagcaggttcccaccttcacccctggcttctaagcccacagtctcagtgagcatcaacaacctgtacccaggctgcgagaacgtgagtgtgaggagccgcagcatgatgttcgagccgggtcttaccaaagggatgctggaggtgtttgtggccccgacccaccacccgcactgctcggccgatgaccagtccaccaaggccatcgacatccagaacgcttatttgaatggagttggcgatttcagcgtgtgggagttctctggaaatcctgtgtatttctgctgttatgactattttgctgcaaatgatcccacgtcaatccatgttgttgtctttagtctagaagagccctatgagatccagctgaaccaagtgattttctggctcagtttcctgaagtcccttgtcccagttgaagaacccatagccttcggtggcaagctgaagaacccactccaagttgtcctggtggccacccacgctgacatcatgaatgttcctcgaccggctggaggcgagtttggatatgacaaagacacatcgttgctgaaagagattaggaacaggtttggaaatgatcttcacatttcaaataagctgtttgttctggatgctggggcttctgggtcaaaggacatgaaggtacttcgaaatcatctgcaagaaatacgaagccagattgtttcggtctgtcctcccatgactcacctgtgtgagaaaatcatctccacgctgccttcctggaggaagctcaatggacccaaccagctgatgtcgctgcagcagtttgtgtacgacgtgcaggaccagctgaaccccctggccagcgaggaggacctcaggcgcattgctcagcagctccacagcacaggcgagatcaacatcatgcaaagtgaaacagttcaggacgtgctgctcctggacccccgctggctctgcacaaacgtcctggggaagttgctgtccgtggagaccccacgggcgctgcaccactaccggggccgctacaccgtggaggacatccagcgcctggtgcccgacagcgacgtggaggagctgctgcagatcctcgatgccatggacatctgcgcccgggacctgagcagcgggaccatggtggacgtcccagccctgatcaagacagacaacctgcaccgctcctgggctgatgaggaggacgaggtgatggtgtatggtggcgtgcgcatcgtgcccgtggaacacctcacccccttcccatgtggcatctttcacaaggtccaggtgaacctgtgccggtggatccaccagcaaagcacagagggcgacgcggacatccgcctgtgggtgaatggctgcaagctggccaaccgtggggccgagctgctggtgctgctggtcaaccacggccagggcattgaggtccaggtccgcggcctggagacggagaagatcaagtgctgcctgctgctggactcggtgtgcagcaccattgagaacgtcatggccaccacgctgccagggctcctgaccgtgaagcattacctgagcccccagcagctgcgggagcaccatgagcccgtcatgatctaccagccacgggacttcttccgggcacagactctgaaggaaacctcactgaccaacaccatgggggggtacaaggaaagcttcagcagcatcatgtgcttcgggtgtcacgacgtctactcacaggccagcctcggcatggacatccatgcatcagacctgaacctcctcactcggaggaaactgagtcgcctgctggacccgcccgaccccctggggaaggactggtgccttctcgccatgaacttaggcctccctgacctcgtggcaaagtacaacaccagtaacggggctcccaaggatttcctccccagccccctccacgccctgctgcgggaatggaccacctaccctgagagcacagtgggcaccctcatgtccaaactgagggagctgggtcgccgggatgccgcagactttttgctgaaggcatcctctgtgttcaaaatcaacctggatggcaatggccaggaggcctatgcctcgagctgcaacagcggcacctcttacaattccattagctctgttgtatcccggtgagggcagcctctggcttgggcagggtctgtttggactgcagaagcaagggggtgatgtagcccatccttccctttggagatgctgagggtgtttcttcctgcacccacagccagggggatgccactcctccctccggcttgacctgtttctctgccgctacctccctccccgtctcattccgttgtctgtggatggtcattgcagtttaagagcagaacagatcttttactttggccgcttgaaaagctagtgtacctcctctcagtgttttggactccatctctcatcctccagtaccttgcttcttactgataattttgctggaattcctaacttttcaatgacattttttttaactactatattgattgtcctttaaaaaagaaaagtgcatatttatccaaaatgtgtatttcttatacgcttttctttgttataccatttcctcagcttatctcttttatatttgtaggagaaactcccatgtatggaatcccactgtatgatttataaacagacaatatgtgagtgccttttgcagaagagggtgtgtttgaaatcatcggagtcagccaggagctgtcaccaaggaaacgctacctctctgtcccttgctgtatgctgatcatcgccagaggtgcttcaccctgagttttgttttgtattgttttctgacagtttttctgttttgtttggcaaggaaaggggagaagggaatcctcctccagggtgattttatgatcagtgttgttgctctaggaagacatttttccgtttgcttttgttccaatgtcaatgtgaacgtccacatgaaacctacacactgtcatgcttcatcattccctctcatctcaggtagaaggttgacacagttgtagggttacagagacctatgtaagaattcagaagacccctgactcatcatttgtggcagtcccttataattggtgcatagcagatggtttccacatttagatcctggtttcataacttcctgtacttgaagtctaaaagcagaaaataaaggaagcaagttttcttccatgattttaaattgtgatcgagttttaaattgataggagggaacatgtcctaattcttctgtcctgagaagcatgtaatgttaatgttatatcatatgtatatatatatatgcactatgtatatacatatatattaatactggtatttttacttaatctataaaatgtcgttaaaaagttgtttgtttttttctttttttataaataaactgttgctcgttgcattaaaaa

SEQ ID NO: 13098 - DNA, 2467 bp, Homo sapiens
tcttccgggtgagggtcctgcagcccgtgaatccctggtcccgccgagacttggacctggtgcgaactggaggcgaagcgggtgcacccacaacctataggaagggctggcggcgagctctgagcactcgggcgtcggagggaacgctctgctttcaacactcttggccctttctcaagagaacatgaaaatgaaaaaatttcagataccagtttcattccaggacctgactgtgaacttcacccaagaggaatggcagcaactggaccctgctcagaggctcctgtacagggatgtgatgctggagaactacagcaacttggtctctgtggggtatcatgttagcaaaccagatgtgattttcaaattggagcaaggagaagagccatggatagtggaggaattctcaaatcagaactacccagacattgatgatgccttagagaagaacaaggaaatccaagataaacatttgacacaaactgtattcttcagcaacaaaacactgattacagaaagagagaatgtatttgggaaaacacttaatctgggcatgaatagtgttccctcaagaaaaatgccctataaatgtaatccaggaggaaacagtttgaaaactaattcagaagtaattgttgcaaagaaaagcaaagaaaacagaaagattcctgatggatacagtggatttgggaagcatgagaaaagtcatttgggaatgaaaaaatacagatacaatccaatgaggaaagccagcaatcaaaacgaaaatcttattctgcaccagaacattcagattttgaaacaaccgtttgactataataaatgtgggaaaaccttcttcaagagggcaattctcattacacaaaaggggagacagactgaaaggaaaccaaatgaatgtaatgaatgtaggaaaaccttttctaagagatctaccctcattgtacatcagagaattcatacaggggagaaaccgtatgtttgtagtgattgtaggaaaacttttcgtgtgaagacaagcctcactcgacaccgaagaattcatactggagagagaccctatgaatgcagtgaatgcaggaaaaccttcattgacaaatctgcccttattgtacaccagaaaattcatggaggggagaaatcctatgagtgtaatgaatgtggaaagaccttttttcggaagtcagccctggctgaacatttcaggtcacacacaggggagaagccttacgaatgcaaggaatgtggaaatgccttcagcaagaaatcgtatcttgttgtacatcaaagaactcacagaggagagaagccaaatgaatgtaaggaatgtgggaaaaccttcttctgtcagtcagcccttactgcgcatcagagaattcacacaggggaaaaaccctatgaatgtagtgaatgtgagaaaaccttcttttgtcaatctgccctcaatgtgcatcgaagaagtcatacaggagagaagccctatgaatgcagtcaatgtggaaaatttttatgtacgaaatcagccctcattgcacatcagataactcatagaggaaagaagtcttatgaatgtaatgaatgtgggaaatttttctgccataagtcaacactcactatacatcagagaacacacacaggagagaaacatggtgtgtttaataaatgtggtagaatctccattgtgaagtcaaactgcagtcagtgtaagagaatgaacacaaaggagaatctttatgagtgtagtgaacatgggcatgccgtcagcaaaaactcacacctcattgtacatcagagaactatatgggagagaccatatgaatgcaatgaatgtgggagaacctactgcaggaagtcagccctgactcaccatcagagaacacacacaggacagagaccctatgagtgtaatgaatgtgggaaaaccttctgtcagaagttctcctttgttgaacatcagcgaactcacactggggagaaaccatatgaatgtaatgaatgtgggaaatccttctgccataagtcagccttcagagtccatagaagaattcacacaggagagaaaccatatgaatgtaatcaatgtgggaaaacctaccgtcgcctgtggactctcactgaacatcagaaaatacacacaggagagaaaccttatgaatgtaacaaatgtgagaaaacatttcgccacaaatcaaactttcttttacatcagaaatcccacaaggaataagttccaacaaagtaataaattccaacaaagcaacaaatcaaataacttacacaatgctaaactgtgagtatgtatagaggagtaaaatcttataaatgtaatgaatatggaaaatttttctgccataagtcaaccctcaatgtaacatcagagaaatcatgtaggaaagaaataatttgtttaataaatgtattattcattgtgaactatgaaaatattcaacagcaaaaaaaaaaaaaa

SEQ ID NO: 13099 - DNA, 4713 bp, Homo sapiens
cggccgcggcgcgagccggagtccgccgagccggagcgcgacgaggccccgggcgcgccctccccgctgccgccaccgccgtgccgccgccatccgcccgccgccgccgccgctgtccggcccccgagcacgccggccccgcgcgcgcctcgaggccgagtcaaggtgtgagatgcacaatgcgaaacctaggccccagcttttacaccatgatgcgcagggttgtactttttgtactgaactgataggtggcctagtggttatgccctgtactaccattttgaggatctggactccgtttcctgccttgctctttggaccacattgtcaattcacaccgaaactatgttccaacttcctgtcaacaatcttggcagtttaagaaaagcccggaaaactgtgaaaaaaatacttagtgacattgggttggaatactgtaaagaacatatagaagattttaaacaatttgaacctaatgacttttatttgaaaaacactacatgggaggatgtaggactgtgggacccatcacttacgaaaaaccaggactatcggacaaaacctttctgctgcagcgcttgtccattttcctcaaaattcttctctgcctacaaaagtcatttccgcaatgtccatagtgaagactttgaaaataggattctccttaattgcccctactgtaccttcaatgcagacaaaaagactttggaaacacacattaaaatatttcatgctccgaacgccagcgcaccaagtagcagcctcagcactttcaaagataaaaacaaaaatgatggccttaaacctaagcaggctgacagtgtagagcaagctgtttattactgtaagaagtgcacttaccgagatcctctttatgaaatagttaggaagcacatttacagggaacattttcagcatgtggcagcaccttacatagcaaaggcaggagaaaaatcactcaatggggcagtccccttaggctcgaatgcccgagaagagagtagtattcactgcaagcgatgccttttcatgccaaagtcctatgaagctttggtacagcatgtcatcgaagaccatgaacgtataggctatcaggtcactgccatgattgggcacacaaatgtagtggttccccgatccaaacccttgatgctaattgctcccaaacctcaagacaagaagagcatgggactcccaccaaggatcggttcccttgcttctggaaatgtccggtctttaccatcacagcagatggtgaatcgactctcaataccaaagcctaacttaaattctacaggagtcaacatgatgtccagtgttcatctgcagcagaacaactatggagtcaaatctgtaggccagggttacagtgttggtcagtcaatgagactgggtctaggtggcaacgcaccagtttccattcctcaacaatctcagtctgtaaagcagttacttccaagtggaaacggaaggtcttatgggcttgggtcagagcagaggtcccaggcaccagcaagatactccctgcagtctgctaatgcctcttctctctcatcgggccagttaaagtctccttccctctctcagtcacaggcatccagagtgttaggtcagtccagttccaaacctgctgcagctgccacaggccctcccccaggtaacacttcctcaactcaaaagtggaaaatatgtacaatctgtaatgagctttttcctgaaaatgtctatagtgtgcacttcgaaaaagaacataaagctgagaaagtcccagcagtagccaactacattatgaaaatacacaattttactagcaaatgcctctactgtaatcgctatttacccacagatactctgctcaaccatatgttaattcatggtctgtcttgtccatattgccgttcaactttcaatgatgtggaaaagatggccgcacacatgcggatggttcacattgatgaagagatgggacctaaaacagattctactttgagttttgatttgacattgcagcagggtagtcacactaacatccatctcctggtaactacatacaatctgagggatgccccagctgaatctgttgcttaccatgcccaaaataatcctccagttcctccaaagccacagccaaaggttcaggaaaaggcagatatccctgtaaaaagttcacctcaagctgcagtgccctataaaaaagatgttgggaaaaccctttgtcctctttgcttttcaatcctaaaaggacccatatctgatgcacttgcacatcacttacgagagaggcaccaagttattcagacggttcatccagttgagaaaaagctcacctacaaatgtatccattgccttggtgtgtataccagcaacatgaccgcctcaactatcactctgcatctagttcactgcaggggcgttggaaagacccaaaatggccaggataagacaaatgcaccctctcggcttaatcagtctccaagtctggcacctgtgaagcgcacttacgagcaaatggaatttcccttactgaaaaaacgaaagttagatgatgatagtgattcacccagcttctttgaagagaagcctgaagagcctgttgttttagctttagaccccaagggtcatgaagatgattcctatgaagccaggaaaagctttctaacaaagtatttcaacaaacagccctatcccaccaggagagaaattgagaagctagcagccagtttatggttatggaagagtgacatcgcttcccattttagtaacaaaaggaagaagtgtgtccgtgattgtgaaaagtacaagcctggcgtgttgctggggtttaacatgaaagaattaaataaagtcaagcatgagatggattttgatgctgagtggctatttgaaaatcatgatgagaaggattccagagtcaatgctagtaagactgctgacaaaaagctcaaccttgggaaggaagatgacagttcctcagacagttttgaaaatttggaagaagaatccaatgaaagtggtagcccttttgaccctgtttttgaagttgaacctaaaatctctaacgataacccagaggaacatgtactgaaggtaattcctgaggatgcttcagaatctgaggagaagctagaccaaaaagaggatggttcaaaatacgaaactattcatttgactgaggaaccaaccaaactaatgcacaatgcatctgatagtgaggttgaccaagacgatgttgttgagtggaaagacggtgcttctccatctgagagtgggcctggatcccaacaagtgtcagactttgaggacaatacctgcgaaatgaaaccaggaacctggtctgacgagtcttcccaaagcgaagatgcaaggagcagtaagccagctgccaaaaaaaaggctaccatgcaaggtgacagagagcagttgaaatggaagaatagttcctatggaaaagttgaagggttttggtctaaggaccagtcacagtggaagaatgcatctgagaatgatgagcgcttatctaacccccagattgagtggcagaatagcacaattgacagtgaggatggggaacagtttgacaacatgactgatggagtagctgagcccatgcatggcagcttagccggagttaaactgagcagccaacaggcctaagtgccaggttccctggcgttggtgacatgctgcagcctggaactctgatctccagtgtgactgcaaagctgtcttctcactggtactgccttgtgagtactggttggactgtggggcatgtggccgctgcagttccagtggttatttctaagtctatgacaggacaggctgttcttgcttcagaaccttctctgacagacacggtaactaaatgtgaaaaaccaataagctggtgactcatgaatacacacgaggaaaagcagaggtttattttatctgccttttcaacatttctttccctctgtgaaatgattggtcagatgtctttgagaagtgttaaactaattcacatggtagtgtagggccaacatacaagctaccagtctaatgtgtatagtagactttgggaaaagcgattttttttcatgtattcattctgaatagttgaaatgtatatttgtacagtcttttagacctattcaagtgatgctcatgatcctgttactgtgtgcccatcatagatttctttttttagtgttgcccttgctgtgtaataaacgctctatctagtttacctagcaaaagctcaaaactgcgctagtatggactttttggacagacttagtttttgcacataaccttgtacaatcttgcaacagaggccagccacgtaagatatatatctggactctcttgtattataggatttttcttgttctgaatatccttgacattacagctgtcaaaaacaaaaactggtatttcagatctgttttctgaaatcttttaagctaaaatcacatgcaagaattgactttgcagctactaattttgacaccttttagatctgtataaaagtgtgttgtgttgaagcagcaaaccaatgagtgctgcattttggatatttagttttatctttagttcaacaccatcatggtggattcatttataccatctaatatatgacacactgttgtagtatgtataattttgtgatctttattttccctttgtattcattttaagcatctaaataaattgctgtattgtgcttaatgt

SEQ ID NO: 13100 - DNA, 4538 bp, Homo sapiens
cggccgcggcgcgagccggagtccgccgagccggagcgcgacgaggccccgggcgcgccctccccgctgccgccaccgccgtgccgccgccatccgcccgccgccgccgccgctgtccggcccccgagcacgccggccccgcgcgcgcctcgaggccgagtcaagaaactatgttccaacttcctgtcaacaatcttggcagtttaagaaaagcccggaaaactgtgaaaaaaatacttagtgacattgggttggaatactgtaaagaacatatagaagattttaaacaatttgaacctaatgacttttatttgaaaaacactacatgggaggatgtaggactgtgggacccatcacttacgaaaaaccaggactatcggacaaaacctttctgctgcagcgcttgtccattttcctcaaaattcttctctgcctacaaaagtcatttccgcaatgtccatagtgaagactttgaaaataggattctccttaattgcccctactgtaccttcaatgcagacaaaaagactttggaaacacacattaaaatatttcatgctccgaacgccagcgcaccaagtagcagcctcagcactttcaaagataaaaacaaaaatgatggccttaaacctaagcaggctgacagtgtagagcaagctgtttattactgtaagaagtgcacttaccgagatcctctttatgaaatagttaggaagcacatttacagggaacattttcagcatgtggcagcaccttacatagcaaaggcaggagaaaaatcactcaatggggcagtccccttaggctcgaatgcccgagaagagagtagtattcactgcaagcgatgccttttcatgccaaagtcctatgaagctttggtacagcatgtcatcgaagaccatgaacgtataggctatcaggtcactgccatgattgggcacacaaatgtagtggttccccgatccaaacccttgatgctaattgctcccaaacctcaagacaagaagagcatgggactcccaccaaggatcggttcccttgcttctggaaatgtccggtctttaccatcacagcagatggtgaatcgactctcaataccaaagcctaacttaaattctacaggagtcaacatgatgtccagtgttcatctgcagcagaacaactatggagtcaaatctgtaggccagggttacagtgttggtcagtcaatgagactgggtctaggtggcaacgcaccagtttccattcctcaacaatctcagtctgtaaagcagttacttccaagtggaaacggaaggtcttatgggcttgggtcagagcagaggtcccaggcaccagcaagatactccctgcagtctgctaatgcctcttctctctcatcgggccagttaaagtctccttccctctctcagtcacaggcatccagagtgttaggtcagtccagttccaaacctgctgcagctgccacaggccctcccccaggtaacacttcctcaactcaaaagtggaaaatatgtacaatctgtaatgagctttttcctgaaaatgtctatagtgtgcacttcgaaaaagaacataaagctgagaaagtcccagcagtagccaactacattatgaaaatacacaattttactagcaaatgcctctactgtaatcgctatttacccacagatactctgctcaaccatatgttaattcatggtctgtcttgtccatattgccgttcaactttcaatgatgtggaaaagatggccgcacacatgcggatggttcacattgatgaagagatgggacctaaaacagattctactttgagttttgatttgacattgcagcagggtagtcacactaacatccatctcctggtaactacatacaatctgagggatgccccagctgaatctgttgcttaccatgcccaaaataatcctccagttcctccaaagccacagccaaaggttcaggaaaaggcagatatccctgtaaaaagttcacctcaagctgcagtgccctataaaaaagatgttgggaaaaccctttgtcctctttgcttttcaatcctaaaaggacccatatctgatgcacttgcacatcacttacgagagaggcaccaagttattcagacggttcatccagttgagaaaaagctcacctacaaatgtatccattgccttggtgtgtataccagcaacatgaccgcctcaactatcactctgcatctagttcactgcaggggcgttggaaagacccaaaatggccaggataagacaaatgcaccctctcggcttaatcagtctccaagtctggcacctgtgaagcgcacttacgagcaaatggaatttcccttactgaaaaaacgaaagttagatgatgatagtgattcacccagcttctttgaagagaagcctgaagagcctgttgttttagctttagaccccaagggtcatgaagatgattcctatgaagccaggaaaagctttctaacaaagtatttcaacaaacagccctatcccaccaggagagaaattgagaagctagcagccagtttatggttatggaagagtgacatcgcttcccattttagtaacaaaaggaagaagtgtgtccgtgattgtgaaaagtacaagcctggcgtgttgctggggtttaacatgaaagaattaaataaagtcaagcatgagatggattttgatgctgagtggctatttgaaaatcatgatgagaaggattccagagtcaatgctagtaagactgctgacaaaaagctcaaccttgggaaggaagatgacagttcctcagacagttttgaaaatttggaagaagaatccaatgaaagtggtagcccttttgaccctgtttttgaagttgaacctaaaatctctaacgataacccagaggaacatgtactgaaggtaattcctgaggatgcttcagaatctgaggagaagctagaccaaaaagaggatggttcaaaatacgaaactattcatttgactgaggaaccaaccaaactaatgcacaatgcatctgatagtgaggttgaccaagacgatgttgttgagtggaaagacggtgcttctccatctgagagtgggcctggatcccaacaagtgtcagactttgaggacaatacctgcgaaatgaaaccaggaacctggtctgacgagtcttcccaaagcgaagatgcaaggagcagtaagccagctgccaaaaaaaaggctaccatgcaaggtgacagagagcagttgaaatggaagaatagttcctatggaaaagttgaagggttttggtctaaggaccagtcacagtggaagaatgcatctgagaatgatgagcgcttatctaacccccagattgagtggcagaatagcacaattgacagtgaggatggggaacagtttgacaacatgactgatggagtagctgagcccatgcatggcagcttagccggagttaaactgagcagccaacaggcctaagtgccaggttccctggcgttggtgacatgctgcagcctggaactctgatctccagtgtgactgcaaagctgtcttctcactggtactgccttgtgagtactggttggactgtggggcatgtggccgctgcagttccagtggttatttctaagtctatgacaggacaggctgttcttgcttcagaaccttctctgacagacacggtaactaaatgtgaaaaaccaataagctggtgactcatgaatacacacgaggaaaagcagaggtttattttatctgccttttcaacatttctttccctctgtgaaatgattggtcagatgtctttgagaagtgttaaactaattcacatggtagtgtagggccaacatacaagctaccagtctaatgtgtatagtagactttgggaaaagcgattttttttcatgtattcattctgaatagttgaaatgtatatttgtacagtcttttagacctattcaagtgatgctcatgatcctgttactgtgtgcccatcatagatttctttttttagtgttgcccttgctgtgtaataaacgctctatctagtttacctagcaaaagctcaaaactgcgctagtatggactttttggacagacttagtttttgcacataaccttgtacaatcttgcaacagaggccagccacgtaagatatatatctggactctcttgtattataggatttttcttgttctgaatatccttgacattacagctgtcaaaaacaaaaactggtatttcagatctgttttctgaaatcttttaagctaaaatcacatgcaagaattgactttgcagctactaattttgacaccttttagatctgtataaaagtgtgttgtgttgaagcagcaaaccaatgagtgctgcattttggatatttagttttatctttagttcaacaccatcatggtggattcatttataccatctaatatatgacacactgttgtagtatgtataattttgtgatctttattttccctttgtattcattttaagcatctaaataaattgctgtattgtgcttaatgt

SEQ ID NO: 13101 - DNA, 9035 bp, Homo sapiens
gcgaggaggctgtggtgagagacggaccgagaccggagatgttctcaagcccggctccggcggctttacaggcggctgcagcggcgacgaagacaacgacagcgacggctacgccgaagcactcgttccgggggtgaagcctcctgcgccggccttgcctcggatccaggatgagaagactgataaaagaagaagctagctgaacagctgtaaaatgcccaaatctgggttcacaaaaccaattcagagtgaaaattctgacagtgacagcaatatggtagagaaaccatatggaagaaagagtaaagacaagattgcatcctacagcaaaactccaaaaattgaacgaagtgatgtgagcaaggagatgaaagagaaatcatccatgaaacgtaaacttccttttactattagcccatcaagaaatgaagaacgagattcagacacagattcagatccaggacatacaagtgaaaattggggggagagacttatatcttcttacaggacatactcagagaaagaaggtccagaaaagaagaagacaaaaaaggaagctggaaataagaaatccacaccagttagcattctttttggttatccactctctgagcgaaaacagatggcacttcttatgcagatgacagcaagagacaacagtccagattccacaccaaatcatccatcacaaacaacgcctgcccaaaagaaaactcccagttctacatctcgacagaaagataaagttaataaaagaaatgaacgtggtgaaactcctttacacatggctgctattcgaggagatgtgaaacaagttaaagaattaataagtttaggggcaaatgtgaatgtgaaagattttgcaggttggacaccactgcatgaagcttgcaatgttggatattacgatgttgctaagatacttatagcagctggagcagatgttaacacacaaggattagatgatgacactccactccatgattctgctagtagtgggcacagagatatagtaaagctgttacttcgtcacggtggaaatccatttcaagctaataaacatggggagcgtccagtggatgtagcagaaacagaggagttggagttgctactaaaaagagaggtgcctttatctgatgatgatgaaagttacacagattccgaagaggctcaatctgtaaatccttctagtgttgatgaaaatattgactctgaaacagagaaagactctctcatctgtgaaagtaaacagatacttcccagtaaaacacctcttccatctgcccttgatgagtatgagttcaaagatgatgatgatgaagaaattaataagatgattgatgataggcatattcttaggaaagaacaacgaaaagaaaatgaacctgaagcagaaaaaactcatttatttgcaaaacaggagaaagccttctatcctaaatcatttaaaagtaaaaaacaaaagccatctagggtcttatattcaagtactgaaagttctgatgaagaagctcttcagaataaaaagatttctacttcatgttccgtcatccctgaaacatcaaattctgatatgcaaaccaaaaaggaatatgtagtttcaggtgaacacaaacagaaaggcaaagttaaaagaaaattgaaaaatcagaataaaaataaagagaaccaagagctaaagcaagaaaaggaaggaaaagaaaatacaagaataacaaacttgacagtaaatactggactagattgttcagaaaagaccagagaggaggggaactttaggaaatcttttagcccaaaagatgatacttcattacatttatttcatatttccactggtaaatctcccaaacattcttgtggattaagtgaaaaacagtcaacaccactaaaacaagaacatactaaaacatgtttatcaccaggaagttctgaaatgtcattacagcctgatcttgttcggtatgataatacagaatctgaattcttgccagaaagttcaagtgtaaaatcttgtaagcataaggaaaaaagcaaacatcagaaagatttccacttagaatttggtgaaaaatcaaatgccaaaataaaggatgaagatcatagtccaacatttgaaaattcagattgcacactgaaaaaaatggataaagaaggtaaaacattaaaaaaacataaattgaagcataaagagagggaaaaagaaaagcataaaaaagaaattgaaggtgaaaaggaaaaatacaaaactaaggatagtgccaaagaactgcagaggagtgtggaatttgatagagaattttggaaagagaatttttttaaaagtgatgaaactgaagatctctttttaaatatggaacatgaatccttaacattagaaaaaaaatcaaaattggaaaaaaacatcaaagatgataaatcaaccaaggaaaagcatgtgtcaaaagagaggaactttaaagaggaacgagacaagattaaaaaggaaagcgagaaatcttttagggaggaaaaaataaaagatctaaaagaagagagagaaaacatacccacagataaagactcagaatttacttctttgggtatgagtgccattgaggaatctatagggcttcatttagtggaaaaggaaatagacattgaaaaacaagaaaagcatataaaggaaagtaaagaaaaacctgagaagcgatctcaaattaaagaaaaggacattgagaagatggaaagaaaaacctttgaaaaagaaaagaagataaaacatgagcataagtcagaaaaagacaaattagatcttagtgaatgtgttgataaaataaaagaaaaggacaagctatattcgcatcacacagaaaaatgccataaagaaggtgagaagagcaaaaatactgctgctattaaaaaaactgacgacagagagaaaagtagagaaaagatggataggaaacatgacaaagaaaagcctgaaaaagagaggcatctagcagaaagcaaagaaaagcacttgatggagaaaaaaaataaacaatcagataatagtgaatacagtaaatcagaaaaaggcaaaaataaagaaaaagacagggagctagataaaaaggaaaaatctagagataaagaaagtataaatataactaactccaaacacatacaggaagaaaaaaaatcaagtatagtagacggtaataaagcacaacatgaaaaacccttatcccttaaagaaaaaacaaaagatgaacctttgaaaactccagatggaaaagaaaaagataaaaaagataaagatatagatagatacaaagaacgagacaaacataaagataaaattcaaataaatagcttactcaaactaaaatctgaagcagataagcctaaacctaagtcatcaccagcatcaaaagatacccgacctaaagaaaagaggttagtgaatgatgatttaatgcagacaagttttgaacgaatgctaagccttaaagacctagaaatagaacagtggcacaaaaaacataaggaaaaaattaagcaaaaagaaaaggaacggttgagaaaccgaaactgtttagaacttaaaataaaagataaagaaaaaacaaagcatacaccaactgaatccaaaaataaagaacttactaggtcaaagagttcagaagtgactgatgcatataccaaggagaaacaacctaaagatgctgtaagtaacagatcacaatctgttgacaccaaaaatgtaatgactttagggaagtcatcttttgtttcagataatagcttaaacaggtctcctagatcagaaaatgaaaagccgggtctcagctccagatctgtatccatgatttctgttgctagttcagaagattcctgccatactacagtgacaaccccaaggcctccagttgagtatgactctgactttatgttagagagttcagaatcccaaatgtccttttcccagtcaccttttttgtcaattgccaaatctcctgctcttcatgaaagggaattggacagcctggctgacttgccggagcggattaaaccaccatatgcaaacagactttcaacatcccatcttaggtcatcttctgtagaagatgttaaactaattataagcgaggggagacctaccatagaagttcgaagatgtagcatgccttctgtcatttgtgaacataccaaacaattccaaacaatatcagaagagagcaatcaaggtagcttattaactgtgccaggagatactagtccttctcccaaacctgaggtattctcaaatgtgcctgaaagagacctttcaaatgtatctaacatacattccagttttgcaacttctccaactggagcttcaaacagcaagtatgtttcagctgatagaaatctcatcaagaatactgccccagtgaacactgtaatggacagtccagtgcatttagagccatctagtcaggttggtgtgatccagaataaatcatgggagatgcctgttgatagactagagacattaagcaccagagactttatctgcccaaattctaacatacctgatcaagaatcctctcttcagagtttttgtaattctgaaaataaggtattgaaagaaaatgctgattttttatccctgcgccagactgaactgccaggaaactcttgtgctcaggatccggcatcctttatgcctccacagcagccttgctctttccccagccaatcactttcagatgctgaatcgatttctaaacatatgtctttgtcatatgttgctaatcaagagccaggtattttacaacaaaaaaatgcagttcagattattagttctgctttagatactgataatgaatctacaaaagatacagaaaatacttttgtcctaggagatgttcaaaaaacagatgcctttgtcccagtgtactctgacagcactattcaagaagcatcaccaaactttgagaaagcttatactttacctgtgttaccatcagaaaaggactttaatggaagtgatgcctctacccagctaaatacacattatgcatttagcaaactaacttacaagtcttccagtggccatgaagttgagaatagcacaactgatactcaggtcatttcacatgaaaaagaaaacaaactggagagtttggttttaactcatttgagtaggtgtgattctgatttatgtgaaatgaatgcagggatgccaaaaggaaacctaaatgaacaagatccaaaacattgtcctgaaagtgaaaagtgtttgctttccatagaagatgaggaatctcaacaaagcattttatcaagtctggaaaaccattcacagcagtcaactcaaccagaaatgcataaatatggtcagttagttaaagtagaattagaagaaaatgccgaagatgataaaactgaaaaccaaatccctcaaagaatgactagaaacaaagcaaatacaatggcaaatcaaagcaaacagattcttgctagctgtacactattatcagaaaaagacagtgaatcctcatctcctagaggaagaataagattaactgaagatgacgatcctcaaattcaccatccacggaaaaggaaagtgtcacgtgtacctcagcctgtgcaagtgagtccctctttactacaagcaaaagagaaaactcagcaatctctggcagccattgtagattctctaaaactagatgagattcagccatacagttcagagagagcaaatccatattttgaatacttgcacataaggaaaaaaatagaagaaaaacgcaaattactgtgtagtgtgattcctcaagcacctcagtactatgacgaatatgtaacatttaacggatcatatctcctggatggaaaccccttaagcaagatttgtattcccacaattacaccaccaccttcactgtcagatccacttaaagagctttttcgacaacaggaagttgtaaggatgaaactacgtttgcaacacagtattgaaagggaaaaactcattgtatccaacgaacaagaagttttgcgagttcattacagagctgcaagaacattggcaaatcaaacactgccatttagtgcttgtactgttttgctggatgccgaagtatacaatgtaccattggactctcagtctgatgacagtaaaacttctgtgagggatcgctttaatgcaagacaattcatgtcttggttacaagatgtggatgataaatttgacaaattaaagacctgtcttttaatgaggcaacaacatgaagctgcggctttaaatgctgtccagaggttagaatggcagctcaaactccaggaacttgatcctgccacctataaatctatcagcatttacgaaatccaggagttttatgttccccttgttgatgttaacgacgactttgaattgactcctatatagcagtcagtacttcctgatggtattgtcctaaactggtgatgctcaagcattatactgtggaatactgccttttgacaaaaatactcatgcctttacaattgttagtaaagttcgattatagttggttatgtagtaaacactgtcattttataaaaaatgagaattattttggatcttagatccaaacacagtttctaatagaaaactattatttatattgggaaaggtaactattgcattagagcatgttggcagactggtaggtatttaaaaagttgagaatctgctaacagcgctggaagttgttagcgctctaagtaataagataaccactagtattcaaatctctttcaggttttattaaaaaatatatatcaataaactaaaaggttcaattcctaccaaatagtttctaatgtgggagaaaaacttggcacaaaatttcttcagtttattatctgtaaattgtacagttttctttttgaaagttttaatattgtcttcctttttaataacttattttatacatattgtgcagatgtaaatcttgtaattaatggtcaaactgtataaagggattggtagtcaaaacatgtacaaagaaatacctgtaaaactgttttgtctcatgttttattggaccaaagttgtggtttgtatggagtgtagtagtagtgtgtacaggtagaaaacttttaaatacagcatgcaggtgtttcagttagcttgttttcatcaccataactgcaaagatgtggcttagttgtattgcatgcttcctataatttaactctccataattgatgcctgcagtagtgtaaggcatttcatactagtctcctctagtagacctgtgacttactgtgttggacatattatttagacttagtcatacaaagaaacttagctcttttttcatctcacagtaaagcctatttccccaggaaaaaaataaatgcctttgaatgaaaattctgaaattgtaaatgtctattttaatattcacctatgaaagaatctgtgaatatatgtaaatacgtttaataaattttattggtcatgttaaatcattgtaaaacttttttacattgcttaatgttttaagcttaatagcctttgcacttttaaaataaaaaccaagtatgcaaatcaaagatatttggtagtcaaaataagtaaaagaaatataggaatattccagtcaatctctgaaatgtttatgaaaaacaggttaatatgttgtatttttttccttgtatcaagatgcaaaacataatttgcaaaattttataattgaaataaaacttggtatgctgttttataataaattagcaatatactttaaaaaaaatccagtttctcctataacatgatgtaaattaaatattcaggaatatttcaggtctgaaatctgctgctgaacttgttagacatttttgaaaggaaaattaggttagcgtacaatttatcataaatatatgaggtaaaatttgcaaaactttccacagtactttcttgaattataatactgaatgttttctgttccgatagagaaaagtgaagcaaatatgtgaggaatgaagtgatctagtgcaagttggtaattccagctaatgggagagaatgtaaatgtgcaaaggtacatattaagcttagggatttttgaatttttacgtcagtttatattttaattcttactgtacttggcatgcgcaataaagcagcacatgtaaaaaaaaatacacagtgcaaggactttattataaaggttggatgtagttttccttagaaatttaggtgagagattttggccttttttattggataaattgggccagaaaggcagggtagatttcgaagcactggttctgttgaagttaagtttattaagcctgggaacattaaaagctaatttataaaagcaatactttttaatatgaaaacttactgcaaagtttgtttatacttttgcctaaaaaggaaattggatgggatactgtggcaaatcataaaaaaccagataattgaactttgaagttatagaaaatcagagaggggtaagtttatagggcattttgttctgatggttcaaccagaggtctgggaaatagcactgttggcccaaacagaacaggcttttagaagataaaagcgacaagaaggaatctggtgaattttagtcatcccagctttttagtcttaaccacagttctcactctcttaaatggtacctcaaaaagctggagcctctctgccatgattatgcttctacaaatttcttttataaagagactcaaagctaatgatagcttaaaagaaaagttaatgccttctcattggaaatgtataatcaaataagtagttaagggcttttggtattaaagatattctgaagctctgaaatgctagaaaaaaatttggaatggagtatatgcctgaaaaggttttggattcagaaagaaaaaggatggttagtttaatcagtgattctttttaaactcttcaaatatcatgaacaagatactaaattgtacctaaggatttgtatttctttacaatttgttctaaatatctgtttaatgactagttgatatttgtgcatgttatttaataaagagttatatttttatag

SEQ ID NO: 13102 - DNA, 3842 bp, Homo sapiens
tggtgctctccgccccgcttgcctcccgttcttccccgcccgctccatccgggtcgctgacggctgtctctggactggacagcagtggcgtccgcttttctctaaggaacccgataagaactccattttctgttgatgtggagacatagggtacctccaactttccggggtttcagaagagaattttttattgaaactggaagaccaaaataattacaagcatgttgtgctggggaaatgcatcctttgggcagctaggtttgggtggaattgatgaagaaattgtactagagcccagaaaaagtgacttctttataaataaaagggtccgagatgtaggatgtggactcagacatactgtgtttgttctggatgatggaacagtgtacacatgtggatgtaatgatctaggacagctaggtcatgaaaaatccagaaagaaaccagagcaggttgttgccctggatgcccaaaatattgtagctgtttcatgtggagaagctcatacgttagcgctaaatgacaaaggccaggtgtatgcttggggtctcgattctgatggacagcttggcctggtaggatcagaggaatgcatcagagtacccagaaatattaaaagtttgtcagatatccagattgtacaggttgcttgtggttactatcattcacttgcactttctaaagcaagtgaagtcttctgttggggacagaataaatatggccaattgggtttaggtactgactgtaaaaagcaaacttcaccgcagctgcttaagtctttgcttggaatccctttcatgcaagttgcagcaggaggagcccatagttttgtactcaccctttctggagctatctttggatggggacgcaacaagtttggtcagctaggtcttaatgatgaaaatgataggtatgttcctaatttactaaagtcactaagatctcagaaaatagtttatatttgttgtggagaagatcatactgctgctctaaccaaggaaggtggagtgtttacttttggagctggagggtatggtcagttgggccataattctaccagtcatgaaataaacccaaggaaagtttttgaacttatgggaagcattgtcactgagattgcttgtggacggcagcacacttctgcttttgttccttcatcaggacgaatttactcttttgggcttggtggtaatgggcagctgggaaccggttcaacaagcaacaggaaaagcccctttactgtaaaaggaaattggtacccctataatgggcagtgtctaccagatattgattctgaagaatatttctgtgtaaaaagaattttctcagggggagatcaaagcttttcacattactctagtccccagaactgtgggccaccagatgacttcagatgtcccaatccgacaaagcagatctggacagtgaatgaagctctaattcagaaatggctgagctatccttctggaaggtttcctgtggagatagccaatgagatagatggaacgttttcttcctctggttgcctaaatggaagttttttagctgttagcaatgatgatcactatagaacaggtaccagattttcaggggttgatatgaatgctgctaggcttttattccacaaacttatacaacctgatcatccgcagatatctcagcaggtggcagctagtttggaaaagaatcttattcctaaactgactagctccttacctgatgttgaagcattgaggttttatcttactctaccagaatgtcccctgatgagtgattccaacaatttcacaacaatagcaattccctttggtacagctcttgtgaacctagaaaaggcaccactgaaagtacttgaaaactggtggtcagtacttgaacctccactattcctcaagatagtagaactttttaaggaagttgtggtacatcttttgaaactctacaagatcggtattcccccttctgaaagaagaattttcaacagttttcttcatactgcattaaaggttttagaaatactacatagggtaaatgagaaaatgggacagattatacagtatgataaattttatatacatgaagtacaagaattgatagacataagaaatgattatatcaactgggtccaacagcaggcctatggaatgttggcagatatccctgttacaatctgtacatatccatttgtatttgatgcccaagcaaaaactactctgttacagaccgatgcagtcttacagatgcagatggctattgatcaggcccacaggcagaatgtctcctctctttttctcccagtgattgaatctgtgaatccctgcttaattctagtggtgcgtagagaaaatattgtaggagatgcaatggaagtccttaggaaaacaaagaacatagattacaagaagccactcaaggttatatttgttggagaagatgctgtggatgcaggaggggtgcgcaaagaatttttcttgctcatcatgagggaattattggatcctaaatacggcatgtttaggtattatgaagattccaggctcatttggttttctgataagacatttgaagacagtgatttgttccatttgattggtgttatctgtggcttagcaatttataattgtaccattgtggacctccattttcctttggctttatataagaaactactgaaaaagaagccatccttggatgatttgaaagaactaatgcctgatgttgggagaagcatgcaacagttactggattatccagaagatgacatagaggaaacattttgtcttaattttacgatcacagttgaaaactttggtgcaacagaagtgaaagagctggttctaaatggtgcagacacagctgttaacaaacaaaatcggcaagagtttgtcgatgcttatgtggattacatattcaataaatcagtggcttccttatttgatgcttttcatgcgggctttcataaggtctgtggaggaaaagtccttctgctctttcagcctaatgaactacaagcaatggtcattggaaatacaaattatgattggaaggaactggaaaagaatacagaatacaaaggggaatattgggcagaacatcctacgataaaaattttttgggaagtatttcacgaattaccattggaaaagaagaaacagtttctgttatttttgacaggtagtgatcgcattcctattcttggtatgaagagtctgaaactagtcatccagtccacaggaggtggtgaggagtatctcccagtttcccatacttgttttaatcttctggatcttccaaaatatacagaaaaagaaactctacgctctaaactgatccaagctattgatcacaatgaaggcttcagtttaatataactttggagttataactattcagtttagtgcaaaagcattaaactatttgtgtttttcttgtggtgatgaattcagcaaggtgacagaggtactattataattcttacttgcagaatgttcaatctacgagtgttcatggaagccaaaaaatattaaaggaaaatgaacaaactgttaatattattgtacagaaccatggattttttttgaccatcttctaataaacatagcaagtattatgaatacattaaagttttactaacatgaattttaagagtttgcatatttcagaaatgatctggtgtgagtgcatggaaatattgcttaatttttcttcaatcattgagtgaaaaacctttaactttggcctgcaatagtcatttgattattttttcattttgtaaataatgttaagttttgtaataaaatagttatgttctgaaaaaaaaaaaaaaaaaaaaaaaaaaaaaa

SEQ ID NO: 13103 - DNA, 1629 bp, Homo sapiens
atctctccttctcgaaccctgctatgcctttgcatacgctgttttctccacctgccacgttctcaccccttcttcttccactgcaaactcctatgcagccgtcaaggccccattctcctctggaaagccttcccgatccccttggcaacaaccaccaccaatatttattcactgagcccactttgtgccaagcattgttctagacacggagaggaggaagctcctgccggctgagcgggcctggaggaagtgagcagcggggctcctgcctcccggcctggtccccgaagaccccagaagaacccggaacttgcttccattcggaatccagggaccaccctttgcactcagtaggcctttgttttcctgcgtggaaagcggttgggcttgggaggcgatggagccggagttcttgtacgacctgctgcagctccccaagggggtggagcccccagcggaggaggagctctcaaaaggaggaaagaagaaatacctgccacccacttcccggaaggaccccaaatttgaagaactgcagaaggtgttgatggagtggatcaatgccactcttctccccgagcacattgtggtccgcagcctggaggaggacatgttcgacgggctcatcctacaccacctattccagaggctggcggcgctcaagctggaagcagaggacatcgccctgacagccacaagccagaagcacaagctcacagtggtgctggaggccgtgaaccggagtctgcagctggaggagtggcaggccaagtggagcgtggagagcatcttcaacaaggacctgttgtctaccctgcacctccttgtggccctggccaagcgcttccagcccgacctctccctcccaaccaacgtccaggtggaggtcatcactatcgagagcaccaaaagtggtctgaagtcagagaagttggtggaacagctcactgaatacagcacagacaaggacgagcctccaaaggacgtctttgatgaattatttaagctggctccggagaaagtgaacgcagtgaaagaggccatcgtgaactttgtcaaccagaagctggaccgcctgggcctgtctgtgcagaatctggacacccagtttgcagatggggtcatcttactcttgctgattggacaacttgaaggcttcttcctgcacttaaaggaattctacctcactcccaactctcctgcagaaatgctgcacaacgtcaccctggcgctggagctgctgaaggacgagggcctgctcagctgccctgtcagccctgaagatatcgtgaacaaggatgccaagagcacactgagggtgctctatggtctgttctgcaagcacacgcagaaggcacacagggacaggacgccccatggagccccgaattgaccctcactgcctccaaagcccagagcctgcctgtcagcccagctggagggcccgaggctgcagggtgtcctcccacagtcccgctgtttcctgtgcattcgtgacccgcttccctcccaccctgtctcctgtctccatcgttggattatctttgaacccccttgtgtggatcattttgagccgcctggccttgctcagtttattttaataaaagtatttctgggagggaaaaaaaa

SEQ ID NO: 13104 - DNA, 2635 bp, Homo sapiens
gcgctcctgctcttaggaagcctgggaaggaccggtgtgctaggagatgatcggggaaagcatagtcccctgtctgtggcaccagacactcccgactgtgcgctgactctccccgcccagccagcagccttttccagagaggctgtggtccatagcctctgttcgttttcactgcaggaccaggcacgaaagttaaaacaaaatgaagattttttctgaatctcataaaacagtgtttgttgtggatcactgcccttatatggcagaatcttgcaggcagcatgtcgggtttgatatgctggtgaagaatagaacccaaggaatcattcctttggcccccatatctaaatcattgtggccttgctcagtagaatcttccatggaatattgtagaataatgtatgatatatttcctttcaaaaagccggtgaattttattgtgagtgactctggagcacatgttttaaattcttggactcaagaagaccaaaatttacaggagctaatggcagcattagccgctgttgggcctcctaatcctcgggcagatccagagtgctgcagtattctgcatggccttgttgcagcagtggaaactctctgcaaaattactgaataccaacatgaggctcgtactctactcatggagaatgcagaacgtgttggaaatagaggacgaataatctgtattactaatgcaaaaagtgatagtcatgtgcgaatgcttgaagactgtgtccaggaaacgattcatgaacataacaagcttgctgcaaattcagatcatctcatgcagattcaaaaatgtgagttggtcttgatccacacctacccagttggtgaagacagccttgtatctgatcgttctaaaaaagagttgtccccggttttaaccagtgaagttcatagtgttcgtgcaggacggcatcttgctaccaaattgaatattttagtacagcaacattttgacttggcttcaactactattacaaatattccaatgaaggaagaacagcatgctaacacatctgccaattatgatgtggagctacttcatcacaaagatgcacatgtagatttcctgaaaagtggtgattcgcatctaggtggcggcagtcgagaaggctcgtttaaagaaacaataacattaaagtggtgtacaccaaggacaaataacattgaattacactattgtactggagcttatcggatttcacctgtagatgtaaatagtagaccttcctcctgccttactaattttcttctaaatggtcgttctgttttattggaacaaccacgaaagtcaggttctaaagtcattagtcatatgcttagtagccatggaggagagatttttttgcacgtccttagcagttctcgatccattctagaagatccaccttcaattagtgaaggatgtggaggaagagttacagactaccggattacagattttggtgaatttatgagggaaaacagattaactccttttctagaccccagatataaaatcgatggaagtcttgaggtccctttggaacgagcaaaagatcagttagaaaaacatacccgttaccggcctatgatcatttcacaaaccaccatttttaacatgcaagcggtagttccattagccagtgttattgtgaaagaatctctgacagaagaagatgtgttaaactgtcaaaaaacaatatacaacttagttgatatggaaagaaaaaatgatcctctacctatttccacagttggtacaagaggaaagggccctaaaagagatgaacaataccgtatcatgtggaatgaattagaaacccttgtcagagcccatatcaacaactcagagaaacatcaaagagtcttggaatgtctgatggcatgcaggagcaaacccccagaagaggaagaacgaaagaaacgaggaagaaagagggaagacaaagaggacaagtcagagaaagcagtgaaagattatgaacaggaaaagtcttggcaagactcagagagattaaaaggaatcttagagcgtggaaaagaagaattggctgaagctgagattataaaagattcgcctgattccccagaacctccaaacaaaaaaccccttgttgaaatggatgaaactccacaagtggaaaaatcaaaagggccagtgtcgttattatccttgtggagtaatagaatcaatactgccaattccagaaaacatcaggaatttgctggacgtttgaactctgttaataacagagctgaactatatcaacatcttaaagaggaaaatgggatggagacaacagaaaatggaaaagccagccggcagtgaagagtgacttgaagaactaaatttagcatattgcaaaaatattttgtgcggaattcgatataagtacttttacagcaggatggtatagttatgttgcctggactggtttttacatttttaaaatatttcagctgtcatttttgtactaattataaaattggcacataattcaaaaatatacatttgagatgatttgtcctcccaaattatacaagtttattttatggtataaagtgttctctctggaaatgtttttaaaaaaattcttaggcttctctttgcgaaataaaactattgaaatatttgaaatgc

SEQ ID NO: 13105 - DNA, 1973 bp, Homo sapiens
agccgccgcctcgccgcttcccctcgtcggagcggccgctcgtccgcccggcttgaggcccgcggggagcgcggcgcaattcgtcggcccgcgggggggcggcctcccggcatcttcgcggcgaccaaggactaccaggaaggggagcggctgggatggcgcgtccgcggccccgcgagtacaaagcgggcgacctggtcttcgccaagatgaagggctacccgcactggccggcccggattgatgaactcccagagggcgctgtgaagcctccagcaaacaagtatcctatcttcttttttggcacccatgaaactgcatttctaggtcccaaagacctttttccatataaggagtacaaagacaagtttggaaagtcaaacaaacggaaaggatttaacgaaggattgtgggaaatagaaaataacccaggagtaaagtttactggctaccaggcaattcagcaacagagctcttcagaaactgagggagaaggtggaaatactgcagatgcaagcagtgaggaagaaggtgatagagtagaagaagatggaaaaggcaaaagaaagaatgaaaaagcaggctcaaaacggaaaaagtcatatacttcaaagaaatcctctaaacagtcccggaaatctccaggagatgaagatgacaaagactgcaaagaagaggaaaacaaaagcagctctgagggtggagatgcgggcaacgacacaagaaacacaacttcagacttgcagaaaaccagtgaagggacctaactaccataatgaatgctgcatattaagagaaaccacaagaaggttatatgtttggttgtctaatattcttggatttgatatgaaccaacacatagtccttgttgtcattgacagaaccccagtttgtatgtacattattcatattcctctctgttgtgtttcggggggaaaagacattttagccttttttaaaagttactgatttaatttcatgttatttggttgcatgaagttgcccttaaccactaaggattatcaagatttttgcgcagacttatacatgtctaggatccttttatcaaggcagttatgatcatcgttttcctgccttgaccccaccatcatcaaacactcagttaaatataaattaacattttttagatgaccactcaacataatgcttaagaatggaatttcctctctgtgacagaacccaggaattaattcctaaatacataacgttggtatattgaagacgaaattaaaattgtccttcagttttgaggccatgtgtaaagtttaaccatattgtaaaatatctattccgtattagaaatagctagttgacagcttatacttctcaaaattcatattgttatgtacacaaactaagtttctatatgtgaagttagtgagtctttttgtgttactccaaaataaaggcaatgatttatttttttcccagtgccaatacaattttgagctaagcactcaaggtggatactttacattttaaagctggaatcagcaacagccctatgggaaaccagacaaagcattgacttttaaatgtagacttttaaaataaactgttttcttttggaactacaattagaatagttaatattcatccttaaaccattattatgtgtacattattgttgctattgtgataatagagaattttatttatttttatgccagcttatattgtgagaacacatttagtcagtttgggttttatcaatcctgttaatgcttgtccttggaacatctttcgcgtattcacggtttgtagttgaaaagtttactgtaaaaaaatcaaaaacaaaaaaatgtattgtttttacagaataaatttattgggatgtgtactgggagtaagatttgaggttgtaagcaaactaagttagtgtaatttggcttcatatatgtaacgtgaggtattaatgtaattcatatattaaagcaaaaattgttcgcagc

SEQ ID NO: 13106 - DNA, 2472 bp, Homo sapiens
ctttttacagctagacctgtgtgctgcaaggagctaaggccttcagtgtccccttccttacccaggtttctcacagaatggattcccagcgggaacttgcagaggaactgcggctttaccaatccacccttcttcaggatggtctaaaagatctcctggatgagaaaaaattcatcgattgcaccctaaaagcaggtgacaaaagtcttccttgccacagattgattttgtcagcttgtagtccttacttccgtgagtactttttatctgaaattgatgaggcgaaaaaaaaggaggtagtgctagacaatgtggatcctgctatacttgatttaatcatcaaatacctgtactctgccagtattgatctcaatgacggaaatgtgcaagatatttttgcattggccagccgctttcagatcccctcagtgtttactgtctgcgtttcttatcttcagaaaagacttgctcctggtaactgtctagccatcctaagattaggacttcttcttgactgcccgagactcgccatttctgcccgtgaatttgtgtctgatcgctttgtacagatttgtaaggaagaggactttatgcaactgtctccacaggaactgatctcagtcatttcaaatgacagcctaaatgtagaaaaagaagaagcagtatttgaggcagtgatgaaatgggtgcgaacagacaaggaaaacagggttaaaaaccttagtgaagtgtttgattgtatccgttttcgccttatgacagaaaaatattttaaggatcatgttgagaaagatgatataattaaaagcaacccagacctccagaaaaaaatcaaagttctaaaagatgctttcgcaggcaaactcccagaacctagcaaaaatgccgcgaagactggggctggtgaggtgaatggtgatgttggtgatgaagatttacttcctggttacctgaatgacattcccaggcatggaatgtttgtaaaagacctcatcctcttggttaatgacacagcagcagtggcttatgaccccacggaaaatgaatgctaccttactgcactggctgagcagattcccagaaatcattccagcattgttacccagcaaaatcagatatatgtggtaggaggactatatgtggatgaagaaaataaggatcaacctctacagtcatacttcttccagctcgatagcatagcatctgaatgggttggacttccacctctgccttcagccaggtgtctcttcggtctgggagaggtggatgataaaatctatgtagttgcaggcaaagaccttcaaacagaggcttcgctggattcagtattatgctatgatcctgtggctgcaaaatggaacgaagtaaaaaaactccctatcaaagtctatggccataatgtgatttcacataaagggatgatatattgtctaggaggaaagacagatgacaaaaaatgtacaaacagggtgtttatcttcaaccccaaaaaaggagattggaaagatctggctccaatgaaaattcctcgttccatgtttggagtagcagtccataaaggcaaaattgtgattgcaggaggtgtcactgaagatggtctttcagcttcagttgaagcttttgaccttacaacaaataaatgggatgtaatgaccgaatttccccaagaaagaagctccatcagtttggtcagcctggctggatctctgtatgcaattggtggttttgctatgattcaactggagtctaaagaatttgcacccactgaagtcaatgacatatggaagtatgaagatgataaaaaagaatgggctgggatgttgaaggaaatacgttatgcttcaggagctagttgcctagcaacacgtttaaatctcttcaaactgtctaaactgtgaacaaggtgacaaaacataatagattgggaggtggtttgtttggtgaatggggctttaatttattctgttttttaaaagcttgtacagacactcatgtagaaattattcaagaagttattgtctaagagatgagcagtaggtaagaaaacctcagtcattgactcttcaatgtaatgatcagagtttaaaaccattttctaataataaattaaatcttcagttgaacaaattattttgtgaatctgtttcactcaatggattgtaaagaaggctcctaaatttgagttgtttgctaatcatttcatttgcatcattagggtatccttaaactgattttctattacaattggaagtggagaatatgtgcatctacactaaaaaaatgtttaagatatcaaaaacctctcctcgtgcttcaaaatgacaggaatcctgtgcattatactaagaattacatgccataagatgacttcagaaatcctacttcagaagtgtaataaatggatggggaaatcgtttgatggggaaaagtctcttgtaagtaaaagtagtcaaattcaaatggcaaaaaaaa

SEQ ID NO: 13107 - DNA, 4503 bp, Homo sapiens
atggtggcggtgggggaggaaggcggttcttgtaatgatccgagaggagaccgcagcaccggttacgccctcgaacctcggcctcctcatctgcagaatggacgcagtccacaccgcgtgctgtggaagggttggagcgccggtttacatgacacagggctatcggctaagggggcgctgggaacgtggaaggccggccacgtgacgcccgcggcccggcggggctgccaggcggcgagcgccgcggcggccccgggaggtggcggcgggcgcgagagcctgggccgcgcgggactgaccgtcggggccccgggacggcggccccggggcgcccatgccatggagaagctggcggccgggctggccggcctgcgctggagcatgggcgccttcccgctcgacctcatcgtcagccgctgccgcctgcccacgctcgcctgccttgggccaggggagtacgccgagggcgtcagtgagcgagacatcctgctcatccactcctgccggcagtggacaacggtgacagctcataccctggaggagggccactatgtcatcgggcccaagatcgacatccccctgcagtacccagggaagttcaagctcctggaacaggcccgggatgtgcgggagccagtgaggtacttcagcagcgtggaggaggtggccagtgtcttccctgaccgcatcttcgtgatggaagccatcaccttcagcgtcaaggtggtgtcgggcgagttcagcgaggacagcgaggtgtacaacttcacgctgcatgcgggcgacgagctcactcttatgggccaggcggagatcctgtgcgccaagaccaccaaggagcgctcgcgcttcaccaccctcctgcgaaagctgggccgggccggggcgctggccggggtgggcggcggcggcccagcgagcgcgggggccgcgggaggcactggcggcgggggcgccaggccggtcaaaggcaagatgccctgcctcatctgcatgaaccaccgcaccaacgaaagcctgagcctgccctttcagtgccagggccgcttcagcactcgcagcccgctggagctgcagatgcaagagggcgagcacacggtgcgcgccatcatcgagcgcgtgaggctgccggtgaacgtgctggtgcccagccggccgccgcgcaacccctacgacctgcacccggtgcgggagggtcattgctacaagctggttagcatcatctccaagacggtggtgctggggctggcgctgcgccgcgagggcccggcgccgctgcacttcctgctgctcacggacacgccgcgcttcgcgctgccgcagggcctgctggccggggacccgcgcgtcgagcgcctggtgcgcgacagcgcctcctactgccgcgagcgcttcgaccccgacgagtactccacggccgtgcgcgaggcgccagcggagctcgccgaagactgcgccagcccgcgccgcgcgcgcctctgcctgcccgcgccgcgcgcccccgggctcgcccgcgcccccggcccgctagcgccggctcccgccggcgagggcgaccaggagtacgtgagccccgactgggcagccgcgcccgagcccgccgcgccgcccgccgagatcccctacgaggagttgtgggcgcaccaggggcccgagggcctcgtccggccgcccccagggctcgatctcatctccttcggggccgcgggaccgccgcgtcgggagccggaagcgccgccgcctccagtccctcccaaatccgaggcggtgaaggaggagtgccgcctgctcaatgcccctccagtgcctccccggggtggcaatggcagcggccggctctccagcagccccccggttccccctcgcttccccaagctgcagccggtacattcccccagctccagcctctcctactactcctctggcctccaggatggggcgggttcccgcagtggcagtggctccccatcgccggacacctactccctctattgctacccatgcacctggggagactgcaaggtgggcgagtcctctagccgcccagcccccggtcccctaccctcaaccacacagcccagccaggcctcccgggccctcacagagcctctgagcggtcgagccgcctcccttctgggggctgacacccctgttaagacctaccacagctgccctcctctattcaagccctcacatccccagaagcgctttgctccgtttggagctctcaaccctttttccgggcctgcctacccctcaggcccttcagcggccttgtcttctgggcccagaaccacctcgggtcctgtggctacctctggccctgcgtattccccaggcccagcctcgccaggccaggcctattcagctgctcccccctcctcctgcgccccctcctcctcctcttcttctgaatggcaggaaccagtcctggagcccttcgatccctttgagctggggcagggcagttctccagagcctgagctgctgcgttctcaggagcccagagcagtggggacacctgggcctggaccccgcctttcaccacttggcccctccaaggcctttgagcctgaaggtttggtgctgcaccaggtccccaccccactgtcaccagctgctctgcagggacccgaggcgggaggagcactttttctaacccaagggcgcctggaagggcctcctgccagtccccgggatggagccacaggctttggagtccgagatgcctcctcctggcagccccctgctgacctgtctgcactctccctggaggaggtctctcgcagtctgcgtttcatcgggctctcagaggatgtggtgagcttctttgcccgagaacgcatcgatggtagcatctttgtgcagctcagtgaggacatcctggcagatgacttccacctcaccaagctgcaggtcaagaagatcatgcagttcatcaaaggctggaggcccaagatctgaactgcccagctggagctgcacagctggaatgctggtatgggggccccaggtacagcactccggaggagcaggtgctgcctgcaagaaggatctatgtcgagactgaggctgctcagcagccactgggtggatccaggggagatgcatgtggaaatgtggtcctctggggtcagacccctgcacgggacatcttgcctttgagtgtgcagagtacatggggaaggggctgggggcaccactgtgtacctgggcccagtaaggcatttgccgtgattcccacaacggggtcaaaagctggccttcagggtgacctaacaccacctcatgccctgctatagaccttcacaaacgacttccactgctgaagcctgtaggctctgtttagagacaagaagatggctggtaatttaagcaccgatttcccaagtgcccactctcctttgtgctctgttggcttttggcctaaagctgccccagagtgagggtgtagatgtctgtgtctgtgagatgcctttcccttccccctctgctccaccgtggttgaggggggtggggcctggccccgcacacaggtgagtcgtgtacaagcctaacccatggcacctcagaggctccacctgtgggtcctggttcatgggtgacaactttggaagagcacagctctgcaattgacccgacccacttatctagttaggaagccagacactgcccagatgactctagcaccctggcttctgctctgactttactgcagctagtcatccatccgtcaggtggcgttcagtctcagaatactgattccgtggaagagcaggttgatttaggtcagcttctccttgattctagaagcaagcggtagtcaaccacctccaattccgccaatctcttgcccccatcatttgtctctgacaatacttggtgtttttccctggttttctgtcactggcacaggagggtacagttgggagagtgcgttcctggagctcagtcctgcatttgttcacgtgcctcacagcaggcctttgtgcccttgaatctcaaacatggggatctgcttggtacccagagctctggtcattgtgtccaaccacacaccccaccccatccgtgtcctccatctcacccagaaccacagggtgcccactagtgtcagggcccaaagtgccagccttctcttctgccttacctagtctacctatttatttcctccactttttatcttaaaagtagctaagccatgctggtgcccatactccaagcaggctgcctcagctcagagaagtggtcagagagtagagcacagaacctgtgatgtggggacatttggttttcttgcagatcatttaatgaatcctcaaggactaatgaaataaatgctagactgctgaagatgagtacaagtggcattctgggtgccagctgctttcttcttttgaaaacaaggccatggggacccatgggcacagtgtatatgccttctggcaggagaggactgatggaggaatgatgtgggtgtgtggccattcccatgtctgtgga

SEQ ID NO: 13108 - DNA, 4072 bp, Homo sapiens
catggccgccgctatcaccgacatggccgacctggaggagctctcccgcctgagccctctgccccccggcagcccgggttcggcggcgcggggccgggctgagccccccgaggaggaggaggaagaggaggaggaggaagaggaggcggaggccgaggcggtggcggcgctgctgctgaacggcggcagcggtgggggcggcggaggcggcggcggaggagtggggggcggcgaggcagagacgatgtcggagccgagccccgagagcgccagccaggccggggaggacgaagacgaggaggaggacgacgaggaggaggaagatgagagcagcagcagcggcgggggtgaggaggagagtagcgccgagagcctggtgggcagcagcggcgggagcagcagcgacgagacccgctcgttgagccccggcgccgccagcagcagcagcggggatggggacggcaaggagggcctggaggagcccaagggaccgcggggcagccagggcggcggcgggggcggcagcagtagcagcagcgtagtctccagcggcggcgacgagggctacgggactgggggaggcggaagcagcgcgacctccgggggccggcggggcagcttggagatgtcgtcggatggggaacccctgagccgcatggactcggaggacagcataagcagtactataatggatgtagacagcacaatttccagtgggcgttcaactccagcaatgatgaatggacaaggaagcactacttcttcaagcaaaaatattgcctataattgttgttgggaccagtgccaggcttgcttcaactctagcccagatctggcagatcacatccgttccatacatgtagatggtcagcgaggaggggtatttgtttgcttatggaaaggttgtaaagtatataacactccatctaccagtcaaagttggttacaaaggcatatgctgacacacagtggagacaaacctttcaagtgtgttgttggtggctgcaatgccagctttgcttctcagggagggctagctcgtcatgtacccacacacttcagtcagcagaactcctcaaaagtttctagccagccaaaggccaaagaagaatctccttctaaagctggaatgaacaaaaggaggaaattaaagaacaaaagacgacgctcattaccacggccacatgatttcttcgatgcacaaacactggatgcgataagacatcgagccatatgctttaacctctcagctcatatagaaagtttagggaagggacacagtgttgtttttcatagtactgtaatagctaagagaaaagaagattctgggaagatcaaacttttgcttcattggatgcctgaagacattctgcctgatgtgtgggtgaatgaaagtgaacgacatcagttaaaaactaaagtagttcatttatcaaagctacccaaagatactgccttgcttttggacccaaacatatacagaacaatgccgcagaagaggttgaagaggtaaaaaataaataaatacataaaaagcaaacaagcggggacacctgcagtcttagtcactgacaatgggtttagggaaagttgcacattagagtcaaccccttcttttttttttttttttttttaaatccagtatttaggataatatttatgcttagtgtaaacattctgtgaatgaagtagactcttcggtggaatatattaatatattactgtatatccacattttcatggaatggtactgtgggagactgagcaaacactcttttggcaacttagtagaacagcttcttaaaggctttgcatgcttgctgctttaagctgcttttttttttcttttcttccctttagtgatttcagtagtttatattggaaagaaaaacaattacaacatgtgcccttacaaataccaaaagcactgtaaggatatttgtcttgacagtgtttattgatttgaagtcatattaggaaatatttagacaatgaaaattatcaagagataatttacctttcaattatgataaatagatgtgattggttgccatttgtgttcttttgcagaactctgataagaaaagtgttcaatttgtatttaagcaaacagtgaacgacgtttgcaatcaactaaaaattcgtctatcgaattagggctgaaaattactgttaaagagtgttgcagtatgtctggtggctcccttttcaggactagggctttctcatggagtacagtatgttaatatttacctatataactaatctgttaacggtttttgaaaaacctttcaaattatttgaataatcttcatattttcatttaacctatatgactctaattttttttctgaggaaatcatttggtttttgagttgttttttcttaatgtaagaaaaattgtattttttttacaagtatcttcaaactgaatcttttatgcaccaaagttggtcttgaaaaggaaaataaaatcactttcttgcttggtaagcaagaagccatatcgattttttttaacttacagaaatggaaatatgtgtaacttgttagtattgtattaaacaaatgttgcatagagataatagaacattgcttgtaaataattcagcagatttgtaatatatttttatattttgaaatgtactgtagatgttttctagaggcatgaaagttaaatgtatatattatggtagaaataatattgaaggatattgtacttcactagtgctgccagaggaattgttaataaaagcaccttctttaacaataaatgtctttcacagacttaagggactatgtactactgttaatatctctaagaacaaaacacattgaacatccttccagaaagtctttgagggaggacctatacccataatagaattatggcactcatttctgacagtgatcaagaaatcagttatttccttactgttggaaggacattgtaaagtatgtggttatatgcagtgaaactgcagaaaatactcctggttgaggagttttcactttactacagtgatataaaaaccagcagtttttacactaaattttttaaagaaatattagacaaaaatatagaattaaaacctttggttccaaaatgggaaaggttccacgatacataaatcatttctcatttgctttaaaaaatttaaaagtgtaaaaattatgagagactttattcgttaacaatgggggtaaagagctatatacatgaaaatgagtcttataaaattaagtgaagtgcaaataaaagcactgctactataagacattctggaatggttgtttaataagggtattatccatttgatctatagcaatgtgattttatttttaaaaagaaaagcagtgtgttttctttttttgttgttttcttttgcttaagcacttcatcaattgctttattctgtatctgcgaagtaatctgcaatctcttttgttctttttaaaatttgatttgttataaaattgccaaatagaagtgtttcagatacatagtttgtacctgtatttttattttattgcctcatgttcttgtaagtcattcttaattgaccaatgattgtagaccttgcttgagtattttttctaataaaacaaagcaaatcacatttagcttcaaattgtaacaattcaattgaattttaaaatgacacctgaaaagatacatctgatattttctatatagagcacagtaaataagttttttcattgtgtagaaatacttagatgtcaaaaccagatttcgtgatccttgattaacttctgagtactcaatcaatcataatccttttgctgcttatctgatgttggtttgatactgttaacacaccaaaaagaatatggaattgaaatgagctagctttataacttgtatgtatacatatatacacataacatccaattatgactgggtaataagtgtgaaaattttaatttgtggttttcatttattaatgtctgcccatctgtattgttgctcctaccttcaaatatgacacctgaaataataagtctgttgtccagaatttaaaaaaaaaaaaaaaaaaaaaaaaaaaaaaaa

SEQ ID NO: 13109 - DNA, 2568 bp, Homo sapiens
gtccgttgctaaggccgcgcagccctagtgaccgaacgccctgcggcgagaccgcaggcgctgtggtgggctccggtgcactgtgggatggaaaccggagcggcgcgtcctggcaggaccgggcggcggcggcgcgggccggcggcggccagggacccgggcttaggctggcaggccggctgaggggcgcgggcggccagcgggcggcggacgccgtcatgaacgcggcggtggtgaggcggacgcaggaggcgctggggaaagtgattcggaggccgccgctgacagagaagctgctgagcaagcccccgttccgctacctgcacgacatcatcacggaggtgattagaatgactggtttcatgaagggcctctacacagacgccgagatgaagtctgataatgtgaaggataaagatgcaaaaattagcttcctacaaaaggccatagacgtggttgtaatggtgtcgggagagccactgttggccaaaccagcccgaatcgtggcggggcatgagcctgaaagaacaaacgagctgctccagataattggaaaatgctgtctcaacaagctctctagtgacgatgcggtgcggagggttttagctggagagaagggagaagtgaaaggccgggcctcactgacctcaagatctcaggaattggataataagaatgtgcgagaagaagagtccagagttcacaaaaatacagaggatagaggagacgctgaaataaaagagagaagtacaagcagagatcgaaaacagaaggaagaattgaaagaagaccgcaagccaagagaaaaggacaaggacaaggagaaggccaaggagaatggcggaaacagacacagagaaggggagagagagagagccaaagcccgggccaggccagacaacgagcgacagaaagacagaggcaacagggagcgggacagagactccgagcgcaagaaggagacagagagaaagagtgagggggggaaagagaaggagagactgagagacagggaccgagagcgcgaccgggacaaagggaaggacagggacagacggagagtgaaaaacggggagcactcctgggacctggacagggagaagaacagagagcatgacaaacctgagaaaaagtcagcaagctcaggggagatgtctaaaaagttatcagatggaacttttaaagactccaaggctgaaacagagactgagatttccactagagcttccaagtcattgacaacaaaaacatcaaaacggcgatccaaaaattcagtggaaggaaggaaggaggataatatttcagctaaaagtttagactccatagtgtctggaataaataatgagccaaatcaggaaacgacaacatcagaaataggaacaaaagaagctaatattaactcaactagtatttcggatgataattcagctagtctgcggtgtgagaatattcagcccaaccccacagagaagcagaaaggtgactccaccagtgatgcagaaggagatgctggacctgctggccaagataagtctgaggtgccagagactccagaaattcctaatgagctttcatccaacatcagaagaattcctcggcctgggagtgcaagaccagcccctccccgggtcaaacggcaagacagcatggaggcgctacaaatggataggtcagggagtggtaaaaccgtttcaaatgtgattacagagtcacacaattctgacaatgaagaggatgatcaatttgtggtggaagctgcccctcagctctctgaaatgtcagaaattgaaatggtaacagcagtggaactagaagaagaggagaagcatggtggacttgtgaaaaaaattttggagacgaagaaagattatgagaaattgcagcagtcacccaaacctggggagaaggagcgatctctctttgagtcggcatggaagaaggagaaggacatcgtttccaaggagatagagaagctccgcacgtccatccagaccctgtgcaagagcgcacttcccctggggaagatcatggactacatccaggaagacgtggatgccatgcagaatgagctgcagatgtggcacagcgagaacaggcagcacgccgaggccctgcagcaggagcagaggatcacagactgtgccgtggagcccttaaaggctgagctcgcggagctggagcagctgatcaaagaccagcaagacaagatctgtgctgtgaaggccaacatcctcaagaatgaagaaaaaatccagaaaatggtatatagtatcaatttgacttcgagaaggtgaacactcaaaagtttcagagatgaaaagtcacctcagtttaaaagcaaaaaggaagatagaaaatcattactcttttaagttccagtttgctaagaaaatgaacagtttacaatgttattatccagctaattttcagagctttaaaactgtaagcatgttaagtgtattaaaaaaaccatgttttcttacctccttccagatggaatactggctagttataaatagcgcttccaaacaaaaaaaaaaaaaaaaaaaaaaaaaaaaaaaaaaaaaa

SEQ ID NO: 13110 - DNA, 1486 bp, Homo sapiens
agagagagaaagagaactagtctcgagttttttttttttttttttctcaggtgcttgcgaggtgatcagaaggcaaagatgtcggagcgaaaagtattaaacaaatactacccgccggactttgacccatcaaagatccccaaactcaagctccccaaagaccggcagtacgtggtgcggctgatggcccccttcaacatgaggtgtaagacgtgcggagaatacatctacaaggggaagaaattcaatgctcggaaggagacggtgcagaacgaggtctacctgggcctgcccatcttccgcttttacatcaagtgcacgcgctgcctggcagagatcaccttcaagacagaccctgaaaacacagactacaccatggagcatggagccacgcggaatttccaggctgagaagctcctggaggaggaggagaagagggtgcagaaggagcgggaggacgaggagctgaacaaccccatgaaggtgctggagaaccggaccaaggactccaagctggagatggaggtgctggagaacctccaggagctgaaagacctgaaccagcggcaggcgcacgtggacttcgaggctatgctgaggcagcaccgcctgtcggaggaggagcggcggaggcagcagcaggaggaggacgagcaggagaccgcggccctgttggaggaagccagaaagcgaagactgctggaggactccgactcagaggatgaggctgctccctcgcccctgcagccagcccttcggcccaaccccaccgccatcctggatgaggccccaaagcccaagaggaaggtggaggtctgggagcagagcgttggcagcctgggcagccggcccccgctgtcgaggctggtcgtggtgaagaaggcaaaggccgacccggactgcagcaacgggcagcctcaggcggcccccaccccaggagccccgcagaacaggaaggaggccaaccctacacccctgacgcctggcgcgtcctccctgagccaactgggtgcatacctggacagtgacgacagcaacggcagcaactgagccctcccaggaccccctcacggggtcaaagtcacacgtccagcttcagccacattgaggccagcattgctggtggtcagggcaggaggccttggcgtgactggaggccggacagacaagcgccagcgtgctccaacacatagggccaccaggggcctcagccccaggaggtcccttctctgtgccctcaccagcctctcaacacctcggggacccctgctgctcctgcccccacctgtcactgtgcttagggctgcaacatccctggagcagcttccaacactacttcagggtggcagtgtttggggcactgggcgagcctgccggcctctagatggcctcatctcttccttccacaaactgtctagaaccaataaaaggaaacctgccaaaaaaaaaaaaaaaaaaaaaaaaaaaaaaaaaaaaaaaaaaaaaa

SEQ ID NO: 13111 - DNA, 4165 bp, Homo sapiens
ggaggttccgcatgcgcggtggagtgagcgaagcgcacgctgaggaggatcggcggccggtgagggggaagcaagtctggtctctgtgattgaagaagtcggctctgggctccagtgcgggaatcacacacatacctcagaatgccgggtctaagttgtagattttatcaacacaaatttcctgaggtggaagatgtagtgatggtgaatgtcagatccattgctgaaatgggggcttatgtcagcttgctggaatacaacaacattgaaggcatgattcttcttagtgaattatccagaaggcgtatccgttctatcaacaaactcatccgaattggcaggaatgagtgtgtggttgtcattagggtggacaaagaaaaaggatatattgatttgtcaaaaagaagagtttctccagaggaagcaatcaaatgtgaagacaaattcacaaaatccaaaactgtttatagcattcttcgtcatgttgctgaggtgttagaatacaccaaggatgagcagctggaaagcctattccagaggactgcctgggtctttgatgacaagtacaagagacctggatatggtgcctatgatgcatttaagcatgcagtctcagacccatctattttggatagtttagatttgaatgaagatgaacgggaagtactcattaataatattaataggcgcttgaccccacaggctgtcaaaattcgagcagatattgaagtggcttgttatggttatgaaggcattgatgctgtaaaagaagccctaagagcaggtttgaattgttctacagaaaacatgcccattaagattaatctaatagctcctcctcggtatgtaatgactacgacaaccctggagagaacagaaggcctttctgtcctcagtcaagctatggctgttatcaaagagaagattgaggaaaagaggggtgtgttcaatgttcaaatggagcccaaagtggtcacagatacagatgagactgaacttgcgaggcagatggagaggcttgaaagagaaaatgccgaagtggatggagatgatgatgcagaagaaatggaagccaaagctgaagattaactttgtgggaaacagagtccaatttaaggaacacagagcagcgcttcctggctgtaaatcctagacttgaaagttttccagtattgaaaacttcaaagctgaatattttttatttctaagtatttaaatgttctaacagatcagaacatgaaatgccctcctaaatgtcagctgttgtcacacagtagctccaacactttgagcatttttaagggagtggcctcatttcactagagacaaatctttaagaatagttctaaaattgggcttgtgatttccatttctgatgtctccagattggcacccctttctagttcaatgcctcacgagatttgccaggggcatccaaggcaaacaatcccaatctttctatataaaatgtattcaagcaaacatcaaataaatttctgggatatttaactataggcttcttccttcttgtcaccagttaaaagcattttaatactaagaccctaattcttttatctttattttagtcttgatgtggaactgtaggagcaggtgaataaaggatctctataacagatcctttcaaaagaagagttttagagaaaataaatttaactttaaccacagtgaaagttgacccttagcgggacaaagccttaaaatgcattgaaagaattagatcggttctgtgccttttatctatttgagattgatgacaacctgtgtgagagaatttatcacaccacgtccttattggaataataagctacttgccttgagtttataattcagggtggtaaagtatgtttttaaattttaaaaagcagctgcattttttatttagttggaatatcacccaattttttatttttattgctattaaaatatccactagatgccacctagagctccagttctttataacaaaacagggatctgtttgaacacttactgttgtttttttttttttacatgtttccatcatttctgtctttaagaactaattcgtacataataagtttcataggtaacacattatttgaagttacagctacagtagtcaggtgtagaaaatcttgagttgctttggtctgcttgtcttcataaatttattctcttatgatacttgaggtaccagttgtatttaattttattcattatccctagatagctattaagatacttagattagacctaacccaccatagtcaatccaagactagactactcaatattaaagggtctggaaaatagaagagtgtgttgggcaggtagtttgtaccatttatgaaggtttgttcctttgttaaatttagcagcctgtactagcttttgaaatccagaagttttaacttccagtggctggtttctgagagagtgccatgattgctagccagcattccatattgggaatatgtagaggagaacctggatgtacttaagagtggcatataattttcacttctgtctgttgaggcatcaaaaaaacaagtttagaaagctggcaacatgaagaatgcattcaaaatataacaggtgcttctttgttgtacgcagaggaattttttcttttgattttgtttactgaaatttgttatacttcaaaagccataacttgaaaaatactggtggcgtcgatggtgagtgatttttatcccacgtgggccttttgctcagttccatggcaattttgtaaattgaccctagccagagaatagatcagtatttcactgataccacgaggaaaagaacaaacaaaacttaaaagtattcatacaccttgctaacctaaaagacagcagggacaagatacatatgaggacaaggtatacacccagttctgaataacttgaagaacaggcttggcaaagaagtaagtttatccaaatcttgaatttctgccaggcatggtagctcatgcctgtaaccctggcacttaaggggccaaggcaggaggatcacttgaggccagtgagctgtgatcactccagtgcactcgagcctgggtgacagggcaagaccctgtctcaaaaaaaaaaaaaaaaaccaaaaatcttgaatctcccatcaaagccttttcattaaaaatacaatttcatctactccctactgtacctttcactgatgtcaagtggctatcaattcatatagctgaaaattagtgatagtttgggtctcatttatgcataaattaattgaaaatcagtaatggccaggaagaaatatgaatattcaaaccacttttttctttttttttttttttttttggcaaatggtgttatattgcctgggcaggtctcgaaatcctgggctcaagctatcctcctgcctctgcctctgtaagagtgtgagccaccatgccccacccaaaccatttttcatatcagttatagcaaaacaagacaaaccagttcttaataatgttcaaagttggacccatagagacatgctaagcactacatcatgctaagaagaacagttattactcagctgccatacttcagccattctacttttacaccaagaacaaaatggctagagatttttttaaaaatacaaatgccagtaccttgccgagacttgttcactgatttgccccaaccccaaggtaatggtcatctactttgcaacctatggagatcctgatagctcccatacaaagtgaggtacactgttgccaatttggaggcaggaagccatcaaactaaacgtagtttaattcagatgaacacctatcgatattcaaaaggcaaaacaaaaaaactaattccagggacattagaccttggtgaaatgccaaatggaaaatggtgctttaaaaggtagtctcttaccatataaggaataagtaaaacattagcttgtgatttctcattattcaggtcaatgttttagacacgactaacaagggacagttcaaactattaaagagaacaaatttttacttaagcactttgaggtatccactccccttaaatgtaagttatgtattttatctgttgattaaggggaggtccaagcatttgtacttggcaggaatgctggcaatagcttgtgccagattactgtataaacttgaaagtaataaaaatgttctttaaaagta

SEQ ID NO: 13112 - DNA, 1281 bp, Homo sapiens
ctcccaaagtgctgggattacaggagtgtgccactgcgcctgaccagctttataaagtttatagggacagtgtcaccactttacagaagagggactgaggctctgaggaggaagttccttgccagggtccgagtgtcgccaccctgagaactccagcacccacctccctactctccctcatggcgtctcccccacctttccacagccagaagttgccaggtgaatacttccggtacaagggcgtccccttccccgtcggcctgtactcgctcgagagcatcagcttggcggagaacacccaagatgtgcgggacgacgacatctttatcatcacctaccccaagtcaggcacgacctggatgatcgagatcatctgcttaatcctgaaggaaggggatccatcctggatccgctccgtgcccatctgggagcgggcaccctggtgtgagaccattgtgggtgccttcagcctcccggaccagtacagcccccgcctcatgagctcccatcttcccatccagatcttcaccaaggccttcttcagctccaaggccaaggtgatctacatgggccgcaacccccgggacgttgtggtctccctctatcattactccaagatcgccgggcagttaaaggacccgggcacacccgaccagttcctgagggacttcctcaaaggcgaagtgcagtttggctcctggttcgaccacattaagggctggcttcggatgaagggcaaagacaacttcctatttatcacctacgaggagctgcagcaggacttacagggctccgtggagcgcatctgtgggttcctgggccgtccgctgggcaaggaggcactgggctccgtcgtggcacactcaaccttcagcgccatgaaggccaacaccatgtccaactacacgctgctgcctcccagcctgctggaccaccgtcgcggggccttcctccggaaaggggtctgcggcgactggaagaaccacttcacggtggcccagagcgaagccttcgatcgtgcctaccgcaagcagatgcgggggatgccgaccttcccctgggatgaagacccggaggaggacggcagcccagatcctgagcccagccctgagcctgagcccaagcccagccttgagcccaacaccagcctggagcgtgagcccagacccaactccagccccagccccagccccggccaggcctctgagaccccgcacccacgaccctcataataaacacgtcgattctgtccaaaaaaaaaaaaaaaaaaaaaaaaaaaaa

SEQ ID NO: 13113 - DNA, 1228 bp, Homo sapiens
agacgctgtcgctgcgcacacctggcctctgtgccgcctgctccctgctcgtcctcccctccccaccctcacccacctgccatggacgggcccgccgagccccagatcccgggcttgtgggacacctatgaagatgacatctcggaaatcagccagaagttgccaggtgaatacttccggtacaagggcgtccccttccccgtcggcctgtactcgctcgagagcatcagcttggcggagaacacccaagatgtgcgggacgacgacatctttatcatcacctaccccaagtcaggcacgacctggatgatcgagatcatctgcttaatcctgaaggaaggggatccatcctggatccgctccgtgcccatctgggagcgggcaccctggtgtgagaccattgtgggtgccttcagcctcccggaccagtacagcccccgcctcatgagctcccatcttcccatccagatcttcaccaaggccttcttcagctccaaggccaaggtgatctacatgggccgcaacccccgggacgttgtggtctccctctatcattactccaagatcgccgggcagttaaaggacccgggcacacccgaccagttcctgagggacttcctcaaaggcgaagtgcagtttggctcctggttcgaccacattaagggctggcttcggatgaagggcaaagacaacttcctatttatcacctacgaggagctgcagcaggacttacagggctccgtggagcgcatctgtgggttcctgggccgtccgctgggcaaggaggcactgggctccgtcgtggcacactcaaccttcagcgccatgaaggccaacaccatgtccaactacacgctgctgcctcccagcctgctggaccaccgtcgcggggccttcctccggaaaggggtctgcggcgactggaagaaccacttcacggtggcccagagcgaagccttcgatcgtgcctaccgcaagcagatgcgggggatgccgaccttcccctgggatgaagacccggaggaggacggcagcccagatcctgagcccagccctgagcctgagcccaagcccagccttgagcccaacaccagcctggagcgtgagcccagacccaactccagccccagccccagccccggccaggcctctgagaccccgcacccacgaccctcataataaacacgtcgattctgtccaaaaaaaaaaaaaaaaaaaaaaaaaaaaa

SEQ ID NO: 13114 - DNA, 5629 bp, Homo sapiens
cttaagtgcaaggaactctgtgttgggaggaaaaatgtccttcttcaatttccgtaagatcttcaagttggggagcgagaagaagaagaagcagtacgaacacgtgaagagggacctgaaccccgaagacttttgggagattataggagaactgggcgacggagcctttgggaaagtgtacaaggcccagaataaagagaccagtgttttagctgctgcaaaagtgattgacactaaatctgaagaagaacttgaagattacatggtagagattgacatattagcatcttgtgatcacccaaatatagtcaagcttctagatgccttctattatgagaacaatctttggatcctcattgaattttgtgcaggtggagcagtagatgctgtgatgcttgaacttgagagaccattaactgagtcccaaatacaagtagtttgcaagcagactttagatgcattgaactacttacatgataataagatcatccacagagatctgaaggctggcaacattctctttaccttagatggagatatcaaattggcggattttggagtatcagctaaaaacacgaggacaattcaaagaagagattcctttattggtacaccatattggatggctcctgaagtagtcatgtgtgaaacatctaaggacagaccctatgactacaaagctgatgtttggtccctgggtatcactttaatagaaatggctgagatagaaccacctcatcatgaattaaatccaatgcgagtgctgctaaaaatagcaaaatctgagccacctacattagcacagccatccagatggtcttcaaattttaaggactttctaaagaaatgcttagaaaagaatgtggatgccaggtggactacatctcagctgctgcagcatccctttgttactgttgattccaacaaacccatccgagaattgattgcagaggcgaaggctgaagtaacagaagaagttgaagatggcaaagaggaagatgaagaggaggaaacagaaaattctctgccaatacctgcaagtaagcgtgcatcttctgaccttagtatcgccagctctgaagaagataaactttcacaaaatgcttgtattttggagtctgtctcagaaaaaacagaacgtagtaactctgaagataaactcaacagcaaaattcttaatgaaaaacccaccactgatgaacctgaaaaggctgtggaggatattaatgaacatattaccgatgctcagttagaagcaatgactgaactccatgacagaacagcagtaatcaaggagaatgaaagagagaagaggcccaagcttgaaaatctgcctgacacagaagaccaagaaactgtggacattaattcagtcagtgaaggaaaagagaataatataatgataaccttagaaacaaatattgaacataatctaaaatctgaggaagaaaaggatcaggaaaagcaacagatgtttgaaaataagcttataaaatctgaagaaattaaagatactattttgcaaacagtagatttagtttctcaagagactggagaaaaagaggcaaatattcaggcagttgatagtgaagttgggcttacaaaggaagacacccaagagaaattgggggaagacgacaaaactcaaaaagatgtgatcagcaatacaagtgatgtgataggaacatgtgaggcagcagatgtggctcagaaagtggatgaagacagtgctgaggatacgcagagtaatgatgggaaagaagtggtcgaagtaggccagaaattaattaataagcccatggtgggtcctgaggctggtggtactaaggaagttcctattaaagaaatagttgaaatgaatgaaatagaagaaggtaaaaataaggaacaagcaataaacagttcagagaacataatggacatcaatgaggaaccaggaacaactgaaggtgaagaaatcactgagtcaagtagcactgaagaaatggaggtcagaagtgtggtggctgatactgaccaaaaggctttaggaagtgaagttcaggatgcttctaaagtcactactcagatagataaagagaaaaaagaaattccagtgtcaattaaaaaagagcctgaagttactgtagtttcacagcccactgaacctcagcctgttctaatacccagtattaatatcaactctgacagtggagaaaataaagaagaaataggttctttatcaaaaactgaaactattctgccaccagaatctgagaatccaaaggaaaatgataatgattcaggcactggttccactgctgatactagcagtattgacttgaatttatccatctctagctttctaagtaaaactaaagacagtggatcgatatctttacaagaaacaagaagacaaaagaaaacattgaagaaaacacgcaaatttattgttgatggtgtagaagtgagtgtaacaacatcaaagatagttacagatagtgattccaaaactgaagaattgcggtttcttagacgtcaggaacttcgggaattaagatttcttcagaaagaagagcaaagagcccaacaacagctcaatagcaaactacagcaacaacgagaacaaattttccggcgctttgagcaggaaatgatgagtaaaaagcgacaatatgaccaggaaattgagaatctagaaaaacagcagaaacagactatcgaacgcctggaacaagagcacacaaatcgcttgcgagatgaagccaaacgcatcaaaggagaacaagagaaagagttgtccaaatttcagaatatgctgaagaaccgaaagaaggaggttataaatgaagtggagaaagcacccaaagagctgagaaaagagctcatgaaacgcaggaaagaggagcttgcacaaagccagcatgctcaggaacaagagtttgttcagaaacaacagcaagaattagatggctctctgaaaaagatcatccagcagcagaaggcagagttagctaatattgagagagagtgcctgaataacaagcaacagctcatgagagctcgagaagctgcaatttgggagctcgaagaacgacacttacaagaaaaacaccagctgctcaaacagcagcttaaagatcagtatttcatgcaaagacatcagctacttaagcgccacgagaaggaaacagagcaaatgcagcgttacaatcaaagacttattgaggaattgaaaaacagacagactcaagaaagagcaagactgcccaagattcagcgcagtgaagccaagactcgaatggccatgtttaagaagagtttgagaattaactcaacagccacaccagatcaggaccgtgataaaattaaacagtttgctgcacaagaagaaaagaggcagaaaaatgagagaatggctcagcatcagaaacatgagaatcaaatgcgagatcttcagttgcagtgtgaagccaatgtccgcgaactgcatcagctgcagaatgaaaaatgccacttgttggttgagcatgagactcagaaactgaaggagttagatgaggaacatagccaagaattaaaggagtggagagagaaattgagacctaggaaaaagacactggaagaagagtttgccaggaaactacaggaacaggaagtattctttaaaatgactggggagtctgaatgccttaacccatcaacacagagccggatttccaaattttatcctattcccagcttgcattccaccggatcataacaaagggaagcattctgtgcgtgggtttggctctttcagtatgtcattctgttctcatcttctgccacagtctctcagatagctcatgaagacaatcacctgcctcaccttctaggtgttttccttttttgttttttttgttttgttttgtttttaagcaaagatgaagggaaaacgaactaagacagacgctaggccatgttggcaaagtagcatcttggtgactaaggtgactttgtatattcatcttaaaaattatgttctttagacactgctacctgaaaactgttggagaaataatgtttaaagttatttaagaaaaactgttacatcactaagtattaataaattcttcttacctgacgtaacttctcaatgcctaaattctgtagttgaagctctgctgcagagagttgggataattttcttttggtggatcagctctcataaaaaagctatgatttgctcaaatatgctgttgactcagtaaatgaatatatttttttctttaaataggaacaacctcttttaaaagagaaaaattatttcagtgatttgtcaaaacgaattacctcttttggcatgagctaataattgagggtgctaattttcttaagatagtgcctaaaacactaaatttcagtcaagtcgtaagtaggattttctttttgatcaacagggacaaaaacatctttagaattaaaaacatggttgttttggaatttttgcttctcttaccgtttgatagaaattttcatcctaaaatacatgtacaaagtttggaaagatgaaaaaaagaggtagcttttagattgcaaattggaaatgtaaaactcatgaaatttaagcaatataggtttagctatctgtgtttattttctaaaataatacctgagctggttaaatgatttctctccatcttagctaattctgtttaaaactctgtcagaggcctgcaggctgtgagttatatttataaatatatcttcagaaattaatcttaaaagaggcattagttcagaatacttttttaaaagtttaaattaaatatttaggcacgtcagaaattacttttccttattttgaaatgaggctacttatgtcttggttttattttgttccatgtttaaatcattcactttgatttgagtgggaaaagcctgaagcctttatcatgtggttgctggtgtgtgtaattattaatgaaatgttcactcctagtcccttatgaggcttagaatttcaaccacgtgtcaggtcagacagtattataaactgtactttgctgtctgagacagcacatttgtgaatgatgcttgctgcctgccattttcaacctattctctcttaagagtgctaggtaccaaattgtgaaagtttgttttcagttatattacttttgaggctggtgaaaaatttaaatgtaactttgtgggaacactgattcatatttagaaaatgtaaatgtctgtagcactttcttgcagttaatttgaaaactttggatgctgaaccttgtttgtcagtgatttagatgatttaaaaatgcatgtgtgatttgaattttataattgttttgacaagcataatttacttggacaacttcgtaggtagccttaacttctggccaagtttgttttttatataaatatatatacatatatacatattatgtatggttgtaaattcatacacttatcacatgaatgtgttactgtatacaaaactcttaatgctttattctcaaatgctgggttgaaaaatgttttgaaagccttttaaaatatatatctttataaagtaatattcaggatgatgataaaaattgtttatattgttatgataaaaatgacagtataatgttaaaaaaaaaaaaaaaaaaaaaaa

SEQ ID NO: 13115 - DNA, 2385 bp, Homo sapiens
gcgactcgtcccgccttctggggcactagtttgactttgtgattggctactagtatcaaggaatcccggcgtggacagcgcgaggagaaagatggcggcgatggcggtcgggggtgctggtgggagccgcgtgtccagcgggagggacctgaattgcgtccccgaaatagctgacacactaggggctgtggccaagcaggggtttgatttcctctgcatgcctgtcttccatccgcgtttcaagagggagttcattcaggaacctgctaagaatcggcccggtccccagacacgatcagacctactgctgtcaggaagggactggaatacgctaattgtgggaaagctttctccatggattcgtccagactcaaaagtggagaagattcgcaggaactccgaggcggccatgttacaggagctgaattttggtgcatatttgggtcttccagctttcctgctgccccttaatcaggaagataacaccaacctggccagagttttgaccaaccacatccacactggccatcactcttccatgttctggatgcgggtacccttggtggcaccagaggacctgagagatgatataattgagaatgcaccaactacacacacagaggagtacagtggggaggagaaaacgtggatgtggtggcacaacttccggactttgtgtgactatagtaagaggattgcagtggctcttgaaattggggctgacctcccatctaatcatgtcattgatcgctggcttggggagcccatcaaagcagccattctccccactagcattttcctgaccaataagaagggatttcctgttctttctaagatgcaccagaggctcatcttccggctcctcaagttggaggtgcagttcatcatcacaggcaccaaccaccactcagagaaggagttctgctcctacctccaatacctggaatacttaagccagaaccgtcctccacctaatgcctatgaactctttgccaagggctatgaagactatctgcagtccccgcttcagccactgatggacaatctggaatctcagacatatgaagtgtttgaaaaggaccccatcaaatactctcagtaccagcaggccatctataaatgtctgctagaccgagtaccagaagaggagaaggataccaatgtccaggtactgatggtgctgggagcaggacggggacccctggtgaacgcttccctgcgggcagccaagcaggccgaccggcggataaagctgtatgctgtggagaaaaacccaaatgccgtggtgacgctagagaactggcagtttgaagaatggggaagccaagtgaccgtagtctcatcagacatgagggaatgggtggctccagagaaagcagacatcattgtcagtgagcttctgggctcatttgctgacaatgaattgtcgcctgagtgcctggatggagcccagcacttcctaaaagatgatggtgtgagcatccccggggagtacacttcctttctggctcccatctcttcctccaagctgtacaatgaggtccgagcctgtagggagaaggaccgtgaccctgaggcccagtttgagatgccttatgtggtacggctgcacaacttccaccagctctctgcaccccagccctgtttcaccttcagccatcccaacagagatcctatgattgacaacaaccgctattgcaccttggaatttcctgtggaggtgaacacagtactacatggctttgccggctactttgagactgtgctttatcaggacatcactctgagtatccgtccagagactcactctcctgggatgttctcatggtttcccatcctcttccctattaagcagcccataacggtacgtgaaggccaaaccatctgtgtgcgtttctggcgatgcagcaattccaagaaggtgtggtatgagtgggctgtgacagcaccagtctgttctgctattcataaccccacaggccgctcatataccattggcctctagccctgcgtgccaagtgtccagagccttggaagcagcttcaggttctgctcctgtagtacagaaggtgcagtacatctatgggctgtgattccccttgcccatcagagaggagcatttcaatctgctttcctgccttacatcaaggtgggcaagggattataattaattgcagggctcaagccaccaatctatgaagacctcaggccagggggtgaggaattagtgctggatttgaagctacgcactcagcctcaagaactccctggaatatccctgagaacatggggtttgaacggattttcagcctttttctgttcttgttttgatggttttgtgtaagaggaaatacaaataaagttatagccctttactgcacgacc

SEQ ID NO: 13116 - DNA, 3639 bp, Homo sapiens
gcggcgctgggtcggtggcggaggctgaggagaaggaggagcgggccgtggaggcttcgccgcctaggtactgctataaccagaatttggtagaaaaaggatttacttgttggggccctcttgataaaaagagatgtggggggattctcgacctgctaacagaactggaccttttcgtgggagccaagaagaaaggtttgctcccgggtggaacagggattatcctcctcctccccttaagagtcatgctcaagagagacactctggcaactttcctggcagagattcacttccctttgatttccaggggcattcggggcctccttttgcaaatgtagaggagcattctttcagctatggagctagagacggaccgcatggtgactatcgaggaggggagggacctggacatgatttcagggggggagatttttcgtcttctgatttccagagcagagattcatcacagttggacttcaggggtagggacatacattctggggattttcgggatagagaaggaccacctatggactataggggtggagatggtacttctatggattatagaggtagggaggcacctcatatgaactacagagacagggatgctcacgctgttgacttcagaggtagggatgctcctccatctgacttcaggggccggggcacttatgatttagattttagaggccgggatggatcccatgcagattttaggggaagggatttatcagatttggattttagggccagagaacagtcccgttctgattttaggaatagagatgtatctgatttggactttagagacaaagacggaacacaagtagactttagaggccgaggttcaggtactactgatctagactttagggacagggatacgccacattcagatttcagaggtagacaccgatctaggactgatcaggattttaggggcagagagatgggatcttgtatggaatttaaagatagggagatgccccctgtggatccaaatattttggattacattcagccctctacacaagatagagaacattctggtatgaatgtgaacaggagagaagaatccacacatgaccatacgatagaaaggcctgcttttggcattcagaagggagaatttgagcattcagaaacaagagaaggagaaacacaaggtgtagcctttgaacatgagtctccagcagactttcagaacagccaaagtccagttcaagaccaagataagtcacagctttctggacgtgaagagcagagttcagatgctggtctgtttaaagaagaaggcggtctggactttcttgggcggcaagacaccgattacagaagcatggagtaccgtgatgtggatcataggctgccaggaagccagatgtttggctatggccagagcaagtcttttccagagggcaaaactgcccgagatgcccaacgggaccttcaggatcaagattataggaccggcccaagtgaggagaaacccagcaggcttattcgattaagtggggtacctgaagatgccacaaaagaagagattcttaatgcttttcggactcctgatggcatgcctgtaaagaacttgcagttgaaggagtataacacaggttacgactatggctatgtctgcgtggagttttcactcttggaagatgccatcggatgcatggaggccaaccagggaactctaatgatccaggacaaagaagttaccctggagtatgtatcaagcctggatttttggtactgcaaacgatgtaaggcaaacattggtgggcaccgatcttcctgttcattctgcaagaacccaagagaagtgacagaggccaagcaagaattaataacctaccctcagcctcagaaaacatccataccagcaccattggaaaaacagcccaaccagcccctaagaccagctgataaggaacctgaacccaggaagagggaagaaggccaagagtcacgcttaggacatcaaaagagagaagcagaaaggtatctgcctccttctcgaagggaagggccaactttccgaagagaccgagagagggagtcatggtctggagagacacgccaggatggagagagcaaaactatcatgctaaagcgtatctatcgttccacaccacctgaggtgatagtggaagtgctggagccctatgtccgccttactactgccaacgtccgtatcatcaagaacagaacaggccctatggggcatacctatggctttattgacctcgactcccatgcggaagctcttcgtgtggtgaagatcttacagaaccttgatccgccatttagcattgatgggaagatggtagctgtaaacctggccactggaaaacgaagaaatgattctggggaccattctgaccacatgcattactatcagggtaaaaaatatttccgagataggaggggaggtggcagaaattcagactggtcttcagatacaaatcgacaaggacaacagtcatcatctgactgctacatatatgattctgctactggctactattatgaccccttggcaggaacttattatgaccccaatacccagcaagaagtctatgtgccccaggatcctggattacctgaggaagaagagatcaaggaaaaaaaacccaccagtcaaggaaagtcaagtagcaagaaggaaatgtctaaaagagatggcaaggagaaaaaagacagaggagtgacgaggtttcaggaaaatgccagtgaagggaaggcccctgcagaagacgtctttaagaagcccctgcctcctactgtgaagaaggaagagagtccccctccacctaaagtggtaaacccactgatcggcctcttgggtgaatatggaggagacagtgactatgaggaggaagaagaggaggaacagacccctcccccacagccccgcacagcacagccccagaagcgagaggagcaaaccaagaaggagaatgaagaagacaaactcactgactggaataaactggcttgtctgctttgcagaaggcagtttcccaataaagaagttctgatcaaacaccagcagctgtcagacctgcacaagcaaaacctggaaatccaccggaagataaaacagtctgagcaggagctagcctatctggaaaggagagaacgagagggaaagtttaaaggaagaggaaatgatcgcagggaaaagctccagtcttttgactctccagaaaggaaacggattaagtactccagggaaactgacagtgatcgtaaacttgttgataaagaagatatcgacactagcagcaaaggaggctgtgtccaacaggctactggctggaggaaagggacaggcctgggatatggccatcctggattggcttcatcagaggaggctgaaggccggatgaggggccccagtgttggagcctcaggaagaaccagcaaaagacagtccaacgagacttatcgagatgctgttcgaagagtcatgtttgctcgatataaagaactcgattaagaaaggagacaagttccatgggatacaacctccctcttgttttgtttgtctctccttttcttttgttactgttcttgctgctagaacttttttaaataaactttttttcaatgtgaaaaaaaaaaaaaaaaaaa

SEQ ID NO: 13117 - DNA, 8708 bp, Homo sapiens
agatttgaatacttcactgaggcgagccgggcgttgtgagcggactgctagaggcggctgtctgtttccgctctaaggaaactcagagcgtgtggaccccaaacaagtctgcgcaaaatttgtcgaggaggtttgccgcggcagaaaagttttcttcaaaaatggatggggtgtcttcagaggctaatgaagaaaatgacaatatagagagacctgttagaagacggcattcttcaatattgaaacccccaaggagtcctcttcaggacctcagaggtgggaatgaaagagttcaggaatccaatgctttgagaaataagaaaaactctcgtcgagtcagctttgcagatactataaaggtattccagacggagtctcatatgaaaatagtgagaaagtcagaaatggaaggctgcagtgcaatggtgccatctcagctgcaacttctgcctcctgggtttaagcgattctcctgcctcagcctcccagaaacagaaacaggagaaaatcttcttttgatacagaataagaaattagaagataattactgtgaaattactgggatgaacacattgctttctgctcccattcatacccagatgcaacagaaggagttttcaattatagaacatacccgtgaaaggaaacatgcaaatgaccagacagtcattttttcagatgaaaaccagatggacctgacatcaagtcacactgtaatgattaccaaaggccttttagataatcccataagtgaaaagtccaccaagatagataccacatcatttctagctaatttaaagcttcacaccgaggactcaagaatgaaaaaagaagtaaatttttccgtggatcaaaacacttcttcagaaaataaaatagatttcaatgacttcataaaaagattgaaaacaggaaaatgtagtgcttttcctgatgtgcctgataaagaaaattttgagatacctatttattccaaggaaccgaacagtgcctcttctacacatcaaatgcatgtatctcttaaggaagatgaaaataacagtaatattactaggctctttagagaaaaagatgatgggatgaatttcacccagtgtcatacagccaatattcagacattgattcccacatccagtgagaccaactcacgggaatctaaaggtaatgatattacaatttatggcaatgactttatggacttgacatttaaccacactttgcagatcttacctgcaacaggtaatttttctgaaatagaaaatcaaactcagaatgccatggatgtaacaacaggttatggaactaaagcttcaggaaataaaacagtttttaagagtaaacaaaatactgcttttcaagacctttccataaactctgcagacaaaatacatattaccagaagtcatattatgggggcagaaactcacatagtctcacagacttgtaatcaggatgccagaatattagccatgaccccagaatctatatattctaatccatctattcaaggttgtaagactgttttctattctagttgtaatgatgccatggaaatgaccaaatgtctctcaaatatgagagaggagaaaaatttgctaaagcatgacagtaattatgctaaaatgtattgcaatccagatgctatgtcttctctcacagagaaaactatttattccggagaggagaacatggacattaccaagagtcatacagttgcaatagataatcaaatttttaaacaagatcaatcaaatgtgcaaatagcagctgcaccaacacccgaaaaagaaatgatgctccaaaatcttatgaccacatcagaagatgggaaaatgaatgtaaattgtaactcagttcctcatgtatctaaggaaagaatacagcagagcctgtcaaatcctttgtctatttcattgactgatagaaagactgaactcttatcaggtgaaaatatggatttgactgaaagtcacacaagtaacttaggaagtcaggttcctcttgcagcttataatctagcaccggagagtaccagtgaatctcactctcagagcaaaagctcttcagatgaatgtgaagaaattaccaaaagtcgtaatgaaccatttcagcgatcagacataatagccaaaaacagcttaaccgacacctggaacaaagacaaagattgggttttgaagattttgccctaccttgataaagattctcctcagtcagctgattgtaatcaggagatagcaacaagccataatatagtctactgtggtggagttcttgataaacaaataactaatagaaatacagtatcatgggaacaatctttgttttctaccacaaagccattattttcatcaggacagttctctatgaaaaatcatgatactgctataagtagtcatacagtgaaatctgtactaggccagaattctaaactggctgagccactgaggaaaagtttaagcaatcccacacctgactattgccatgacaagatgattatatgttcagaggaagagcaaaatatggatctaacaaagagccacactgtcgtcattggatttggtccttctgaactacaagaacttggtaaaactaatttagaacacactactggccagctaacaacaatgaacagacagatagctgtaaaagttgaaaaatgtggtaaaagtcccatagaaaaaagtggagtgcttaaatctaactgtattatggatgtgttagaggacgaaagtgtacagaaacctaaatttccaaaggaaaagcaaaatgtcaaaatttggggaaggaaaagtgttggtggaccaaaaattgataagactattgtattttcagaagacgataagaatgatatggatatcactaagagttatacaatagaaataaaccatagacctttattagagaaacgtgattgtcatttggtgccattggcaggaacttctgaaactattttatatacatgtgggcaggatgacatggagatcactagaagtcacacaactgccttagaatgtaaaactgtctcaccagatgaaataactactaggcctatggacaaaactgtagtgtttgtagataatcatgttgaactagaaatgacagagtcccatactgttttcattgactaccaagaaaaggaaagaacagacagacctaactttgaactatcccaaaggaaaagcctaggaacaccaacagtgatatgtactcctactgaggagagtgttttctttccaggaaatggtgaaagtgaccgtctagtagcaaatgacagccagctaacccctctggaggaatggtctaataataggggccctgtagaggtagctgataacatggaattgtctaaatcagccacttgcaaaaacatcaaagatgtacaaagtcctggatttctgaatgaacctctatcaagcaaaagtcagagaagaaaaagccttaagctaaaaaatgacaagaccattgtattttcagagaatcataaaaatgatatggatattacccagagttgtatggtggaaatagataacgaaagtgccctggaggataaagaggacttccatttggcaggggcttctaaaactattttgtattcatgtgggcaggatgacatggagatcactaggagtcacacaactgccttagaatgtaaaactctcctgccaaatgaaatagctattaggcccatggacaaaaccgtattgttcacagataattacagtgatctggaagtcaccgattcccatactgttttcattgactgtcaagccacagagaaaatacttgaagaaaaccctaaatttggaataggaaaaggaaaaaacttgggtgtttcctttcctaaggataatagctgtgttcaagaaatcgctgaaaaacaagcactggctgtaggaaacaaaatagttcttcacaccgagcaaaagcaacaactctttgctgctactaatagaactactaatgaaatcatcaaatttcatagtgctgctatggatgaaaaggtcatagggaaagttgtagaccaggcctgtacattggaaaaagcgcaagttgaaagctgtcagttaaataatagagatagaagaaatgtggactttacaagtagtcatgcaactgctgtttgtggatccagtgataattattcctgtttaccaaatgttatttcctgtactgataatttggagggtagtgccatgctcttatgtgataaagatgaggaaaaagccaattattgcccagtgcaaaatgatcttgcttatgcaaatgattttgccagtgaatattacttggaatctgagggacagcctctctctgctccttgtcctttgttagagaaggaagaagttattcaaaccagtaccaaaggacagttagactgtgttataacactgcacaaagatcaagatctgattaaggatccacgaaatctattggctaatcaaactttagtatatagtcaagatctgggggagatgactaaacttaattcaaagcgagtatcttttaagcttccaaaggatcaaatgaaagtctatgttgatgacatttatgttattcctcagcctcatttctcaaccgaccaacctccattacctaaaaaaggacagagtagtatcaataaagaagaagtaatactgtctaaagctggaaataagagtttaaatattatagaaaattcctctgcacccatatgtgaaaacaagcccaaaatactcaatagtgaggaatggtttgctgcagcctgtaaaaaagaactgaaggaaaatattcaaacaactaactataatacagctctagatttccacagtaactcagacgtaactaagcaagtcattcaaactcatgtcaatgctggagaagcaccagatcctgtaattacatctaatgttccatgttttcatagtatcaaaccaaatctgaataatttgaatggaaaaactggagagtttttagcctttcaaactgttcatctaccaccccttccagagcaattacttgaattaggaaataaggcacacaatgatatgcatatagtgcaagctacagaaatacataatattaacataatctccagcaatgctaaagatagtagagatgaggaaaataaaaagtctcataatggagctgaaaccacctctctaccgccaaagacagtttttaaagataaagtaaggagatgttctttgggaatctttttgcctagattgcccaacaagagaaattgtagtgtcactggtattgatgacctggaacagattccagcagacacaactgatataaatcacttagaaactcagccggtctctagcaaagattcaggcattggatctgttgcaggtaaactgaacctaagtccttctcaatatataaatgaggaaaatcttcctgtatatcctgatgagatcaattcttcagactctattaacatagaaactgaggaaaaggccttgattgagacataccaaaaagagatttcaccatatgaaaataaaatgggaaaaacttgcaatagccaaaaaagaacgtgggtacaagaagaagaagatattcataaggagaaaaaaatcagaaaaaatgagattaagtttagtgatacgacacaagatcgggagatttttgatcaccatactgaagaggatatagataaaagtgctaacagtgtattgataaaaaacctgagcaggaccccatctagttgcagcagctctctggattcaatcaaggctgatgggacctctctggacttcagcacttaccgcagtagtcaaatggaatcacagtttctcagagatactatttgtgaagagagcttgagggagaaactccaagatgggagaataacaataagggagttctttatacttctccaggtccacatcttgatacagaaaccccgacagagcaatctcccaggcaattttactgtaaacacaccacctactccagaagacctgatgttaagtcaatatgtttaccgacccaagatacagatttatagagaagattgtgaggctcgtcgccaaaagattgaagaattaaagctttctgcatcgaaccaagataagctgttggttgatataaataagaacctgtgggaaaaaatgagacactgctctgacaaagagctgaaggcctttggaatttatcttaacaaaataaagtcatgttttaccaagatgactaaagtcttcactcaccaaggaaaagtggctctgtatggcaagctggtgcagtcagctcagaatgagagggagaaacttcaaataaagatagatgagatggataaaatacttaagaagatcgataactgcctcactgagatggaaacagaaactaagaatttggaggatgaagagaaaaacaatcctgtggaagaatgggattctgaaatgagagctgcagaaaaagaattggaacagctgaaaactgaagaagaggagcttcaaagaaatctcttagaactggaggtacaaaaagagcagacccttgctcaaatagactttatgcaaaaacaaagaaatagaactgaagagctactggatcagttgagcttgtctgagtgggatgtcgttgagtggagtgatgatcaagctgtattcacctttgtttatgacacgatacaactcaccatcacctttgaagagtcagttgttggtttccctttcctggacaagcgttataggaagattgttgatgtcaattttcaatctctgttagatgaggatcaagctcctccttcctcccttttagttcataagcttattttccagtacgttgaagaaaaggaatcctggaagaagacatgtacaacccagcatcagttacccaagatgcttgaagaattctcactggtagtgcaccattgcagactccttggagaggagattgagtatttaaagagatggggaccaaattataacctaatgaacatagatattaataataatgaattgagacttttattctctagctccgcagcatttgcaaagtttgaaataactttgtttctctcagcctattatccatctgtaccattaccttccaccattcagaatcacgttgggaacactagccaagatgatattgctaccattctatctaaagtgccactggagaacaactacctgaagaatgtagtcaagcaaatttaccaagatctgtttcaggactgccatttctaccactagacccttggaccaccattggaacaaccaagcagaatgtacttgatattatttcagggtcccattgctgttcagcctttgtttttacgtcattacaagctgagtaaaattccttctgatgatgttatagttaatctgtatgttttttatatctctgcagaatgatggtgatgaagtctggatggtaggcctcatagcctactatcaacttactcatctttgtaccaaaggtttaagtaataggacacttaggaaaaatgtctcctaactaaactagtgctttctgctttagtacaagccctaaggattaacttaagtataagaagtgttatcactgacaagaacattagccattttcccataactagatagagctatgattttttaggttgcctggcttctgcctagcagatatttctggagtagaaatgtatctgtctacaaactattatcctttttctccgttactaaaatgctattaagagaaagtagggctgggtgtgagccaccacacccagcaatgttttcttaataagtatagtttttctagggaaagttaattcatttttgtctagtacatatatgtaaatatattaatgttgtttttgtgtttgtgatgtagtaaggagatgtacatagaaattcattgaggtatatagatactcatctgtctaggcagttcccaattttctgaagaatgttttacagcaaaattttctattttcttttattaaatagtgacacgtcaaacaatgtcacatccaaaacactagtttcatcaatttctagcagtaataatagacttgctgtaagtattgttttctgatgccatacccttgtcatacatattattaaatgaccaatattatgtatgaagtagacaaaaaaatttactcaaacttcattcaaatcctaattgtgataatttttgttttatatttaattataaaccaaaatacatttgcatttttaagctaatttgtctcaaaattttgctttatatttttggatcaggttaaagtcctgtggatcccctgaatgttattgtccctcttgattggtttttacttctgagctatacgtcaaaagacacataagcttcaaaagtcaagacaaacctcatttgccataaaaatcaagatatagatgttctgttccgtaaactccttgaaaaacattttaaagtcatcaatatgatctgtttcccatgaaacttaagttagctttcttattggagttatttcttttctgtaagtctgaaaagtagagattttgttttacgcattttagtaacctgcaacaaccaactctaaaaaagatttggcttgtaatgacggtctctgcttttttgggtttggagtacacaattgtaatatttacttagttatttgtgtttttctttgttcaaggtattgactagtttcataaattttttgaaagtttttctttcattggttggaaagcagattacattttgcactattaaaataagtttattactttaaaaaaaaaaaaaaaaaa

SEQ ID NO: 13118 - DNA, 8630 bp, Homo sapiens
agatttgaatacttcactgaggcgagccgggcgttgtgagcggactgctagaggcggctgtctgtttccgctctaaggaaactcagagcgtgtggaccccaaacaagtctgcgcaaaatttgtcgaggaggtttgccgcggcagaaaagttttcttcaaaaatggatggggtgtcttcagaggctaatgaagaaaatgacaatatagagagacctgttagaagacggcattcttcaatattgaaacccccaaggagtcctcttcaggacctcagaggtgggaatgaaagagttcaggaatccaatgctttgagaaataagaaaaactctcgtcgagtcagctttgcagatactataaaggtattccagacggagtctcatatgaaaatagtgagaaagtcagaaatggaagaaacagaaacaggagaaaatcttcttttgatacagaataagaaattagaagataattactgtgaaattactgggatgaacacattgctttctgctcccattcatacccagatgcaacagaaggagttttcaattatagaacatacccgtgaaaggaaacatgcaaatgaccagacagtcattttttcagatgaaaaccagatggacctgacatcaagtcacactgtaatgattaccaaaggccttttagataatcccataagtgaaaagtccaccaagatagataccacatcatttctagctaatttaaagcttcacaccgaggactcaagaatgaaaaaagaagtaaatttttccgtggatcaaaacacttcttcagaaaataaaatagatttcaatgacttcataaaaagattgaaaacaggaaaatgtagtgcttttcctgatgtgcctgataaagaaaattttgagatacctatttattccaaggaaccgaacagtgcctcttctacacatcaaatgcatgtatctcttaaggaagatgaaaataacagtaatattactaggctctttagagaaaaagatgatgggatgaatttcacccagtgtcatacagccaatattcagacattgattcccacatccagtgagaccaactcacgggaatctaaaggtaatgatattacaatttatggcaatgactttatggacttgacatttaaccacactttgcagatcttacctgcaacaggtaatttttctgaaatagaaaatcaaactcagaatgccatggatgtaacaacaggttatggaactaaagcttcaggaaataaaacagtttttaagagtaaacaaaatactgcttttcaagacctttccataaactctgcagacaaaatacatattaccagaagtcatattatgggggcagaaactcacatagtctcacagacttgtaatcaggatgccagaatattagccatgaccccagaatctatatattctaatccatctattcaaggttgtaagactgttttctattctagttgtaatgatgccatggaaatgaccaaatgtctctcaaatatgagagaggagaaaaatttgctaaagcatgacagtaattatgctaaaatgtattgcaatccagatgctatgtcttctctcacagagaaaactatttattccggagaggagaacatggacattaccaagagtcatacagttgcaatagataatcaaatttttaaacaagatcaatcaaatgtgcaaatagcagctgcaccaacacccgaaaaagaaatgatgctccaaaatcttatgaccacatcagaagatgggaaaatgaatgtaaattgtaactcagttcctcatgtatctaaggaaagaatacagcagagcctgtcaaatcctttgtctatttcattgactgatagaaagactgaactcttatcaggtgaaaatatggatttgactgaaagtcacacaagtaacttaggaagtcaggttcctcttgcagcttataatctagcaccggagagtaccagtgaatctcactctcagagcaaaagctcttcagatgaatgtgaagaaattaccaaaagtcgtaatgaaccatttcagcgatcagacataatagccaaaaacagcttaaccgacacctggaacaaagacaaagattgggttttgaagattttgccctaccttgataaagattctcctcagtcagctgattgtaatcaggagatagcaacaagccataatatagtctactgtggtggagttcttgataaacaaataactaatagaaatacagtatcatgggaacaatctttgttttctaccacaaagccattattttcatcaggacagttctctatgaaaaatcatgatactgctataagtagtcatacagtgaaatctgtactaggccagaattctaaactggctgagccactgaggaaaagtttaagcaatcccacacctgactattgccatgacaagatgattatatgttcagaggaagagcaaaatatggatctaacaaagagccacactgtcgtcattggatttggtccttctgaactacaagaacttggtaaaactaatttagaacacactactggccagctaacaacaatgaacagacagatagctgtaaaagttgaaaaatgtggtaaaagtcccatagaaaaaagtggagtgcttaaatctaactgtattatggatgtgttagaggacgaaagtgtacagaaacctaaatttccaaaggaaaagcaaaatgtcaaaatttggggaaggaaaagtgttggtggaccaaaaattgataagactattgtattttcagaagacgataagaatgatatggatatcactaagagttatacaatagaaataaaccatagacctttattagagaaacgtgattgtcatttggtgccattggcaggaacttctgaaactattttatatacatgtgggcaggatgacatggagatcactagaagtcacacaactgccttagaatgtaaaactgtctcaccagatgaaataactactaggcctatggacaaaactgtagtgtttgtagataatcatgttgaactagaaatgacagagtcccatactgttttcattgactaccaagaaaaggaaagaacagacagacctaactttgaactatcccaaaggaaaagcctaggaacaccaacagtgatatgtactcctactgaggagagtgttttctttccaggaaatggtgaaagtgaccgtctagtagcaaatgacagccagctaacccctctggaggaatggtctaataataggggccctgtagaggtagctgataacatggaattgtctaaatcagccacttgcaaaaacatcaaagatgtacaaagtcctggatttctgaatgaacctctatcaagcaaaagtcagagaagaaaaagccttaagctaaaaaatgacaagaccattgtattttcagagaatcataaaaatgatatggatattacccagagttgtatggtggaaatagataacgaaagtgccctggaggataaagaggacttccatttggcaggggcttctaaaactattttgtattcatgtgggcaggatgacatggagatcactaggagtcacacaactgccttagaatgtaaaactctcctgccaaatgaaatagctattaggcccatggacaaaaccgtattgttcacagataattacagtgatctggaagtcaccgattcccatactgttttcattgactgtcaagccacagagaaaatacttgaagaaaaccctaaatttggaataggaaaaggaaaaaacttgggtgtttcctttcctaaggataatagctgtgttcaagaaatcgctgaaaaacaagcactggctgtaggaaacaaaatagttcttcacaccgagcaaaagcaacaactctttgctgctactaatagaactactaatgaaatcatcaaatttcatagtgctgctatggatgaaaaggtcatagggaaagttgtagaccaggcctgtacattggaaaaagcgcaagttgaaagctgtcagttaaataatagagatagaagaaatgtggactttacaagtagtcatgcaactgctgtttgtggatccagtgataattattcctgtttaccaaatgttatttcctgtactgataatttggagggtagtgccatgctcttatgtgataaagatgaggaaaaagccaattattgcccagtgcaaaatgatcttgcttatgcaaatgattttgccagtgaatattacttggaatctgagggacagcctctctctgctccttgtcctttgttagagaaggaagaagttattcaaaccagtaccaaaggacagttagactgtgttataacactgcacaaagatcaagatctgattaaggatccacgaaatctattggctaatcaaactttagtatatagtcaagatctgggggagatgactaaacttaattcaaagcgagtatcttttaagcttccaaaggatcaaatgaaagtctatgttgatgacatttatgttattcctcagcctcatttctcaaccgaccaacctccattacctaaaaaaggacagagtagtatcaataaagaagaagtaatactgtctaaagctggaaataagagtttaaatattatagaaaattcctctgcacccatatgtgaaaacaagcccaaaatactcaatagtgaggaatggtttgctgcagcctgtaaaaaagaactgaaggaaaatattcaaacaactaactataatacagctctagatttccacagtaactcagacgtaactaagcaagtcattcaaactcatgtcaatgctggagaagcaccagatcctgtaattacatctaatgttccatgttttcatagtatcaaaccaaatctgaataatttgaatggaaaaactggagagtttttagcctttcaaactgttcatctaccaccccttccagagcaattacttgaattaggaaataaggcacacaatgatatgcatatagtgcaagctacagaaatacataatattaacataatctccagcaatgctaaagatagtagagatgaggaaaataaaaagtctcataatggagctgaaaccacctctctaccgccaaagacagtttttaaagataaagtaaggagatgttctttgggaatctttttgcctagattgcccaacaagagaaattgtagtgtcactggtattgatgacctggaacagattccagcagacacaactgatataaatcacttagaaactcagccggtctctagcaaagattcaggcattggatctgttgcaggtaaactgaacctaagtccttctcaatatataaatgaggaaaatcttcctgtatatcctgatgagatcaattcttcagactctattaacatagaaactgaggaaaaggccttgattgagacataccaaaaagagatttcaccatatgaaaataaaatgggaaaaacttgcaatagccaaaaaagaacgtgggtacaagaagaagaagatattcataaggagaaaaaaatcagaaaaaatgagattaagtttagtgatacgacacaagatcgggagatttttgatcaccatactgaagaggatatagataaaagtgctaacagtgtattgataaaaaacctgagcaggaccccatctagttgcagcagctctctggattcaatcaaggctgatgggacctctctggacttcagcacttaccgcagtagtcaaatggaatcacagtttctcagagatactatttgtgaagagagcttgagggagaaactccaagatgggagaataacaataagggagttctttatacttctccaggtccacatcttgatacagaaaccccgacagagcaatctcccaggcaattttactgtaaacacaccacctactccagaagacctgatgttaagtcaatatgtttaccgacccaagatacagatttatagagaagattgtgaggctcgtcgccaaaagattgaagaattaaagctttctgcatcgaaccaagataagctgttggttgatataaataagaacctgtgggaaaaaatgagacactgctctgacaaagagctgaaggcctttggaatttatcttaacaaaataaagtcatgttttaccaagatgactaaagtcttcactcaccaaggaaaagtggctctgtatggcaagctggtgcagtcagctcagaatgagagggagaaacttcaaataaagatagatgagatggataaaatacttaagaagatcgataactgcctcactgagatggaaacagaaactaagaatttggaggatgaagagaaaaacaatcctgtggaagaatgggattctgaaatgagagctgcagaaaaagaattggaacagctgaaaactgaagaagaggagcttcaaagaaatctcttagaactggaggtacaaaaagagcagacccttgctcaaatagactttatgcaaaaacaaagaaatagaactgaagagctactggatcagttgagcttgtctgagtgggatgtcgttgagtggagtgatgatcaagctgtattcacctttgtttatgacacgatacaactcaccatcacctttgaagagtcagttgttggtttccctttcctggacaagcgttataggaagattgttgatgtcaattttcaatctctgttagatgaggatcaagctcctccttcctcccttttagttcataagcttattttccagtacgttgaagaaaaggaatcctggaagaagacatgtacaacccagcatcagttacccaagatgcttgaagaattctcactggtagtgcaccattgcagactccttggagaggagattgagtatttaaagagatggggaccaaattataacctaatgaacatagatattaataataatgaattgagacttttattctctagctccgcagcatttgcaaagtttgaaataactttgtttctctcagcctattatccatctgtaccattaccttccaccattcagaatcacgttgggaacactagccaagatgatattgctaccattctatctaaagtgccactggagaacaactacctgaagaatgtagtcaagcaaatttaccaagatctgtttcaggactgccatttctaccactagacccttggaccaccattggaacaaccaagcagaatgtacttgatattatttcagggtcccattgctgttcagcctttgtttttacgtcattacaagctgagtaaaattccttctgatgatgttatagttaatctgtatgttttttatatctctgcagaatgatggtgatgaagtctggatggtaggcctcatagcctactatcaacttactcatctttgtaccaaaggtttaagtaataggacacttaggaaaaatgtctcctaactaaactagtgctttctgctttagtacaagccctaaggattaacttaagtataagaagtgttatcactgacaagaacattagccattttcccataactagatagagctatgattttttaggttgcctggcttctgcctagcagatatttctggagtagaaatgtatctgtctacaaactattatcctttttctccgttactaaaatgctattaagagaaagtagggctgggtgtgagccaccacacccagcaatgttttcttaataagtatagtttttctagggaaagttaattcatttttgtctagtacatatatgtaaatatattaatgttgtttttgtgtttgtgatgtagtaaggagatgtacatagaaattcattgaggtatatagatactcatctgtctaggcagttcccaattttctgaagaatgttttacagcaaaattttctattttcttttattaaatagtgacacgtcaaacaatgtcacatccaaaacactagtttcatcaatttctagcagtaataatagacttgctgtaagtattgttttctgatgccatacccttgtcatacatattattaaatgaccaatattatgtatgaagtagacaaaaaaatttactcaaacttcattcaaatcctaattgtgataatttttgttttatatttaattataaaccaaaatacatttgcatttttaagctaatttgtctcaaaattttgctttatatttttggatcaggttaaagtcctgtggatcccctgaatgttattgtccctcttgattggtttttacttctgagctatacgtcaaaagacacataagcttcaaaagtcaagacaaacctcatttgccataaaaatcaagatatagatgttctgttccgtaaactccttgaaaaacattttaaagtcatcaatatgatctgtttcccatgaaacttaagttagctttcttattggagttatttcttttctgtaagtctgaaaagtagagattttgttttacgcattttagtaacctgcaacaaccaactctaaaaaagatttggcttgtaatgacggtctctgcttttttgggtttggagtacacaattgtaatatttacttagttatttgtgtttttctttgttcaaggtattgactagtttcataaattttttgaaagtttttctttcattggttggaaagcagattacattttgcactattaaaataagtttattactttaaaaaaaaaaaaaaaaaa

SEQ ID NO: 13119 - DNA, 2344 bp, Homo sapiens
agcggagtctcgtccggagactggcagcggcggcggcggcggcggccggagctcgagccccagcggctgagggcgggcgggcgggcgcgggggagggaggggggccggtccgcgacgactccccggacggcgtttctcctccgagcggcgccggtttcggcttggggggggcggggtacagcccatccatgaccatgggcgacaagaagagcccgaccaggccaaaaagacaagcgaaacctgccacagacgaagggttttgggattgtagcgtctgcaccttcagaaacagtgctgaagcctttaaatgcagcatctgcgatgtgaggaaaggcacctccaccagaaaacctcggatcaattctcagctggtggcacaacaagtggcacaacagtatgccaccccaccaccccctaaaaaggagaagaaggagaaagttgaaaagcaggacaaagagaaacctgagaaagacaaggaaattagtcctagtgttaccaagaaaaataccaacaagaaaaccaaaccaaagtctgacattctgaaagatcctcctagtgaagcaaacagcatacagtctgcaaatgctacaacaaagaccagcgaaacaaatcacacctcaaggccccggctgaaaaacgtggacaggagcactgcacagcagttggcagtaactgtgggcaacgtcaccgtcattatcacagactttaaggaaaagactcgctcctcatcgacatcctcatccacagtgacctccagtgcagggtcagaacagcagaaccagagcagctcggggtcagagagcacagacaagggctcctcccgttcctccacgccaaagggcgacatgtcagcagtcaatgatgaatctttctgaaattgcacatggaattgtgaaaactatgaatcagggtatgaaattcaaaacctccacctgcccatgctgcttgcatccctggagaatcttctgtggacatcgacctcttagtgatgctgccaggataatttctgcttgccatgggcatctggccaccaaggaatttcgcaccctgacgattactcttgacacttttatgtattccattgttttatatgattttcctaacaatcatttataattggatgtgctcctgaatctactttttataaaaaaaaaaaaaaaatctgctgtgcacaattttccatgtacattacaactggttttttgtttttgttttgttgccggtggggagggctgggagggggagggaacttttatttattgtgttcacaaactccatcctttcagcatatccttttaagtttagttctttcttccagttatactatgtactatcagttttgatataactatatatatataaatataaaattatatataaagggttatttgaaaccaatccatggcaacgctggtgcttgatacactgtgaagtgaatacaacattgaacagttacagatctgggacagtcccttctatgaaagtgctgaaatttaattaaaatcagtcttacatgaagtatgttccaatccatgtgggaacttgactctctcatctgtctaaagagtactggacgatataaaaatatatattttttaaacaatgtgatctcaaatttaaagactgctccagatagcctgcatttgcaatggaataactgacaaatcacaagtggtttagttgggcagggctttgatcattcaaaagtaactaaagtagctccagaatgccaagtattcgtgtaaattacggttacatgttatcatttgctgttcttacataagcactcatgaaaatatggtattctgtaacttgaattccatccattttccagacgtctactcatgtctgaggtaaatctagaaattgtcttagttttaggattgaaacagtctataaactgtatttttggtccatccaggaagctagtcccttgtttctcctttctacatgacattgcagtggtggtttctgtaattaaaatttgtttgcctcatgtccctttgtctgataaaccttcactctaccgattcagttgtgagcattctttttttccttctcaaaacctactatgatttgttttactgaacaaaggttatcaaccacacatccagtcctgacatggagcttttcagtgtttggagacatttctcaatcccctgctgtggtaggaactccagtggtgaacggcttgcgcgcctgcagccagagttgcagggaaagctcgtacttactgcgagcagcatgtaatcttttttcttcctggacataaagatagcttgagtaaactgttctatttcattctcttcactctttttactgtcttgcaaaaaaaaaaaaaaaa

SEQ ID NO: 13120 - DNA, 4700 bp, Homo sapiens
ggccgcgggtcccggcggcggggtgggcgggggaggcagcgggtgacagatgtactcctctgacagctctcagtatcagcccagtggctccctgccattggctcagtgcaatggaccggcaacgccgctcactataataacactcatgcctgccagcagcagcaactccgagtgcaggcgccgagcgcgggggatgctgccgccgccgccgcttctgctgccgcgcgggcggctcccgcagccccgctccgcccggccaccgcgcgggcactgactcccgctcggttccgtttcgccggcccggccccctcctaggctggaatcctcccgcggggctcgtcgtcccgacgcgaatctgaggagaaacaggagcgagagactgaggggagagcgcggcgagcatgcggaggcgggggagcctcggcgctcaccacagaggggtgcagtgagccagtctccagaggacgtgccgggggtggctgcgtgccctcgtggcgggttcccagcccaccgtcgccggccccggcgcgctgcggctgtgggcgcggggtgcgtggaagcggcggctgcggcggaggaggcggcggctgccccatggagtgttactacattgtcatcagctccacgcatctcagcaacggacactttcgcaacatcaagggagttttccggggccctctcagcaagaacgggaacaaaactctggactatgctgagaaggaaaataccatagcaaaagctctggaagatctgaaggcaaatttttactgtgaactctgtgacaagcagtactataagcaccaggagtttgacaatcacattaattcatatgaccatgctcacaagcagaggctcaaggaactgaaacaaagggaatttgctcgaaatgtagcatctaaatccaggaaagatgaaagaaaacaggaaaaggcactccaacgcctgcacaagctggctgagctaagaaaggaaactgtatgtgctcctggaagtggccccatgttcaaatcaacaactgttactgtgagagaaaactgtaatgaaatttcccaacgagttgttgtggattcagttaataaccagcaagatttcaaatatactttgattcatagtgaagagaatactaaagatgctaccactgttgctgaagatccagaaagtgcaaataattatacagcaaaaaataaccaagttggggatcaagcccaggggattcacagacacaaaatcggcttttcttttgcatttccaaagaaagcgtccgtgaagctagagtcctcagctgcagccttctctgaatacagtgatgatgcctcagtgggaaaaggatttagcagaaaaagtagatttgtccccagtgcttgtcatcttcaacaatcttcaccaacagatgtgcttttgagttctgaggagaaaactaactcttttcatccaccagaggcaatgtgcagagacaaagaaactgttcaaactcaagagataaaagaagtctctagtgaaaaagatgcattattattaccttcattttgcaagtttcaacttcagttatcttctgatgcagataattgtcaaaattcagtcccattagcagatcaaataccactagagagtgttgttattaatgaagacatacctgttagtggtaacagttttgagttgttaggaaataaatccacagttcttgacatgtctaatgattgcatatctgtgcaagctaccacagaggaaaatgttaagcataacgaggcatccacaactgaggttgaaaataaaaatggtcccgagacattggccccttcaaatactgaagaggttaacataactatacataagaaaacaaatttctgcaaaagacaatgtgagccatttgtacctgtccttaacaaacacagatctacagttcttcagtggccatcagaaatgctggtttatacaactacgaaaccatcaatttcctatagctgtaatcctctatgttttgacttcaagtctactaaagtaaataataatctagataaaaataagccagacttaaaagatctttgttctcagcagaagcaggaagacatttgcatgggaccactttcagattacaaggatgtatctacagaaggactcactgattatgaaattggaagtagcaaaaataaatgcagccaagtcactcctcttttggctgatgatattctctccagtagttgtgattctggaaaaaatgagaacacaggtcagaggtataaaaacatttcctgtaagatcagagaaacagaaaagtataattttactaaaagtcaaataaaacaggacactctagatgaaaaatacaacaaaataaggttgaaagagacccatgaatactggttccataaaagtagaagaaagaaaaaaagaaaaaagttatgtcagcatcatcatatggagaaaaccaaagaatcagaaactcgctgcaaaatggaagcagagaatagttacactgaaaatgctgggaaatatctattggaaccaatttcagaaaagcagtatttagctgcagagcaattattagactcacatcagttacttgataaaaggcccaaatcagaatccatatccttaagtgacaatgaagaaatgtgtaaaacatggaatactgaatacaacacttatgatactatcagttctaaaaaccactgtaaaaagaacacaatacttttaaatggacaatcaaatgcaacaatgatacattctgggaaacataatttaacatattctagaacttactgttgttggaaaaccaaaatgtcaagctgtagtcaggatcacagaagcttagttcttcaaaatgatatgaaacacatgagtcagaatcaggctgttaaaagaggttacaattctgtcatgaatgaatcagaaagattctatcgaaaacgtagacaacattcacattcttattcttcagatgaaagtttaaatcgacagaatcatttaccagaagaatttttgaggccaccaagtacttcagttgctccctgcaagcctaaaaagaaacggaggcgaaaaagaggcagattccaccccggatttgaaactttagaactcaaagaaaatacagattatcccgtgaaagacaattcttccttaaatcctctggataggttaataagtgaagacaaaaaagagaaaatgaaaccacaagaagttgcaaaaatcgaaaggaactcagaacaaacaaaccaattaagaaacaaactgtctttccaccctaacaatctccttccttctgaaaccaatggtgaaactgagcatttagaaatggagaccacttctggtgaattgtcagatgtttccaatgatcccaccacatctgtctgtgtagctagtgccccaacaaaagaagcaattgacaataccctgcttgaacacaaagaaagaagtgagaatataaatcttaatgaaaagcaaattccttttcaggtgcctaatattgaaaggaactttagacagtcacagcctaaatcctatctttgccattatgaactggctgaggcccttccacaaggaaagatgaatgagacaccaactgagtggctgcgttataattcaggaatccttaacacacaaccaccattaccattcaaagaagcacatgtcagtggtcatacttttgtaacagctgagcaaatcctggctccattagctttaccagagcaagcattattgatcccactagaaaaccatgacaaattcaaaaatgtaccatgtgaggtctaccagcacattctgcagccaaacatgctggccaacaaggttaaatttacctttcctccagctgccctcccaccccctagcacacctctgcagcctttgcctttgcagcagtccttatgttctacctctgtaaccactatccatcacactgttttgcagcagcacgctgcagctgctgcagctgcagctgcagccgcagctgcaggaacctttaaagtgcttcagccacaccaacagtttctttcccaaatcccagctctcaccagaacctcattacctcagctctcagtaggaccagtaggaccgaggctttgtcctgggaaccagccaacttttgttgctcctcctcagatgccaatcattccagcttccgttcttcatcctagccatctggctttcccatctttaccccatgcactctttccttcactgctttccccacaccctactgtcatccctttgcaacctctcttctagtcatcaccataatgggaaaaaaatactcttgtgaaaactattgctatatgcgttaagtgttcatctatgtgggtacatggctatttaactggtggaaataaactggccgatacatggcgtcattggtttgaaatcatttactgtaagtgcaatgatgcaaataaatccctaagtttctgatatataatattattaaagcactgaatagtttgaaaatcaatacaatatatgctatatattaaaatgatgtcttaagagtatgtataatgtacataaaatatatttatagtactctaatttatgttgtaaagtatgctcccttggtttttcttaatctttgtgtatttgcacctatttaatgtttagacaaagctgatggcactatgttttgtatcatgttccttgaaactgtaaattcagtgaaaaatatctcttgcaataaatttttgttaactatttaaaaaaaaaaaaaaaaa

SEQ ID NO: 13121 - DNA, 4185 bp, Homo sapiens
cggccgcgagcgcagtggtgtggagcgcgccgggtcccggagccggctgtctgagggatggacgagacgagcccactagtgtcccccgagcgggcccaacccccggactacaccttcccgtcgggctcgggcgctcactttccgcaggtgcccgggggcgcggtccgagtggcggcggcggccggctcgggcccctctccgccaggctcgccgggccacgaccgcgagcggcagccactgttggatcgggcccggggcgcggcggcccagggccagacccaaaccgtggcggcgcaggcccaggctctggccgctcaggccgcggcggcagcccacgccgctcaggcccaccgcgagcggaacgagttcccggaggatcctgagttcgaggcggtggtgcggcaggccgagctggccatcgagcgctgcatctttcccgagcgcatctaccagggctccagcggaagctacttcgtcaaggaccctcaggggaggatcattgctgtcttcaaacccaagaatgaagagccctatgggcatcttaatcctaagtggaccaagtggctgcagaagctgtgctgtccttgctgctttggccgtgactgccttgtccttaaccagggctatctctcagaagcaggggccagcctggtggaccaaaaactggaactcaacattgttccccgtacaaaggtagtatacctggccagtgagaccttcaactatagtgccattgaccgagtgaagtccaggggcaagcggcttgcactagagaaagtgccaaaagttggacagcggtttaaccgcatcgggctaccaccaaaggttggttcattccagctctttgttgaaggctacaaagatgcagactattggctgcggcgttttgaagcagaacctcttcctgagaacactaaccggcaactactgctccagtttgagcggttggtggtgctggattacatcatccgcaacactgatcgaggcaatgacaactggctgattaaatatgactgtccaatggatagttctagctctcgggacacagactgggtggtggtgaaggagcctgttatcaaggtggctgccatagacaatgggctggccttcccactgaagcatcctgactcctggagggcatatcctttttactgggcctggttgccccaggcgaaagtcccattttctcaggagatcaaagatctgatccttccaaagatatcggaccctaacttcgtcaaggacttggaagaggacctatatgaactcttcaagaaagatcctggtttcgacaggggccagttccataagcagattgctgtcatgcggggccagatcttaaatctgacccaggccttgaaagacaacaagagtcccctgcacctcgtccagatgccacctgtgattgtcgagacggcccgttcccaccagcggtcttctagcgagtcctacacacagagctttcagagccggaagcccttcttttcatggtggtagctccagaggcaggcagaggaaatattgtcagagactggtgggaggaagcctggggagtggggtgcaggaaaagccagagaagccggtggagagcagcacctttaagagccctctctctctgcttgccaccctgctcagagctttccacccacagggagaagcacaatcaggaacagtgagtgctcctcgcccttctgatgtgggggaggctggagctccatgcacgtagtccagatgcctgggaaggaacatctcccttccagcatctgctggtagcaggctgggacagtcccttccttccctgaaaccctgctctattgcaattccctattatattctgcatcagaaaaacaaacaaaacaaaaacaactttaaatgcttgtagcagaaccccgggtcatctcatgtcagaaacctttaatccaggcctaaatttgcatagacctgacattcagctgccttgcagttgcttcctcccatgagccaaggtggtgtcagagggcaactggatgactcgcagtaccacagcactgggacagacagaagccacacctttcttttgggtttttgccaagcctcctccatctcccatcagtgctgtgggctggctgcaagcctcgaaacagttctcctggaagggaggtttttgctttacccccgccagcacttccgcacacaatcatagagaacctctctgctctctgctggcctacagcttgtctgtttctcaagcagaggcaggaagagctagtcttagcatttatattttaataggaagttgactcccagcatgtaaaagtgatccacgcagccggagtgtatgccgggagctaagtggtctatgggtgaacatatcccaccttgcttcctgagtccttggtcccaatcttctcatttgttcctctcgttttaaattttttccccccaactcttttgatgtaagagttcagtttgtcttcgggagtgggtctctgcaagggctctgggatgagtcttggcttccaagaggacaggctattaggttcttggacttttttctgtgctaccgctgctgcttggtggaagtaacaggacgtggattctgcctcataagtggcagtttcccttttctctctgacttgtcctaggccgatttctctatggcttccctgagaaaggtgaggcccaaaggagagaggccttcaaactgtcccaggtcctgcgcagctcagtgcgtatcttcttgcttccatgtgtcttttcccctgctgcctcactccccacccccacttgccaggtgtttgagccatttctacaccaaagcaaagtacggcctcaggagggagtaaaaagggtgccatctgtgtctggaggggcagctgtgttcatgccctgtgctactggacatttcacaattctggcaccttgcgattggtcagtcaacctcagaaagtaactatcttgaaggtttgaaaaacaaccaaagaaagggagtgaggactatggctgcatgtcctctgcttgcccggctgcagagcagagatgtgcagccctctggtcagctggtccaggctggtccccgccggtccccttccagtccagccaccaagagtccacttgtcccgggcttccacctggctgacaggaagaatttctgagagctggatgtgcatgccctgtggacgaaggtacagctcgcctgcctgccccaatcccagccccgacaatcacatgcagctgactcggacactggccttgggaacaatgttcgagagaacacttgccccttgactgtaggagccagaaggggacccaggtgtgcatagctctctgtagacatttttacccaaacctgttggtaaagtgcccatctggtgctcaagagagcctgggggtctaacagggagcccggctgcctcacctggccacagcctccacaccagatctccacattgtcttgatccagaccagctctgtgatcagaaggaaattgggtccagtgtaggagagagctggtcctgggcctggcaggcaagagtgtgggcatcctttcctggcctttctccactctccctcaagcctgtgctcaggttgccttgaatgtggactctggaagagccaggggcccagaatgccgggggaggcttctgagtggcactcatggaacaccgtccctctgccagccataggccctgcctccagtgtcagggaatggaggctgggctgcgagagtgttgctgccccctgtgtcattcttctaatccaatgtagaaattgtacgtaatgtatttaaatcaacgcaaatgtatgaataacaaatacagttctgaccttttttgtccagtttctttgggggaaggaagacaaagaaggtaggaacggaattttgagggcaaagaaacctgtgtttccatggaattgctgagacgtggctcctggggctatttctccctaataaaggatgatccaggtcctcatttccaaagtcccaatgctctgaaaaccaaaagtattttcataacccatttgaaaccaaacctgacctgaacttacactgataggaagctatgggtaattatgatgtgttccttttagtgtgattctttgttgcagaaatgtcaatatattttatgacatggttccctactagggattatacagtatttgctgactacttcctaagagccaaaaataaaaaatctgaattcc

SEQ ID NO: 13122 - DNA, 1415 bp, Homo sapiens
gggcgctgagaggcgagcgtgagcccagcgacaggagagtgagctcaccacgcgcagcgccatgaccagcaagggtcccgaggaggagcacccatcggtgacgctcttccgccagtacctgcgtatccgcactgtccagcccaagcctgactatggagctgctgtggctttctttgaggagacagcccgccagctgggcctgggctgtcagaaagtagaggtggcacctggctatgtggtgaccgtgttgacctggccaggcaccaaccctacactctcctccatcttgctcaactcccacacggatgtggtgcctgtcttcaaggaacattggagtcacgacccctttgaggccttcaaggattctgagggctacatctatgccaggggtgcccaggacatgaagtgcgtcagcatccagtacctggaagctgtgaggaggctgaaggtggagggccaccggttccccagaaccatccacatgacctttgtgcctgatgaggaggttgggggtcaccaaggcatggagctgttcgtgcagcggcctgagttccacgccctgagggcaggctttgccctggatgagggcatagccaatcccactgatgccttcactgtcttttatagtgagcggagtccctggtgggtgcgggttaccagcactgggaggccaggccatgcctcacgcttcatggaggacacagcagcagagaagctgcacaaggttgtaaactccatcctggcattccgggagaaggaatggcagaggctgcagtcaaacccccacctgaaagaggggtccgtgacctccgtgaacctgactaagctagagggtggcgtggcctataacgtgatacctgccaccatgagcgccagctttgacttccgtgtggcaccggatgtggacttcaaggcttttgaggagcagctgcagagctggtgccaggcagctggcgagggggtcaccctagagtttgctcagaagtggatgcacccccaagtgacacctactgatgactcaaacccttggtgggcagcttttagccgggtctgcaaggatatgaacctcactctggagcctgagatcatgcctgctgccactgacaaccgctatatccgcgcggtgggggtcccagctctaggcttctcacccatgaaccgcacacctgtgctgctgcacgaccacgatgaacggctgcatgaggctgtgttcctccgtggggtggacatatatacacgcctgctgcctgcccttgccagtgtgcctgccctgcccagtgacagctgagccctggaactcctaaacctttgcccctggggcttccatcccaaccagtgccaaggacctcctcttcccccttccaaataataaagtctatggacagggctgtctctgaagtactaacacaaggaca

SEQ ID NO: 13123 - DNA, 8972 bp, Homo sapiens
cagctgccacttttcaccgttagaagtagagctttttccagacctcctaccttttagtctactttgaaaggtgaaagaaagaacatcgtttcaggaataaaaatgcacagtagtagttatagttaccgtagcagtgattctgtgtttagtaacactaccagcactcgaaccagtcttgattcaaatgaaaatcttctcttggttcattgtggtccaacactgatcaactcttgcattagcttcggcagtgaatcctttgatggacacaggttagaaatgttgcaacagattgccaacagagttcagagggacagtgtcatctgtgaagacaaactgattcttgctggaaatgctcttcagtctgattctaaaagattagaatcaggagtgcagtttcagaatgaagcagaaattgctgggtatatacttgaatgtgagaaccttttacgccagcatgtaattgatgtacagattcttattgatggaaaatactaccaggcagatcaattggtacagagggttgcaaaactgcgtgacgaaattatggccttaaggaacgaatgttcttctgtgtacagcaaaggacgcatactgacaacagaacagacaaagctcatgatatcaggaatcactcaaagtttaaactcaggatttgcacagaccttacaccctagtctgacctcagggctgacccagagtttaacaccttccctaacctcttctagtatgacttctggcctgtcatcagggatgacttcccgcctgactccatctgtcactccagcttatacacctggtttcccatcaggattagttccaaatttcagttcaggagtagagccaaattcattgcaaactttgaagttgatgcagatccgaaaaccccttctaaagtcttctttgctggatcaaaatttaacagaagaagaaatcaatatgaaatttgttcaggatcttttgaattgggttgatgagatgcaggtacaactggaccgcactgagtggggctcagatttgccaagtgttgaaagccatttagaaaatcataaaaatgttcatagagctattgaagaatttgaatctagtctcaaagaagctaaaatcagtgagattcaaatgacagcacctcttaaactgacttatgcagaaaagttgcacagattagagagtcagtatgcaaaactcttgaatacatccaggaatcaagaacggcaccttgatacactccataattttgtaagtcgtgcgactaatgaacttatttggttgaatgaaaaagaagaggaggaagttgcttatgactggagtgagagaaacaccaacatagctaggaaaaaagattatcatgctgaattaatgagagaacttgatcaaaaggaagaaaatattaaatcagttcaggagatagcagagcagctacttctagaaaatcatccagcccggttaactattgaggcctacagagcggcaatgcagacgcagtggagctggatcttacagctctgccagtgtgtggagcagcacataaaggagaacacagcgtatttcgagtttttcaatgatgccaaagaagctactgattacttaaggaatctaaaagatgccattcagcggaagtacagctgtgatagatcaagcagcattcacaagctagaagaccttgttcaggaatcaatggaagagaaagaagaacttctgcagtacaaaagcactatagcaaacctaatgggaaaagcaaaaacaataattcaactgaagccaaggaattctgactgtccactcaaaacttctattccgatcaaagctatctgtgactacagacaaattgagataaccatttacaaagacgatgaatgtgttttggcgaataactctcatcgtgctaaatggaaggtcattagtcctactgggaatgaggctatggtcccatctgtgtgcttcaccgttcctccaccaaacaaagaagcggtggaccttgccaacagaattgagcaacagtatcagaatgtcctgactctttggcatgagtctcacataaacatgaagagtgtagtatcctggcattatctcatcaatgaaattgatagaattcgagctagcaatgtggcttcaataaagacaatgctacctggtgaacatcagcaagttctaagtaatctacaatctcgttttgaagattttctggaagatagccaggaatcccaagtcttttcaggctcagatataacacaactggaaaaggaggttaatgtatgtaagcagtattatcaagaacttcttaaatctgcagaaagagaggagcaagaggaatcagtttataatctctacatctctgaagttcgaaacattagacttcggttagagaactgtgaagatcggctgattagacagattcgaactcccctggaaagagatgatttgcatgaaagtgtgttcagaatcacagaacaggagaaactaaagaaagagctggaacgacttaaagatgatttgggaacaatcacaaataagtgtgaggagtttttcagtcaagcagcagcctcttcatcagtccctaccctacgatcagagcttaatgtggtccttcagaacatgaaccaagtctattctatgtcttccacttacatagataagttgaaaactgttaacttggtgttaaaaaacactcaagctgcagaagccctcgtaaaactctatgaaactaaactgtgtgaagaagaagcagttatagctgacaagaataatattgagaatctaataagtactttaaagcaatggagatctgaagtagatgaaaagagacaggtattccatgccttagaggatgagttgcagaaagctaaagccatcagtgatgaaatgtttaaaacgtataaagaacgggaccttgattttgactggcacaaagaaaaagcagatcaattagttgaaaggtggcaaaatgttcatgtgcagattgacaacaggttacgggacttagagggcattggcaaatcactgaagtactacagagacacttaccatcctttagatgattggatccagcaggttgaaactactcagagaaagattcaggaaaatcagcctgaaaatagtaaaaccctagccacacagttgaatcaacagaagatgctggtgtccgaaatagaaatgaaacagagcaaaatggacgagtgtcaaaaatatgcagaacagtactcagctacagtgaaggactatgaattacaaacaatgacctaccgggccatggtagattcacaacaaaaatctccagtgaaacgccgaagaatgcagagttcagcagatctcattattcaagagttcatggacctaaggactcgatatactgccctggtcactctcatgacacaatatattaaatttgctggtgattcattgaagaggctggaagaggaggagattaaaaggtgtaaggagacttctgaacatggggcatattcagatctgcttcagcgtcagaaggcaacagtgcttgagaatagcaaacttacaggaaagataagtgagttggaaagaatggtagctgaactaaagaaacaaaagtcccgagtagaggaagaacttccgaaggtcagggaggctgcagaaaatgaattgagaaagcagcagagaaatgtagaagatatctctctgcagaagataagggctgaaagtgaagccaagcagtaccgcagggaacttgaaaccattgtgagagagaaggaagccgctgaaagagaactggagcgggtgaggcagctcaccatagaggccgaggctaaaagagctgccgtggaagagaacctcctgaattttcgcaatcagttggaggaaaacacctttaccagacgaacactggaagatcatcttaaaagaaaagatttaagtctcaatgatttggagcaacaaaaaaataaattaatggaagaattaagaagaaagagagacaatgaggaagaactcttgaagctgataaagcagatggaaaaagaccttgcatttcagaaacaggtagcagagaaacagttgaaagaaaagcagaaaattgaattggaagcaagaagaaaaataactgaaattcagtatacatgtagagaaaatgcattgccagtgtgtccgatcacacaggctacatcatgcagggcagtaacgggtctccagcaagaacatgacaagcagaaagcagaagaactcaaacagcaggtagatgaactaacagctgccaatagaaaggctgaacaagacatgagagagctgacatatgaacttaatgccctccagcttgaaaaaacgtcatctgaggaaaaggctcgtttgctaaaagataaactagatgaaacaaataatacactcagatgccttaagttggagctggaaaggaaggatcaggcggagaaagggtattctcaacaactcagagagcttggtaggcaattgaatcaaaccacaggtaaagctgaagaagccatgcaagaagctagtgatctcaagaaaataaagcgcaattatcagttagaattagaatctcttaatcatgaaaaagggaaactacaaagagaagtagacagaatcacaagggcacatgctgtagctgagaagaatattcagcatttaaattcacaaattcattcttttcgagatgagaaagaattagaaagactacaaatctgccagagaaaatcagatcatctaaaagaacaatttgagaaaagccatgagcagttgcttcaaaatatcaaagctgaaaaagaaaataatgataaaatccaaaggctcaatgaagaattggagaaaagtaatgagtgtgcagagatgctaaaacaaaaagtagaggagcttactaggcagaataatgaaaccaaattaatgatgcagagaattcaggcagaatcagagaatatagttttagagaaacaaactatccagcaaagatgtgaagcactgaaaattcaggcagatggttttaaagatcagctacgcagcacaaatgaacacttgcataaacagacaaaaacagagcaggattttcaaagaaaaattaaatgcctagaagaagacctggcgaaaagtcaaaatttggtaagtgaatttaagcaaaagtgtgaccaacagaacattatcatccagaataccaagaaagaagttagaaatctgaatgcggaactgaatgcttccaaagaagagaagcgacgcggggagcagaaagttcagctacaacaagctcaggtgcaagagttaaataacaggttgaaaaaagtacaagacgaattacacttaaagaccatagaggagcagatgacccacagaaagatggttctgtttcaggaagaatctggtaaattcaaacaatcagcagaggagtttcggaagaagatggaaaaattaatggagtccaaagtcatcactgaaaatgatatttcaggcattaggcttgactttgtgtctcttcaacaagaaaactctagagcccaagaaaatgctaagctttgtgaaacaaacattaaagaacttgaaagacagcttcaacagtatcgtgaacaaatgcagcaagggcagcacatggaagcaaatcattaccaaaaatgtcagaaacttgaggatgagctgatagcccagaagcgtgaggttgaaaacctgaagcaaaaaatggaccaacagatcaaagagcatgaacatcaattagttttgctccagtgtgaaattcaaaaaaagagcacagccaaagactgtaccttcaaaccagattttgagatgacagtgaaggagtgccagcactctggagagctgtcctctagaaacactggacaccttcacccaacacccagatcccctctgttgagatggactcaagaaccacagccattggaagagaagtggcagcatcgggttgttgaacagatacccaaagaagtccaattccagccaccaggggctccactcgagaaagagaaaagccagcagtgttactctgagtacttttctcagacaagcaccgagttacagataacttttgatgagacaaaccccattacaagactgtctgaaattgagaagataagagaccaagccctgaacaattctagaccacctgttaggtatcaagataacgcatgtgaaatggaactggtgaaggttttgacacccttagagatagctaagaacaagcagtatgatatgcatacagaagtcacaacattaaaacaagaaaagaacccagttcccagtgctgaagaatggatgcttgaagggtgcagagcatctggtggactcaagaaaggggatttccttaagaagggcttagaaccagagaccttccagaactttgatggtgatcatgcatgttcagtcagggatgatgaatttaaattccaagggcttaggcacactgtgactgccaggcagttggtggaagctaagcttctggacatgagaacaattgagcagctgcgactcggtcttaagactgttgaagaagttcagaaaactcttaacaagtttctgacgaaagccacctcaattgcagggctttacctagaatctacaaaagaaaagatttcatttgcctcagcggccgagagaatcataatagacaaaatggtggctttggcatttttagaagctcaggctgcaacaggttttataattgatcccatttcaggtcagacatattctgttgaagatgcagttcttaaaggagttgttgaccccgaattcagaattaggcttcttgaggcagagaaggcagctgtgggatattcttattcttctaagacattgtcagtgtttcaagctatggaaaatagaatgcttgacagacaaaaaggtaaacatatcttggaagcccagattgccagtgggggtgtcattgaccctgtgagaggcattcgtgttcctccagaaattgctctgcagcaggggttgttgaataatgccatcttacagtttttacatgagccatccagcaacacaagagttttccctaatcccaataacaagcaagctctgtattactcagaattactgcgaatgtgtgtatttgatgtagagtcccaatgctttctgtttccatttggggagaggaacatttccaatctcaatgtcaagaaaacacatagaatttctgtagtagatactaaaacaggatcagaattgaccgtgtatgaggctttccagagaaacctgattgagaaaagtatatatcttgaactttcagggcagcaatatcagtggaaggaagctatgttttttgaatcctatgggcattcttctcatatgctgactgatactaaaacaggattacacttcaatattaatgaggctatagagcagggaacaattgacaaagccttggtcaaaaagtatcaggaaggcctcatcacacttacagaacttgctgattctttgctgagccggttagtccccaagaaagatttgcacagtcctgttgcagggtattggctgactgctagtggggaaaggatctctgtactaaaagcctcccgtagaaatttggttgatcggattactgccctccgatgccttgaagcccaagtcagtacagggggcataattgatcctcttactggcaaaaagtaccgggtggccgaagctttgcatagaggcctggttgatgaggggtttgcccagcagctgcgacagtgtgaattagtaatcacagggattggccatcccatcactaacaaaatgatgtcagtggtggaagctgtgaatgcaaatattataaataaggaaatgggaatccgatgtttggaatttcagtacttgacaggagggttgatagagccacaggttcactctcggttatcaatagaagaggctctccaagtaggtattatagatgtcctcattgccacaaaactcaaagatcaaaagtcatatgtcagaaatataatatgccctcagacaaaaagaaagttgacatataaagaagccttagaaaaagctgattttgatttccacacaggacttaaactgttagaagtatctgagcccctgatgacaggaatttctagcctctactattcttcctaatgggacatgtttaaataactgtgcaaggggtgatgcaggctggttcatgccactttttcagagtatgatgatatcggctacatatgcagtctgtgaattatgtaacatactctatttcttgagggctgcaaattgctaagtgctcaaaatagagtaagttttaaattgaaaattacataagatttaatgcccttcaaatggtttcatttagccttgagaatggttttttgaaacttggccacactaaaatgtttttttttttacgtagaatgtgggataaacttgatgaactccaagttcacagtgtcatttcttcagaactccccttcattgaatagtgatcatttattaaatgataaattgcactcgctgaaagagcacgtcatgaagcaccatggaatcaaagagaaagatataaattcgttcccacagccttcaagctgcagtgttttagattgcttcaaaaaatgaaaaagttttgcctttttctgtatatagtgaccttctttgcatattaaaatgtttaccacaatgtcccatttctagttaagtcttcgcacttgaaagctaacattatgaatattatgtgttggaggaggggaaggattttcttcattctgtgtattttccttacatgtacagtagacgttctctattctatcagccttctatggtacctttttgtcaggacaattaggattgtaatgctaatgcaaaggcagcaattcaaagatcttctagtgcctcatgaataaagttgagatttaaaatttgtaacattgatggaacagctgggaggttagaccaatcattaaggaatgtatgccatagctttctttgctaccataaacattttggaggtgcatctgctatgtgacatggtaaatatggttaagtgaatgaataaaatgttttagtaa

SEQ ID NO: 13124 - DNA, 10342 bp, Homo sapiens
catcatgcagcaggtcaaacaaggcatctcctagtattgcatcctacagatgtgctgtaaacatcaaaagaagacggtgggatcaggagatgctgttttggaaagaagtgaggtttagacttctccatgttaaccatgagcgtgacactttcccccctgaggtcacaggacctggatcccatggctactgatgcttcacccatggccatcaacatgacacccactgtggagcagggtgagggagaagaggcaatgaaggacatggactctgaccagcagtatgaaaagccacccccactacacacaggggctgactggaagattgtcctccacttacctgaaattgagacctggctccggatgacctcagagagggtccgagacctaacctattcagtccagcaggattcggacagcaagcatgtggatgtacatctagttcaactaaaggacatttgtgaagatatttctgatcatgttgagcaaatccatgccctccttgaaacagagttctccctaaagctgctgtcttactctgtcaacgtgatagtggacatccacgcagtgcagctcctctggcaccagcttcgagtctcagtgctggttctgcgggagcgcattctgcaaggtctgcaggacgccaatggcaactacactaggcagacggacattctgcaagctttctctgaagagacaaaagagggccggcttgattctctaacagaagtggatgactcaggacaattaaccatcaaatgttctcaaaattacttgtctctggattgtggcattactgcattcgaactgtctgactacagtccaagtgaggatttgctcagtgggctaggtgacatgacctctagccaagtcaaaaccaaaccctttgactcttggagctacagtgagatggaaaaggagtttcctgagcttatccgaagtgttggtttacttacggtagctgctgactctatctctaccaatggcagtgaagcagttactgaggaggtatctcaagtatctctctcagtagacgacaaaggtggatgtgaggaagacaatgcttctgcagtcgaagagcaaccaggcttaacactgggggtgtcatcatcttcaggagaagctctgacaaatgctgctcaaccctcctctgagactgtgcagcaagaatccagttcctcctcccatcatgatgcaaagaatcagcagcctgttccttgtgaaaatgcaacccccaaacgaaccatcagagattgctttaattataacgaggactctcccacgcagcctacattgccaaaaagaggactttttcttaaagaggaaacttttaagaatgatctgaaaggcaatggtggaaagaggcaaatggttgatctaaagcctgagatgagcagaagcaccccttcgctagtagatcctcctgacagatccaaactttgcctggtattgcagtcttcttaccccaacagcccttctgctgccagccagtcttatgagtgtttacacaaggtggggaatgggaaccttgaaaacacagtcaaatttcacattaaagaaatttcttccagcctgggaaggcttaacgactgctataaagagaaatctcgacttaaaaagccacacaagacctcagaagaggtgcctccatgccgaacacctaaacgggggactggttcaggcaaacaagctaaaaatacaaagagctcagcagtgccaaatggagagctttcttatacttccaaggccatagaggggccacaaacaaattctgcttccacatcctcacttgagccttgtaatcagagaagttggaatgccaaattgcaattgcagtcagaaacatccagttcaccagcttttactcagagcagtgaatcctctgttggctcagacaacatcatgtctccggtgccacttctttcaaaacacaaaagcaaaaaaggtcaagcctcctctccaagtcacgtcactaggaatggtgaggttgtggaggcctggtatggctctgatgaatacctagcactgccctctcaccttaagcagacagaagtattggctttgaagttggaaaacctaacaaagcttctgcctcagaaacccagaggagaaaccatccagaatattgatgactgggaactgtctgaaatgaattcagattctgaaatctatccaacctatcatgtcaaaaagaagcatacaaggctaggcagggtgtctccaagctcatctagtgacatagcctcttcactaggggagagcattgaatctgggcccctgagtgacattctttctgatgaggagtccagtatgcctctcgctggcatgaaaaagtatgctgatgagaagtcagaaagagcttcatcctctgagaaaaatgagagccattctgccactaaatcagctttaattcagaaactgatgcaagatattcagcaccaagacaactatgaagccatatgggaaaaaatagaggggtttgtaaacaaactggatgaattcattcaatggttaaatgaagccatggaaactacagagaattggactccccctaaagcagagatggatgaccttaaactgtatctggagacacacttgagttttaagttgaatgtagacagtcattgtgctctcaaggaagctgtggaggaggaaggacaccaacttcttgagcttattgcatctcacaaagcaggactgaaggacatgctgcggatgattgcaagtcaatggaaggagctgcagaggcaaatcaaacggcagcacagctggattctcagggctctggataccatcaaagccgagatactggctactgatgtgtctgtggaggatgaggaagggactggaagccccaaggctgaggttcaactatgctacctggaagcacaaagagatgctgttgagcagatgtccctcaagctgtacagcgagcagtataccagcagcagcaagcgaaaggaagagtttgctgatatgtcaaaagttcattcagtgggaagcaatgggcttctggactttgattcagaatatcaggagctctgggattggctgattgacatggagtcccttgtgatggacagccacgacctgatgatgtcagaggagcagcagcagcatctttacaagcgatacagtgtggaaatgtccatcagacacctgaaaaagacggagctgcttagtaaggttgaagctttgaagaaaggtggcgttttactaccaaatgatctccttgaaaaagtggattcaattaatgaaaaatgggaactgcttgggaaaaccctaggagagaagatccaggacacaatggcagggcacagtgggtcgagtccacgtgacctgctctctcctgaaagtggaagcctggtaaggcagctggaggtcaggatcaaagaactgaaaggatggctaagagatacagagcttttcatcttcaattcctgtctgagacaagaaaaggaaggaacaatgaatactgagaaacaactgcaatactttaagtccctctgtcgtgaaatcaagcaacgacgtcgaggagttgcctccattctgcgactatgccagcatcttttggatgaccgggagacttgcaatctgaatgcagaccaccagcccatgcagctgatcattgtaaatcttgaaagaaggtgggaagccattgtcatgcaagccgtccagtggcaaacacgtctacaaaagaagatgggaaaggaatctgagactttgaatgtgattgatcctggcttgatggacctaaatgggatgagtgaggatgccctggaatgggatgaaatggacataagtaacaagttaattagtttgaatgaggaatcaaatgaccttgatcaagaactccaacctgttatcccttccttgaagcttggagagacaagtaatgaggaccctggttatgacgaggaggctgataaccatgggggatctcagtatgcctcaaatattactgccccctctagtccacacatttaccaggtgtacagcctccacaatgttgaactctatgaggacaaccacatgccatttctgaaaaacaatccaaaggtcactggcatgacacagcctaatgttttaactaagagtctcagtaaagactcttcattttcatctaccaaatctttgccagatcttctaggtggttccaatttggtaaagccctgcgcatgtcatggaggagacatgagccagaattcaggcagtgagagtggaattgtcagtgaaggagacacagaaaccactaccaactctgaaatgtgcttgctcaatgcagtggatgggtccccaagtaaccttgaaactgaacatctggacccacaaatgggagatgcagttaacgtgttaaagcaaaaatttacagatgagggggaaagcattaagcttccaaatagctctcagtcgtccatttcaccagtgggttgtgtaaatggaaaagttggagatttaaacagtattaccaaacatacccctgactgtttgggagaagaattacaaggaaaacatgatgtgtttacattttatgattactcatacctccaaggctcaaaactcaaattaccaatgataatgaaacagtcacaaagcgaaaaagcgcatgtggaggatcccctgcttcgtggtttttattttgataaaaaatcatgcaaatctaaacatcagactacagagttacaaccagatgtacctccccatgaaaggattttggcaagtgcatctcatgaaatggatcgcatttcatataaaagtggcaatatagaaaagacattcactggcatgcagaatgccaaacagctctcccttttatctcatagttcatctattgagtccctttctccagggggtgatttatttggattgggcatctttaaaaatggcagtgacagcctccagcgaagcacttctttagaaagttggttgacttcctataaaagcaatgaagatctctttagctgtcacagctctggggatataagcgtgagcagtggctcagttggtgaactaagtaaaagaacattagatctcctgaatcgtttggagaatatccagagcccctcagagcaaaagataaaacgaagtgtttctgatatcactcttcaaagcagttcccaaaagatgtcctttactggccagatgtcattggacatagcatcttctatcaatgaagactcagcggcatctctaacagaacttagcagcagtgacgagctctctctttgctcagaggatattgtgttacacaagaacaagatcccggaatcgaatgcatcgttcaggaagcgtctgactcgttcagtggctgatgaaagcgatgtcaatgtcagcatgattgttaatgtctcttgcacctctgcttgcactgatgatgaagatgacagcgacctgctctccagctctacccttaccttgactgaagaagagctgtgcatcaaagatgaggatgacgactccagtattgcaacagatgatgaaatttatgaagactgcaccttgatgtcagggctagactacataaagaatgaattacagacctggattaggccaaaattgtctttgacaagagataagaaaaggtgcaatgtcagtgatgagatgaagggcagtaaagatataagtagcagtgagatgaccaatccctctgatactctgaatattgagacccttctaaatggctctgtaaaacgtgtctctgaaaataatggaaatggtaagaattcatctcatacccatgagttagggacaaagcgtgaaaataagaaaactattttcaaagttaataaagatccatatgtggctgacatggaaaatggcaatattgaaggtattccagaaaggcaaaagggaaaaccgaatgtgacttcaaaggtatcagaaaatcttggttcacatgggaaagagatttcagagagtgagcattgtaagtgtaaagcacttatggatagtttagatgattcaaatactgctggcaaggaatttgtttcccaagatgttagacatcttccaaagaaatgtccaaatcaccaccattttgaaaatcaaagcactgcctctactcccactgagaagtctttctcagaactggctttagaaaccaggtttaacaacagacaagactctgatgcactgaaatcatctgatgatgcaccgagtatggctggaaaatctgctggttgttgcctagcacttgaacaaaacggaacagaggaaaatgcttctatcagcaacatttcctgttgcaactgtgagccagatgttttccatcaaaaagatgccgaagattgttcagtacacaactttgttaaggaaatcattgacatggcttcgacagccctaaaaagtaaatctcaacctgaaaacgaggtggctgctcctacttcattaactcaaatcaaggagaaagtgttggagcattctcaccggcccatccagctgagaaaaggggacttttattcgtacttatctctctcatctcatgacagtgattgtggggaggtcaccaattacatagaagagaaaagcagcactccattgccactagacaccactgactcgggcttagatgacaaggaagatattgaatgcttttttgaggcctgtgttgagggtgactctgatggagaggagccttgtttctctagtgctcctccaaatgaatctgcagttcccagcgaagctgcaatgccactacaagcaacagcatgttcttctgagttcagtgatagttctctttcagctgatgatgcagatacagtggctctttcaagtccttcctctcaggaaagagctgaggttggaaaggaagtgaatggtttgccccaaacttccagtggctgtgcagaaaacttagagtttactccttcaaagcttgacagtgaaaaggaaagttccggaaaaccaggtgaatctggaatgccagaagaacataatgctgcttcagccaaatctaaagttcaagacctctccttgaaggcaaatcagccaacagacaaggccgcattgcatcccagccccaaaactttaacctgtgaagaaaatcttctaaaccttcatgaaaaacgacatagaaatatgcataggtagaatgtaccccctccccaagcatgaaaatcatctcactgaaagatacgcctggctgcaactcaggggtggcctcatcctcccgccctgggctggcctctggttccatcacgtttgtcactgccgtttattacattgacttctcccaagatgaatcttccttccaaatgtgttttctccacacaagccttgtgatctgaatgtgtgcgctggttctctttaggtgatcgtctttgaagttcagcaaagctgcttgttctcccatggattcctgtcccaagctacctctaccaaccctctctctccagctagacttttctctttgcctcctcccttcccttccactctttaaagttctgcagttcaccaactggtagtccattaaattctcctgtctagaatgacccccccaccagtacttgaccaatttcatgtatcaatctggatttttttttaacggtataatgactgtgtttattgaaagagttttacctaaaaagccaacatttgaattggttgcagcatagagaagaaacactggtccttctttcaaaattaagcaactattaaaagcgccattttatttatttcatttaaaaaataatctatgcagcatttcaagaaacaaccatatggtgttgtatattataaactggtgacattctactattgaattatgtacaacattttcattttttatgcttcttgaggtggtaatgagaaaaaagttttttaaaaaagtgtgccttgctgtatttcttataccatttattaaaaagctgctttcacggtaaaattatgttggtttgaaaggaggaaatagcaaggttaagatgtgtgaataatttctgtatatatgtataaccaagtacaaacattgatgtataatgacagtataaaatgctttcatgtttgtgatgtctagtgatgtggaaaatataagccttaaatccattagattgcatggtaattaaaattggcataataaacacagattattgggggaaaaggaaaattagtgatctcttctactatgttctttaccaaattgttgcatctggttctgaaaaagtatagcatgtagcagcttccaaacatattcatattgcttaagaggcttaacattacctaaactagagactagacgtaaagccttcagttttcaaaatctttctggtcactataaagatcttggaacagcaaatgattaaatgtcagttcccctaaaccaataaacatttatactagattttttatttccacttatcattaatgatttaatgttggatttcaggtaccttgtatgtcttaatttattttaaatatttattttgaatgagtttgatagaaagctagtagaaaagtacagaaaatttgactattatttatagatttcaggtatatttatatgtgtaaaagaaattgacaaagaaatatttcatctggcctttactgactcctgttaaatgcagttttaaatttatatcgtaacacctacttaagtgcctgacacagtaggtattcaataaaaatttactgaattaaaggattaaattaggtgacatggtgacatctatccctttattttgacactaaaacatggacacaactagaaagaggtacaatgcaatataaagtcacaatagataatatatatcaaatttctaaaaggtaaagaatgttgtgggttcatgcagtcacaggaatgacaatcattcaacagatagttcagaaacactttttatctgcaaggcactattctagatccagaagatgcaatgttgaacaaacagacaaagccctgccctcagaaggctgtcctgcattaggaacaagtgaacacgcaaatgacatgaagtatttgttgcagagctgaggaacagagcaaatgtagtgatagaagcgcaatgagagaagcagcagtgggtacaaggaggaagaaaaagggcttgcagagagtggaaagttagtggaatattcatgaaacttcattgcaggggtaatagaagaaaaagtaaattgggaggacttaatggaaggtcttttaaaaagttaacttggagcttctgtatgtaaaatgctaggtaataaggacactttgtacaggctgttttgcacctgattttatttatcattagtgccacgccaagatcatttagacgatgcttatctgtaattctaccactttaataactatttgtatttttatgccccttctgatcttttccatatgtatttctaaatggataaattattctaggcttcttaataggtagtaatttgttcaaaagcggttttagccagacatctagttgcagtgttcaagaggattatgggggaaagagattagagataattgtctagttagggggcagctggagaaaataagctaagtttgcaataacagagtacacaagtatagtggcccaggatgtagtgaaagaacaaatcctagagtctttgaaatttctaagggcattctagacctctgttgggatatggtattattttacatactgacacaacctaaattttctttgggtagtaactaatgtcaagtctacatcgactggtaaaacattcaaagaacaaactgacaatgatgttctacctacttgttacatgctcatggaagaccgtgcagtattgaaagtatttgttaattatctgcttagtattaacactaaatttgtagaatgactttcaggtttgttgaacaatgccttttcaggttggaagaagaaaaatagcctcaatctcccaccccatgtaggcactacctccccaattacccttagaaaatgatcacaccaactctgcctacacacttccagtgatagtggctcattgtctgttaaggcaaactgttccactgttgggcatatctctttgttagaaagttctttcttaggttgctaaaatctgcctagtaccccgctaccctgttctgtcttatggagcagcccagattatctttactccctctttctcatggcaaccctgaagataatcaaggccagttactcatcatctcccaaccactgtttcctcaactgcccttcatatgtcatggttttcagatccattccaacctgactgaatgttaacagacagaattcttcacattaaggaactgtcttcatcatcatacatgtagaaaagaatctgaacatttaagtgcgaagttttctctagaaatatattcaagatatgtttattctattattgtaaatttcaaacaataaataaataagaatcc

SEQ ID NO: 13125 - DNA, 1157 bp, Homo sapiens
ggcctcactcccagactccttgcggagctcgccgcctgattctaggctggtcactactccgagcctgtgacgtttgcggcagccaggccgtcgacgatgcccagtgaaactctctgggaaattgcaaaagctgaagtggaaaaaaggggaattaatggaagtgaaggtgatggagctgaaattgcagaaaaatttgttttcttcattggcagtaaaaatgggggaaagactactattattctaaggtgtcttgacagagatgaaccaccaaaaccaaccttagctttggaatatacatatggaagaagagcaaaagggcacaacacaccaaaagatatcgctcacttttgggaactcggtggaggaacctctttattggacttaatcagcatacccatcacaggtgacaccttacggacgttttctcttgttctcgttctggatctttcaaaacctaatgatctctggcccaccatggaaaatctcttgcaagccacaaaaagccatgtagacaaagtgataatgaaactgggaaagacaaatgctaaagcagtttctgaaatgagacagaagatctggaataatatgccgaaggatcatcctgtgagttgctgtttgggattattactggaatccttagtcccatttatagttaatgataacatcacaaacaacttctttagatttttatgcatgacttgaaattcatttgatgtagatgaacctgttcactggaaaattacagcaatttattaaaacctcagtaagagcaaaacaaggaagaagattccttatatcttcttgttagacatcttctgtgattgttatggcatattacaccaatcagagaaatagagttttaaagtagtggtttgatattgattttataatctctgtaaaaatgaagataaaaagccagattgtacaaaagtcacctgacaaagactagatgaagctacaactttaagcaaggggtagagttgtaatagccttcaccatcactctgtattttacattcatttcgtttctgtcacttattcagtatctttttatcatctgacagctaattaaattataaagttgctatgatggtaacacaagttcttcaaatacaataataaatatcatcatctagaaaaaaaaaaaaaaaaaaaaaa

SEQ ID NO: 13126 - DNA, 6598 bp, Homo sapiens
ttttcttctgcacttctgtctggagaggtctgtagccactgagggccccggtcggggccgctttgcaggtccctagtcaggaccgagcaggggagtaggataggaatccccgccgcacctttgtacgagcctgaccccttccgtgggtttgttcctgggtcgccgtcaagctgcggtctctcctcccccgcccttcagccccgcggtctccaggggcggcgccctgggtctggaacgcggttgccaccgaggaggcggcggccctgcgtctggaacgccgttgccaccgaggaggcggcggccccgagcgcgcctggaagccccgggcaaccggccagggtcgggcacaggtggggtccgtcaggccgcccggggctcctctgtcccagctctgcggcccagggggtgacgtgatggcggcagcggtgctgacggaccgggcccaggtgtctgtgacctttgatgatgtggctgtgactttcaccaaggaggagtgggggcagctggacctagctcagcggaccctgtaccaggaggtgatgctggaaaactgtgggctcctggtgtctctggggtgtcctgttcccaaagctgagctgatctgccacctagagcatgggcaggagccatggaccaggaaggaagacctctcccaagacacctgtccaggcgacaaaggaaaacctaagaccacagaacctaccacttgtgagccagccttgtcagagggaatctcacttcagggacaagtgacacaaggaaactcagtggactcacagttggggcaagccgaggatcaggatgggctatcagaaatgcaggaaggacacttcagaccaggaatagatccccaggagaagtctcctgggaagatgagccctgaatgtgatggtttagggacagctgatggtgtgtgttcaaggattggacaggagcaagtctctccaggagatagagtccgtagccataactcatgtgagtcaggtaaagatcccatgattcaggaagaggaaaataactttaaatgcagtgaatgtggaaaagtatttaacaagaaacacctccttgctggacatgagaaaattcactctggagttaagccctatgaatgcacagaatgtgggaaaacctttattaagagcacacatctcctgcaacatcacatgatccacactggggagaggccctatgagtgcatggagtgtggaaaggccttcaaccgcaagtcataccttacccagcaccagcggattcacagtggagagaagccttacaagtgcaatgaatgcggaaaggccttcacccaccgctccaattttgtcttgcataacaggagacacactggagaaaaatcctttgtgtgcacagaatgtggccaagtctttcgacataggccaggctttctccggcactatgttgtccacagtggtgagaatccctatgagtgcttggagtgtggcaaggtcttcaaacacaggtcatatctcatgtggcaccagcagactcataccggggagaagccctatgagtgcagtgaatgtgggaaggtcttcttggagagtgcagccctgattcaccactatgtcatccacactggagagaagccctttgagtgcctcgagtgtgggaaggctttcaaccaccgatcctacctcaagaggcaccagcggattcacactggggagaagcccttcgtgtgcagtgaatgtggaaaggccttcacccactgctctacttttatcttgcataaaagggcccacactggagaaaagcctttcgagtgcaaagagtgtgggaaagcctttagcaatcggaaggacctcattcgccacttcagcatccacactggagagaagccctatgagtgcgtggagtgtggaaaggccttcacccgcatgtcgggcctcacgaggcacaagcggattcatagtggagagaagccctatgaatgtgttgagtgtgggaaatcgttttgctggagcacaaacctcattcgacatgccattatccacactggagagaagccctataaatgtagtgaatgtggaaaggccttcagtcgcagctcgtccctcactcagcatcaaaggatgcatactgggaaaaatcccatcagtgtaacagatgtgggaagaccttttacaagtggacaaacctcagttacccttcgagaacttcttttagggaaggactttttgaatgtaaccactgaggcaaatattttgccagaggaaacatcttcctctgcatctgatcaaccataccaaagagaaaccccacaagtgtcttcactgtgagaaaaccttctgttgctgaatattacttgtcatctgaagagtcatattagaaattcgttcagtctagagccttattctccatctgataatttatcctggagagagacccagtggttattgtgcacataggagaaccttcagctgcatctttctccttagtttacagtgcaattttatctcaggaattatttttaaaaggaggaggggacatagaaaaaatgaaatgcaagcacacatcttttcaggcttctctgccaagcctatggcgctttgtcatggatttcttagtgtatttgggggaagggaaatgtttcaaggtaaagaaccttgaccctttatgtgcttgtatgtacatttattgctatccagtgtcagaacagttagtttaggaaaagtatgcaaactttaatcgcacatcttctgtattccacaatagtacttactcttgagaagcataactttatgacaacttagggggcttgagccatgaaatactcacgtttaagtcagtaaggatacacatgttaacattcaggcttttgtcttgatgcccgtcttttggtttacgtcatcattgtagccatatggtaaatttttatttgttaaatttttaaaaattacttagctcaaaatgtcagtggtaaatttttaaattgagtaaagtgattcttctttgctcttatttaaaatcgacagcatttctagttcctttgacattccatataatttttaggattagtttgtacttatttacaaaacagtcttgttcagatttttacagaaattgagttaagtctgtggattaatctgttaagaattggtatctttactatgttgggtcttgtagttcatgagtgcaggagtaggcctcttaatttataatagttaagcattccttaaagtatttcattaatgttaaaaattttcagcgtatagatccctatgcatttttgttagaatttgcatcctagggtgcttttttgtttgtgtgtgtgtgtaatttgagtgattgtaaatggcattgatgtttgaactttgaattgcacacaatttttggtagtatacagaaatataatatttttggacattgttttgctaccctgcaaccttattgagttcacttattatttttagctatttctttcgacagaatccttggaattttctatatagaaatgtcatctgcaaatacagaccattttttatctttcatcttacctgtaatcctagcactttgagaccactaaggcaggtggatcacctgaggccaggagttcgagaccagcctggccaacatggcaaaaccctgtctactaaaaatacaaaaattagccaggcatggtggcgtgtgcctgtaatcccagctgctggggggctgaggcaggaggatcagttgaacgtgggaggcagaggttgcagtgagctgagatctcaccactgcactccagcctgggcaacagagcgagactctgtctcaacaacaacaacaaaaagtcctgaacatgattgtggaagtgtgttgctctttcaagttctatcactttttgtttgcaaagttcaaagctgtattgtttggtacatatacatgtaggtttgccaagtctttgtggtgaattgactcttctgtcattatgtgatgtcatttttttgccttttaatagtcttgtcaatactttacctgatgttctcatagtgactcctgcatattttgattaatgtttgcatggttaatatttcttcattttattttaaagcttacctgtatcattacttatgaagtcagtttctttgaacagcatatactcaggccatgctttttttattcattctgcatatgtctctcttaattggtatgttgaaatgatttacattaaaataattattgatattttagggcttaagtgtgcccttaaatgatttttgtgttcttttttattgttcctctgttatttggggttgtttactagtcttcctataggttacttcaccttttttttttttaataatttgatttgatacatatgtagtgttttttagtatagatcctccttgacttatgatggggttatgtcacaataaacccattgcaagttgaaaatactatgtcaaatatgcatttaatacacctaccctgctgaacatcatagccgatcttgccttcagaatgctcagaaaatttacattagcctgcagttgggcaaaatcatctaacacaaggcctactttataataaagttactgcaaagaattttaaataaaaattcaagtgtggtttctactgaatgcatgtcgcattcgcaccattgtaaagtcaagtagtaagtcgaaccatcctaagtcagggactgtctgtatatatctgcattttttagtgattgttctactattacagtgtaaatatataacttatgacagtttaataagttatcagcaatttagcactttacttccattaggttcctttagcttacctactaatgtaactatcttaagtaatagtaattcctcttcaaaaattgagcgctatgttgcaagatgtaatttttcttttccttttttttgagaccaagtctcactctgtcacccacgctggagtgctgtgatgcgatctcggctctctgcaacctctgcctcccgggttcaagcaattaactgcctcagcttccctagtaatggattacaggcgcccgccaccacgcctggctaatttttgtatttttagtagagacggggtttcaccatcttggccaggttggtcttgaactcttgacctcatgatccacccgcctcggccccccaaagtgctggggttacaggtgtgagccactgcacccggccacaagatgtaatttttactttatctctcacacgtattttacaaaacgtcatgagaaacattgtctcttgaccttttttttttttttttttttttaaagagacagagtctcactctgtcacccaggctggagtgcagtggcacgatcttggctcactgcaacctccgcctcctgggttcaagcgattctcctgcctcagcctcctgagtagctgggattacaggtgtgcgccgccacacccagctaattttgtatttttagtagagacggggtttcaccatgttgctcaggctggtctcaaactcctgaccttgtgatccgccaaccttggcctgtcgacctctttacccattccattgttcattcttctttcttgaaatcccaaaccttctattaacatttcttttcagttatacactgaactttactgtagcctttcttctagagtaacaaatgttctttgttttccttcctctaaagatgtctttatgtttccttcattcccaaagaatatttttgtggaatataagattcagagttggcagttgttttcttttagacttcagagatgtatctctctgttctgtacattattgtttaatataagaaacctactagcattcaaataatcattccctattttacaatgcatcagttctgtcaagcttcattcaaagtgtttttcattgtctctagtgttcagaagtttggctgtgatgtgcgtggcatggaagtttttgggtgtattctatttggcgctccctggtgcttgcccagctttttgatctgtaggattatgccttttgcaaaatttggggaactttcaactattatttcttcaaatattttttcaccccccagtcttgtcttttttagggacttcaataacatgagtggcagatcttgttttacactcccatgggtccttcaggctctcatcttttttctttttccagtctattttctgtcttgttaatattgattaatttttattgaccttccatggtcctcactgattgttttctttgtcatacctaatctgttgagtttgtgcagtgagttttcattttggttttgtattttccagttgtttaatttccattgggtgggttcttttgtacaccttctgtttctttgcttattttttaacgccaaagaaagactctcagagaatagacaactatattccaaagtcatggttctctggtggtttgtcttgacatttgaatagaaatgttaaactatctgggggaatagaaagcccacagtcttctgagttgtgctacaccaatatttctatgaacagatcttacaactgagagtgatctgcagatttttcagagtcatgttctccatggaatgtttgtaaaattccctagctctctgcactgagctgagatcgtgccactgcactccagcctgggcaacagagcgagactccatctcaaaaaaaaaaaaaaaaaa

SEQ ID NO: 13127 - DNA, 7180 bp, Homo sapiens
tgtataagaatttgcacatcccaagttgctatgtgaataggaatgtacgtttccaggggaaggagaaagagacattacagagcagacagctctatgatgtttactatacttgctaaaatgtgaaattcagctaaattggaatacaaagtagtgccaaaacagcattaggtttgcggagttattttaaacataattgaaaaatcaaggttttttaatactttaaataaaacatctgtttttcaatgtggtaatttaagtcctacgatgagtttattaacatgtgctttttatttagggtatgagctacagttccgattaggcccaactttacagggaaaagcagttaccgtgtatacaaattacccatttcctggagaaacatttaatagagaaaaattccgttctctggattgggaaaatccaacagaaagagaagatgattctgataaatactgtaaacttaatctgcaacaatctggttcatttcagtattatttccttcaaggaaatgagaaaagtggtggaggttacatagttgtggaccccattttacgtgttggtgctgataatcatgtgctacccttggactgtgttactcttcagacatttttagctaagtgtttgggaccttttgatgaatgggaaagcagacttagggttgcaaaagaatcaggctacaacatgattcattttaccccattgcagactcttggactatctaggtcatgctactcccttgccaatcagttagaattaaatcctgacttttcaagacctaatagaaagtatacctggaatgatgttggacagctagtggaaaaattaaaaaaggaatggaatgttatttgtattactgatgttgtctacaatcatactgctgctaatagtaaatggatccaggaacatccagaatgtgcctataatcttgtgaattctccacacttaaaacctgcctgggtcttagacagagcactttggcgtttctcctgtgatgttgcagaagggaaatacaaagaaaagggaatacctgctttgattgaaaatgatcaccatatgaattccatccgaaaaataatttgggaggatatttttccaaagcttaaactctgggaatttttccaagtagatgtcaacaaagcggttgagcaatttagaagacttcttacacaagaaaataggcgagtaaccaagtctgatccaaaccaacaccttacgattattcaagatcctgaatacagacggtttggctgtactgtagatatgaacattgcactaacgactttcataccacatgacaaggggccagcagcaattgaagaatgctgtaattggtttcataaaagaatggaggaattaaattcagagaagcatcgactcattaactatcatcaggaacaggcagttaattgccttttgggaaatgtgttttatgaacgactggctggccatggtccaaaactaggacctgtcactagaaagcatcctttagttaccaggtattttactttcccatttgaagagatagacttctccatggaagaatctatgattcatctgccaaataaagcttgttttctgatggcacacaatggatgggtaatgggagatgatcctcttcgaaactttgctgaaccgggttcagaagtttacctaaggagagaacttatttgctggggagacagtgttaaattacgctatgggaataaaccagaggactgtccttatctctgggcacacatgaaaaaatacactgaaataactgcaacttatttccagggagtacgtcttgataactgccactcaacacctcttcacgtagctgagtacatgttggatgctgctaggaatttgcaacccaatttatatgtagtagctgaactgttcacaggaagtgaagatctggacaatgtctttgttactagactgggcattagttccttaataagagaggcaatgagtgcatataatagtcatgaagagggcagattagtttaccgatatggaggagaacctgttggatcctttgttcagccctgtttgaggcctttaatgccagctattgcacatgccctgtttatggatattacgcatgataatgagtgtcctattgtgcatagatcagcgtatgatgctcttccaagtactacaattgtttctatggcatgttgtgctagtggaagtacaagaggctatgatgaattagtgcctcatcagatttcagtggtttctgaagaacggttttacactaagtggaatcctgaagcattgccttcaaacacaggtgaagttaatttccaaagcggcattattgcagccaggtgtgctatcagtaaacttcatcaggagcttggagccaagggttttattcaggtgtatgtggatcaagttgatgaagacatagtggcagtaacaagacactcacctagcatccatcagtctgttgtggctgtatctagaactgctttcaggaatcccaagacttcattttacagcaaggaagtgcctcaaatgtgcatccctggcaaaattgaagaagtagttcttgaagctagaactattgagagaaacacgaaaccttataggaaggatgagaattcaatcaatggaacaccagatatcacagtagaaattagagaacatattcagcttaatgaaagtaaaattgttaaacaagctggagttgccacaaaagggcccaatgaatatattcaagaaatagaatttgaaaacttgtctccaggaagtgttattatattcagagttagtcttgatccacatgcacaagtcgctgttggaattcttcgaaatcatctgacacaattcagtcctcactttaaatctggcagcctagctgttgacaatgcagatcctatattaaaaattccttttgcttctcttgcctccagattaactttggctgagctaaatcagatcctttaccgatgtgaatcagaagaaaaggaagatggtggagggtgctatgacataccaaactggtcagcccttaaatatgcaggtcttcaaggtttaatgtctgtattggcagaaataagaccaaagaatgacttggggcatcctttttgtaataatttgagatctggagattggatgattgactatgtcagtaaccggcttatttcacgatcaggaactattgctgaagttggtaaatggttgcaggctatgttcttctacctgaagcagatcccacgttaccttatcccatgttactttgatgctatattaattggtgcatataccactcttctggatacagcatggaagcagatgtcaagctttgttcagaatggttcaacctttgtgaaacacctttcattgggttcagttcaactgtgtggagtaggaaaattcccttccctgccaattctttcacctgccctaatggatgtaccttataggttaaatgagatcacaaaagaaaaggagcaatgttgtgtttctctagctgcaggcttacctcatttttcttctggtattttccgctgctggggaagggatacttttattgcacttagaggtatactgctgattactggacgctatgtagaagccaggaatattattttagcatttgcgggtaccctgaggcatggtctcattcctaatctactgggtgaagggatttatgccagatacaattgtcgggatgctgtgtggtggtggctgcagtgtatccaggattactgtaaaatggttccaaatggtctagacattctcaagtgcccagtttccagaatgtatcctacagatgattctgctcctttgcctgctggcacactggatcagccattgtttgaagtcatacaggaagcaatgcaaaaacacatgcagggcatacagttccgagaaaggaatgctggtccccagatagatcgaaacatgaaggacgaaggttttaatataactgcaggagttgatgaagaaacaggatttgtttatggaggaaatcgtttcaattgtggcacatggatggataaaatgggagaaagtgacagagctagaaacagaggaatcccagccacaccaagagatgggtctgctgtggaaattgtgggcctgagtaaatctgctgttcgctggttgctggaattatccaaaaaaaatattttcccttatcatgaagtcacagtaaaaagacatggaaaggctataaaggtctcatatgatgagtggaacagaaaaatacaagacaactttgaaaagctatttcatgtttccgaagacccttcagatttaaatgaaaagcatccaaatctggttcacaaacgtggcatatacaaagatagttatggagcttcaagtccttggtgtgactatcagctcaggcctaattttaccatagcaatggttgtggcccctgagctctttactacagaaaaagcagggaaagctttggagattgcagaaaaaaaattgcttggtccccttggcatgaaaactttagatccagatgatatggtttactgtggaatttatgacaatgcattagacaatgacaactacaatcttgctaaaggtttcaattatcaccaaggacctgagtggctgtggcctattgggtattttcttcgtgcaaaattatatttttccagattgatgggcccggagactactgcaaagactatagttttggttaaaaatgttctttcccgacattatgttcatcttgagagatccccttggaaaggacttccagaactgaccaatgagaatgcccagtactgtcctttcagctgtgaaacacaagcctggtcaattgctactattcttgagacactttatgatttatagtttattacagatattaagtatgcaattactgtattataggatgcaaggtcatcatatgtaaatgctatatgcacaggctcaagttgttttaaaaatctcatttattataatattgatgctcaattaggtaagattgtaaaagcattgattttttttaatgtacagaggtagatttcaatttgaatcagaaagaaatatcattaccaatgaaatgtgtttgagttcagtaagaattattcaaatgcctagaaatccatagtttggaaaataaaaatcatgtcatcttctatttgtacagaaatgaaaataaaatatgaaaataatgaaagaaatgaaaagatagcttttaattgtggtatatataatcttcagtaacaatacatactgaatacgctgtggttcattaatattaacaccacgtactatagtattcttagaatacagtgctcactgcatttaataaatatttaataaatgatgaatgatagaagtttccatctacaatatatgttcctaaatggagcacagatgttcaaactatgctttcattttttcactgatatattaatttttgtgtaatgaatgccaacagtatattttatatgatttacttatgtgaggaaacatgcaaagcattaggaaatttatttcctaaaaacagttttgtaaaattagtattgagttctattgagtattataagatagcttacattttcaaaatggaaattgtcggtcatatttctagaactttaaagaaaaaagaatgttatattagttttctaaaactcaactatctttagtcatgttcaaaaatctattgctagatcatagtagatactggttttctattaactcaaaacctacattgacaagtttaacattgagaagaatcttaacaaaaatatggatatgaattcagtagatatcttaaattcaataaaatcactggaagtttttcatgataacttattttaagatgccttaaaaatcttaaagtcacaaaaggaaaaaggtttttaacatttacatgagttaacattttttcatagaacttatttcctagatagaattttttactgttttttactgttttcttaagaaaacagttaaatcattatgcattcagttggaagaaagtagtggcaagaattctttcattgctatataatattcagtggctcatttatacctaataaaataatggtattttaaaataatgctactttcaaagtagcatttttttagttagtttacaggttacatacccaaaaccttaactatgactaagaaattaaagaagaaaaccagcaaactaaaacttctgggcagcaaaaatatataaatgcttcagatgtcaaatacccatgcttgaaagctcgtgtaatttactttaagattatctgcctgctcttcttcaaagctgaccttgctttagaaatagttttaactagcttagttttctggtttccaaaactaaaatagattaaatcctacaaatttaaggacagttgtgacagtaatctgaccactatctataaatacattggacattggtttccaaatctccctttctcttcagttccttccttgttcaatatatacccttctctaaactgtgcgggtaaaaggaatgactgtccttgagagaaccattagtttatcaaaggtttatgtagttttgttgctgtaccctaactttgatattcagggaggtaggaaaggtaacagaaaaccagcatatttaatcaaagcaagaagtaatcgctgacagttaaatgtgaccaaaaaaattaaaagttcacaatttttttaatgtagccatttggggttatctctagtaaggcagatacccacgttggtaaatttttaggatattgtgttgcactagaaaactaagtggttcatatttctaatgaggaagattaatgaaagaacattgttatattctgcgtggtatattttaaagtttaagaaggcatgttaaacattatttcctctatggtagttaaaatacagaattagatttttaacaggtgtcatttgactaaacgtttcggtagaatgcttcatacttgagtgatgctggataaggtattgtatttcaacaatggactatgccttggtttttcactaatcaaaatcaaaattactctttaacatgataaatgaatttaccagtttagtatgctgtggtattttaataagttttcaaagataattgggaaaacatgagactggtcatattgatgaatattgtaacatgtgaattgtgatccatttctgatatgtcttgaactactgtgtctagtaggcaaatgtcattgttacctctgtgtgttaagaaaataaaaatattttctaaaggtcg

SEQ ID NO: 13128 - DNA, 7178 bp, Homo sapiens
gggtaactcattcgactgtggagttcttttaattcttatgaaagatttcaaatcctctggaagccaaaatgggacacagtaaacagattcgaattttacttctgaacgaaatggagaaactggaaaagaccctcttcagacttgaacaagaaactgggtctcactatgttgcccaggttgatattgaactcctggactcaagcaaccctccctctttggcctctgaaagtactgggattacaagcataagccaccgggcatggccccacttctgagcattaatttatttattgggtatgagctacagttccgattaggcccaactttacagggaaaagcagttaccgtgtatacaaattacccatttcctggagaaacatttaatagagaaaaattccgttctctggattgggaaaatccaacagaaagagaagatgattctgataaatactgtaaacttaatctgcaacaatctggttcatttcagtattatttccttcaaggaaatgagaaaagtggtggaggttacatagttgtggaccccattttacgtgttggtgctgataatcatgtgctacccttggactgtgttactcttcagacatttttagctaagtgtttgggaccttttgatgaatgggaaagcagacttagggttgcaaaagaatcaggctacaacatgattcattttaccccattgcagactcttggactatctaggtcatgctactcccttgccaatcagttagaattaaatcctgacttttcaagacctaatagaaagtatacctggaatgatgttggacagctagtggaaaaattaaaaaaggaatggaatgttatttgtattactgatgttgtctacaatcatactgctgctaatagtaaatggatccaggaacatccagaatgtgcctataatcttgtgaattctccacacttaaaacctgcctgggtcttagacagagcactttggcgtttctcctgtgatgttgcagaagggaaatacaaagaaaagggaatacctgctttgattgaaaatgatcaccatatgaattccatccgaaaaataatttgggaggatatttttccaaagcttaaactctgggaatttttccaagtagatgtcaacaaagcggttgagcaatttagaagacttcttacacaagaaaataggcgagtaaccaagtctgatccaaaccaacaccttacgattattcaagatcctgaatacagacggtttggctgtactgtagatatgaacattgcactaacgactttcataccacatgacaaggggccagcagcaattgaagaatgctgtaattggtttcataaaagaatggaggaattaaattcagagaagcatcgactcattaactatcatcaggaacaggcagttaattgccttttgggaaatgtgttttatgaacgactggctggccatggtccaaaactaggacctgtcactagaaagcatcctttagttaccaggtattttactttcccatttgaagagatagacttctccatggaagaatctatgattcatctgccaaataaagcttgttttctgatggcacacaatggatgggtaatgggagatgatcctcttcgaaactttgctgaaccgggttcagaagtttacctaaggagagaacttatttgctggggagacagtgttaaattacgctatgggaataaaccagaggactgtccttatctctgggcacacatgaaaaaatacactgaaataactgcaacttatttccagggagtacgtcttgataactgccactcaacacctcttcacgtagctgagtacatgttggatgctgctaggaatttgcaacccaatttatatgtagtagctgaactgttcacaggaagtgaagatctggacaatgtctttgttactagactgggcattagttccttaataagagaggcaatgagtgcatataatagtcatgaagagggcagattagtttaccgatatggaggagaacctgttggatcctttgttcagccctgtttgaggcctttaatgccagctattgcacatgccctgtttatggatattacgcatgataatgagtgtcctattgtgcatagatcagcgtatgatgctcttccaagtactacaattgtttctatggcatgttgtgctagtggaagtacaagaggctatgatgaattagtgcctcatcagatttcagtggtttctgaagaacggttttacactaagtggaatcctgaagcattgccttcaaacacaggtgaagttaatttccaaagcggcattattgcagccaggtgtgctatcagtaaacttcatcaggagcttggagccaagggttttattcaggtgtatgtggatcaagttgatgaagacatagtggcagtaacaagacactcacctagcatccatcagtctgttgtggctgtatctagaactgctttcaggaatcccaagacttcattttacagcaaggaagtgcctcaaatgtgcatccctggcaaaattgaagaagtagttcttgaagctagaactattgagagaaacacgaaaccttataggaaggatgagaattcaatcaatggaacaccagatatcacagtagaaattagagaacatattcagcttaatgaaagtaaaattgttaaacaagctggagttgccacaaaagggcccaatgaatatattcaagaaatagaatttgaaaacttgtctccaggaagtgttattatattcagagttagtcttgatccacatgcacaagtcgctgttggaattcttcgaaatcatctgacacaattcagtcctcactttaaatctggcagcctagctgttgacaatgcagatcctatattaaaaattccttttgcttctcttgcctccagattaactttggctgagctaaatcagatcctttaccgatgtgaatcagaagaaaaggaagatggtggagggtgctatgacataccaaactggtcagcccttaaatatgcaggtcttcaaggtttaatgtctgtattggcagaaataagaccaaagaatgacttggggcatcctttttgtaataatttgagatctggagattggatgattgactatgtcagtaaccggcttatttcacgatcaggaactattgctgaagttggtaaatggttgcaggctatgttcttctacctgaagcagatcccacgttaccttatcccatgttactttgatgctatattaattggtgcatataccactcttctggatacagcatggaagcagatgtcaagctttgttcagaatggttcaacctttgtgaaacacctttcattgggttcagttcaactgtgtggagtaggaaaattcccttccctgccaattctttcacctgccctaatggatgtaccttataggttaaatgagatcacaaaagaaaaggagcaatgttgtgtttctctagctgcaggcttacctcatttttcttctggtattttccgctgctggggaagggatacttttattgcacttagaggtatactgctgattactggacgctatgtagaagccaggaatattattttagcatttgcgggtaccctgaggcatggtctcattcctaatctactgggtgaagggatttatgccagatacaattgtcgggatgctgtgtggtggtggctgcagtgtatccaggattactgtaaaatggttccaaatggtctagacattctcaagtgcccagtttccagaatgtatcctacagatgattctgctcctttgcctgctggcacactggatcagccattgtttgaagtcatacaggaagcaatgcaaaaacacatgcagggcatacagttccgagaaaggaatgctggtccccagatagatcgaaacatgaaggacgaaggttttaatataactgcaggagttgatgaagaaacaggatttgtttatggaggaaatcgtttcaattgtggcacatggatggataaaatgggagaaagtgacagagctagaaacagaggaatcccagccacaccaagagatgggtctgctgtggaaattgtgggcctgagtaaatctgctgttcgctggttgctggaattatccaaaaaaaatattttcccttatcatgaagtcacagtaaaaagacatggaaaggctataaaggtctcatatgatgagtggaacagaaaaatacaagacaactttgaaaagctatttcatgtttccgaagacccttcagatttaaatgaaaagcatccaaatctggttcacaaacgtggcatatacaaagatagttatggagcttcaagtccttggtgtgactatcagctcaggcctaattttaccatagcaatggttgtggcccctgagctctttactacagaaaaagcagggaaagctttggagattgcagaaaaaaaattgcttggtccccttggcatgaaaactttagatccagatgatatggtttactgtggaatttatgacaatgcattagacaatgacaactacaatcttgctaaaggtttcaattatcaccaaggacctgagtggctgtggcctattgggtattttcttcgtgcaaaattatatttttccagattgatgggcccggagactactgcaaagactatagttttggttaaaaatgttctttcccgacattatgttcatcttgagagatccccttggaaaggacttccagaactgaccaatgagaatgcccagtactgtcctttcagctgtgaaacacaagcctggtcaattgctactattcttgagacactttatgatttatagtttattacagatattaagtatgcaattactgtattataggatgcaaggtcatcatatgtaaatgctatatgcacaggctcaagttgttttaaaaatctcatttattataatattgatgctcaattaggtaagattgtaaaagcattgattttttttaatgtacagaggtagatttcaatttgaatcagaaagaaatatcattaccaatgaaatgtgtttgagttcagtaagaattattcaaatgcctagaaatccatagtttggaaaataaaaatcatgtcatcttctatttgtacagaaatgaaaataaaatatgaaaataatgaaagaaatgaaaagatagcttttaattgtggtatatataatcttcagtaacaatacatactgaatacgctgtggttcattaatattaacaccacgtactatagtattcttagaatacagtgctcactgcatttaataaatatttaataaatgatgaatgatagaagtttccatctacaatatatgttcctaaatggagcacagatgttcaaactatgctttcattttttcactgatatattaatttttgtgtaatgaatgccaacagtatattttatatgatttacttatgtgaggaaacatgcaaagcattaggaaatttatttcctaaaaacagttttgtaaaattagtattgagttctattgagtattataagatagcttacattttcaaaatggaaattgtcggtcatatttctagaactttaaagaaaaaagaatgttatattagttttctaaaactcaactatctttagtcatgttcaaaaatctattgctagatcatagtagatactggttttctattaactcaaaacctacattgacaagtttaacattgagaagaatcttaacaaaaatatggatatgaattcagtagatatcttaaattcaataaaatcactggaagtttttcatgataacttattttaagatgccttaaaaatcttaaagtcacaaaaggaaaaaggtttttaacatttacatgagttaacattttttcatagaacttatttcctagatagaattttttactgttttttactgttttcttaagaaaacagttaaatcattatgcattcagttggaagaaagtagtggcaagaattctttcattgctatataatattcagtggctcatttatacctaataaaataatggtattttaaaataatgctactttcaaagtagcatttttttagttagtttacaggttacatacccaaaaccttaactatgactaagaaattaaagaagaaaaccagcaaactaaaacttctgggcagcaaaaatatataaatgcttcagatgtcaaatacccatgcttgaaagctcgtgtaatttactttaagattatctgcctgctcttcttcaaagctgaccttgctttagaaatagttttaactagcttagttttctggtttccaaaactaaaatagattaaatcctacaaatttaaggacagttgtgacagtaatctgaccactatctataaatacattggacattggtttccaaatctccctttctcttcagttccttccttgttcaatatatacccttctctaaactgtgcgggtaaaaggaatgactgtccttgagagaaccattagtttatcaaaggtttatgtagttttgttgctgtaccctaactttgatattcagggaggtaggaaaggtaacagaaaaccagcatatttaatcaaagcaagaagtaatcgctgacagttaaatgtgaccaaaaaaattaaaagttcacaatttttttaatgtagccatttggggttatctctagtaaggcagatacccacgttggtaaatttttaggatattgtgttgcactagaaaactaagtggttcatatttctaatgaggaagattaatgaaagaacattgttatattctgcgtggtatattttaaagtttaagaaggcatgttaaacattatttcctctatggtagttaaaatacagaattagatttttaacaggtgtcatttgactaaacgtttcggtagaatgcttcatacttgagtgatgctggataaggtattgtatttcaacaatggactatgccttggtttttcactaatcaaaatcaaaattactctttaacatgataaatgaatttaccagtttagtatgctgtggtattttaataagttttcaaagataattgggaaaacatgagactggtcatattgatgaatattgtaacatgtgaattgtgatccatttctgatatgtcttgaactactgtgtctagtaggcaaatgtcattgttacctctgtgtgttaagaaaataaaaatattttctaaaggtcg

SEQ ID NO: 13129 - DNA, 7445 bp, Homo sapiens
ctgtctacggcagctattccagaggcaacaactgcttccctctgttctcatctccccattggtggctggcgacccgaatttgggaatggggagattgcccacctgttatctttgagcagactaatctcttgtaagcagaagtgccattcggagtctccagagccctgtggcttggggctgggaatgtccccctgacttcaggctttcctaagtgtattgcttttctctgagaatggtctaggtttttaattttttaattgtaagaatctgtaatacagcatttttatttcggtcttattcgttgtgctcaaaggcaggaaacaactattaatttgccttctcgaatcttaatagttataagattcattctctttcattgctctgctaggcataaaacacacttcgaacatgggtaactcattcgactgtggagttcttttaattcttatgaaagatttcaaatcctctggaagccaaaatgggacacagtaaacagattcgaattttacttctgaacgaaatggagaaactggaaaagaccctcttcagacttgaacaagggtatgagctacagttccgattaggcccaactttacagggaaaagcagttaccgtgtatacaaattacccatttcctggagaaacatttaatagagaaaaattccgttctctggattgggaaaatccaacagaaagagaagatgattctgataaatactgtaaacttaatctgcaacaatctggttcatttcagtattatttccttcaaggaaatgagaaaagtggtggaggttacatagttgtggaccccattttacgtgttggtgctgataatcatgtgctacccttggactgtgttactcttcagacatttttagctaagtgtttgggaccttttgatgaatgggaaagcagacttagggttgcaaaagaatcaggctacaacatgattcattttaccccattgcagactcttggactatctaggtcatgctactcccttgccaatcagttagaattaaatcctgacttttcaagacctaatagaaagtatacctggaatgatgttggacagctagtggaaaaattaaaaaaggaatggaatgttatttgtattactgatgttgtctacaatcatactgctgctaatagtaaatggatccaggaacatccagaatgtgcctataatcttgtgaattctccacacttaaaacctgcctgggtcttagacagagcactttggcgtttctcctgtgatgttgcagaagggaaatacaaagaaaagggaatacctgctttgattgaaaatgatcaccatatgaattccatccgaaaaataatttgggaggatatttttccaaagcttaaactctgggaatttttccaagtagatgtcaacaaagcggttgagcaatttagaagacttcttacacaagaaaataggcgagtaaccaagtctgatccaaaccaacaccttacgattattcaagatcctgaatacagacggtttggctgtactgtagatatgaacattgcactaacgactttcataccacatgacaaggggccagcagcaattgaagaatgctgtaattggtttcataaaagaatggaggaattaaattcagagaagcatcgactcattaactatcatcaggaacaggcagttaattgccttttgggaaatgtgttttatgaacgactggctggccatggtccaaaactaggacctgtcactagaaagcatcctttagttaccaggtattttactttcccatttgaagagatagacttctccatggaagaatctatgattcatctgccaaataaagcttgttttctgatggcacacaatggatgggtaatgggagatgatcctcttcgaaactttgctgaaccgggttcagaagtttacctaaggagagaacttatttgctggggagacagtgttaaattacgctatgggaataaaccagaggactgtccttatctctgggcacacatgaaaaaatacactgaaataactgcaacttatttccagggagtacgtcttgataactgccactcaacacctcttcacgtagctgagtacatgttggatgctgctaggaatttgcaacccaatttatatgtagtagctgaactgttcacaggaagtgaagatctggacaatgtctttgttactagactgggcattagttccttaataagagaggcaatgagtgcatataatagtcatgaagagggcagattagtttaccgatatggaggagaacctgttggatcctttgttcagccctgtttgaggcctttaatgccagctattgcacatgccctgtttatggatattacgcatgataatgagtgtcctattgtgcatagatcagcgtatgatgctcttccaagtactacaattgtttctatggcatgttgtgctagtggaagtacaagaggctatgatgaattagtgcctcatcagatttcagtggtttctgaagaacggttttacactaagtggaatcctgaagcattgccttcaaacacaggtgaagttaatttccaaagcggcattattgcagccaggtgtgctatcagtaaacttcatcaggagcttggagccaagggttttattcaggtgtatgtggatcaagttgatgaagacatagtggcagtaacaagacactcacctagcatccatcagtctgttgtggctgtatctagaactgctttcaggaatcccaagacttcattttacagcaaggaagtgcctcaaatgtgcatccctggcaaaattgaagaagtagttcttgaagctagaactattgagagaaacacgaaaccttataggaaggatgagaattcaatcaatggaacaccagatatcacagtagaaattagagaacatattcagcttaatgaaagtaaaattgttaaacaagctggagttgccacaaaagggcccaatgaatatattcaagaaatagaatttgaaaacttgtctccaggaagtgttattatattcagagttagtcttgatccacatgcacaagtcgctgttggaattcttcgaaatcatctgacacaattcagtcctcactttaaatctggcagcctagctgttgacaatgcagatcctatattaaaaattccttttgcttctcttgcctccagattaactttggctgagctaaatcagatcctttaccgatgtgaatcagaagaaaaggaagatggtggagggtgctatgacataccaaactggtcagcccttaaatatgcaggtcttcaaggtttaatgtctgtattggcagaaataagaccaaagaatgacttggggcatcctttttgtaataatttgagatctggagattggatgattgactatgtcagtaaccggcttatttcacgatcaggaactattgctgaagttggtaaatggttgcaggctatgttcttctacctgaagcagatcccacgttaccttatcccatgttactttgatgctatattaattggtgcatataccactcttctggatacagcatggaagcagatgtcaagctttgttcagaatggttcaacctttgtgaaacacctttcattgggttcagttcaactgtgtggagtaggaaaattcccttccctgccaattctttcacctgccctaatggatgtaccttataggttaaatgagatcacaaaagaaaaggagcaatgttgtgtttctctagctgcaggcttacctcatttttcttctggtattttccgctgctggggaagggatacttttattgcacttagaggtatactgctgattactggacgctatgtagaagccaggaatattattttagcatttgcgggtaccctgaggcatggtctcattcctaatctactgggtgaagggatttatgccagatacaattgtcgggatgctgtgtggtggtggctgcagtgtatccaggattactgtaaaatggttccaaatggtctagacattctcaagtgcccagtttccagaatgtatcctacagatgattctgctcctttgcctgctggcacactggatcagccattgtttgaagtcatacaggaagcaatgcaaaaacacatgcagggcatacagttccgagaaaggaatgctggtccccagatagatcgaaacatgaaggacgaaggttttaatataactgcaggagttgatgaagaaacaggatttgtttatggaggaaatcgtttcaattgtggcacatggatggataaaatgggagaaagtgacagagctagaaacagaggaatcccagccacaccaagagatgggtctgctgtggaaattgtgggcctgagtaaatctgctgttcgctggttgctggaattatccaaaaaaaatattttcccttatcatgaagtcacagtaaaaagacatggaaaggctataaaggtctcatatgatgagtggaacagaaaaatacaagacaactttgaaaagctatttcatgtttccgaagacccttcagatttaaatgaaaagcatccaaatctggttcacaaacgtggcatatacaaagatagttatggagcttcaagtccttggtgtgactatcagctcaggcctaattttaccatagcaatggttgtggcccctgagctctttactacagaaaaagcagggaaagctttggagattgcagaaaaaaaattgcttggtccccttggcatgaaaactttagatccagatgatatggtttactgtggaatttatgacaatgcattagacaatgacaactacaatcttgctaaaggtttcaattatcaccaaggacctgagtggctgtggcctattgggtattttcttcgtgcaaaattatatttttccagattgatgggcccggagactactgcaaagactatagttttggttaaaaatgttctttcccgacattatgttcatcttgagagatccccttggaaaggacttccagaactgaccaatgagaatgcccagtactgtcctttcagctgtgaaacacaagcctggtcaattgctactattcttgagacactttatgatttatagtttattacagatattaagtatgcaattactgtattataggatgcaaggtcatcatatgtaaatgctatatgcacaggctcaagttgttttaaaaatctcatttattataatattgatgctcaattaggtaagattgtaaaagcattgattttttttaatgtacagaggtagatttcaatttgaatcagaaagaaatatcattaccaatgaaatgtgtttgagttcagtaagaattattcaaatgcctagaaatccatagtttggaaaataaaaatcatgtcatcttctatttgtacagaaatgaaaataaaatatgaaaataatgaaagaaatgaaaagatagcttttaattgtggtatatataatcttcagtaacaatacatactgaatacgctgtggttcattaatattaacaccacgtactatagtattcttagaatacagtgctcactgcatttaataaatatttaataaatgatgaatgatagaagtttccatctacaatatatgttcctaaatggagcacagatgttcaaactatgctttcattttttcactgatatattaatttttgtgtaatgaatgccaacagtatattttatatgatttacttatgtgaggaaacatgcaaagcattaggaaatttatttcctaaaaacagttttgtaaaattagtattgagttctattgagtattataagatagcttacattttcaaaatggaaattgtcggtcatatttctagaactttaaagaaaaaagaatgttatattagttttctaaaactcaactatctttagtcatgttcaaaaatctattgctagatcatagtagatactggttttctattaactcaaaacctacattgacaagtttaacattgagaagaatcttaacaaaaatatggatatgaattcagtagatatcttaaattcaataaaatcactggaagtttttcatgataacttattttaagatgccttaaaaatcttaaagtcacaaaaggaaaaaggtttttaacatttacatgagttaacattttttcatagaacttatttcctagatagaattttttactgttttttactgttttcttaagaaaacagttaaatcattatgcattcagttggaagaaagtagtggcaagaattctttcattgctatataatattcagtggctcatttatacctaataaaataatggtattttaaaataatgctactttcaaagtagcatttttttagttagtttacaggttacatacccaaaaccttaactatgactaagaaattaaagaagaaaaccagcaaactaaaacttctgggcagcaaaaatatataaatgcttcagatgtcaaatacccatgcttgaaagctcgtgtaatttactttaagattatctgcctgctcttcttcaaagctgaccttgctttagaaatagttttaactagcttagttttctggtttccaaaactaaaatagattaaatcctacaaatttaaggacagttgtgacagtaatctgaccactatctataaatacattggacattggtttccaaatctccctttctcttcagttccttccttgttcaatatatacccttctctaaactgtgcgggtaaaaggaatgactgtccttgagagaaccattagtttatcaaaggtttatgtagttttgttgctgtaccctaactttgatattcagggaggtaggaaaggtaacagaaaaccagcatatttaatcaaagcaagaagtaatcgctgacagttaaatgtgaccaaaaaaattaaaagttcacaatttttttaatgtagccatttggggttatctctagtaaggcagatacccacgttggtaaatttttaggatattgtgttgcactagaaaactaagtggttcatatttctaatgaggaagattaatgaaagaacattgttatattctgcgtggtatattttaaagtttaagaaggcatgttaaacattatttcctctatggtagttaaaatacagaattagatttttaacaggtgtcatttgactaaacgtttcggtagaatgcttcatacttgagtgatgctggataaggtattgtatttcaacaatggactatgccttggtttttcactaatcaaaatcaaaattactctttaacatgataaatgaatttaccagtttagtatgctgtggtattttaataagttttcaaagataattgggaaaacatgagactggtcatattgatgaatattgtaacatgtgaattgtgatccatttctgatatgtcttgaactactgtgtctagtaggcaaatgtcattgttacctctgtgtgttaagaaaataaaaatattttctaaaggtcg

SEQ ID NO: 13130 - DNA, 7367 bp, Homo sapiens
cccggaagtgggccagaggtacggtccgctcccacctggggcgagtgcgcgcacggccaggttgggtaccgggtgcgcccaggaacccgcgcgaggcgaagtcgctgagactctgcctgcttctcacccagctgcctcggcgctgccccggtcgctcgccgcccctccctttgcccttcacggcgcccggccctccttgggctgcggcttctgtgcgaggctgggcagccagcccttccccttctgtttctccccgtcccctccccccgaccgtagcaccagagtcgcgggtcctgcagtgccccagaagccgcacgtataactccctcggcgggtaactcattcgactgtggagttcttttaattcttatgaaagatttcaaatcctctggaagccaaaatgggacacagtaaacagattcgaattttacttctgaacgaaatggagaaactggaaaagaccctcttcagacttgaacaagggtatgagctacagttccgattaggcccaactttacagggaaaagcagttaccgtgtatacaaattacccatttcctggagaaacatttaatagagaaaaattccgttctctggattgggaaaatccaacagaaagagaagatgattctgataaatactgtaaacttaatctgcaacaatctggttcatttcagtattatttccttcaaggaaatgagaaaagtggtggaggttacatagttgtggaccccattttacgtgttggtgctgataatcatgtgctacccttggactgtgttactcttcagacatttttagctaagtgtttgggaccttttgatgaatgggaaagcagacttagggttgcaaaagaatcaggctacaacatgattcattttaccccattgcagactcttggactatctaggtcatgctactcccttgccaatcagttagaattaaatcctgacttttcaagacctaatagaaagtatacctggaatgatgttggacagctagtggaaaaattaaaaaaggaatggaatgttatttgtattactgatgttgtctacaatcatactgctgctaatagtaaatggatccaggaacatccagaatgtgcctataatcttgtgaattctccacacttaaaacctgcctgggtcttagacagagcactttggcgtttctcctgtgatgttgcagaagggaaatacaaagaaaagggaatacctgctttgattgaaaatgatcaccatatgaattccatccgaaaaataatttgggaggatatttttccaaagcttaaactctgggaatttttccaagtagatgtcaacaaagcggttgagcaatttagaagacttcttacacaagaaaataggcgagtaaccaagtctgatccaaaccaacaccttacgattattcaagatcctgaatacagacggtttggctgtactgtagatatgaacattgcactaacgactttcataccacatgacaaggggccagcagcaattgaagaatgctgtaattggtttcataaaagaatggaggaattaaattcagagaagcatcgactcattaactatcatcaggaacaggcagttaattgccttttgggaaatgtgttttatgaacgactggctggccatggtccaaaactaggacctgtcactagaaagcatcctttagttaccaggtattttactttcccatttgaagagatagacttctccatggaagaatctatgattcatctgccaaataaagcttgttttctgatggcacacaatggatgggtaatgggagatgatcctcttcgaaactttgctgaaccgggttcagaagtttacctaaggagagaacttatttgctggggagacagtgttaaattacgctatgggaataaaccagaggactgtccttatctctgggcacacatgaaaaaatacactgaaataactgcaacttatttccagggagtacgtcttgataactgccactcaacacctcttcacgtagctgagtacatgttggatgctgctaggaatttgcaacccaatttatatgtagtagctgaactgttcacaggaagtgaagatctggacaatgtctttgttactagactgggcattagttccttaataagagaggcaatgagtgcatataatagtcatgaagagggcagattagtttaccgatatggaggagaacctgttggatcctttgttcagccctgtttgaggcctttaatgccagctattgcacatgccctgtttatggatattacgcatgataatgagtgtcctattgtgcatagatcagcgtatgatgctcttccaagtactacaattgtttctatggcatgttgtgctagtggaagtacaagaggctatgatgaattagtgcctcatcagatttcagtggtttctgaagaacggttttacactaagtggaatcctgaagcattgccttcaaacacaggtgaagttaatttccaaagcggcattattgcagccaggtgtgctatcagtaaacttcatcaggagcttggagccaagggttttattcaggtgtatgtggatcaagttgatgaagacatagtggcagtaacaagacactcacctagcatccatcagtctgttgtggctgtatctagaactgctttcaggaatcccaagacttcattttacagcaaggaagtgcctcaaatgtgcatccctggcaaaattgaagaagtagttcttgaagctagaactattgagagaaacacgaaaccttataggaaggatgagaattcaatcaatggaacaccagatatcacagtagaaattagagaacatattcagcttaatgaaagtaaaattgttaaacaagctggagttgccacaaaagggcccaatgaatatattcaagaaatagaatttgaaaacttgtctccaggaagtgttattatattcagagttagtcttgatccacatgcacaagtcgctgttggaattcttcgaaatcatctgacacaattcagtcctcactttaaatctggcagcctagctgttgacaatgcagatcctatattaaaaattccttttgcttctcttgcctccagattaactttggctgagctaaatcagatcctttaccgatgtgaatcagaagaaaaggaagatggtggagggtgctatgacataccaaactggtcagcccttaaatatgcaggtcttcaaggtttaatgtctgtattggcagaaataagaccaaagaatgacttggggcatcctttttgtaataatttgagatctggagattggatgattgactatgtcagtaaccggcttatttcacgatcaggaactattgctgaagttggtaaatggttgcaggctatgttcttctacctgaagcagatcccacgttaccttatcccatgttactttgatgctatattaattggtgcatataccactcttctggatacagcatggaagcagatgtcaagctttgttcagaatggttcaacctttgtgaaacacctttcattgggttcagttcaactgtgtggagtaggaaaattcccttccctgccaattctttcacctgccctaatggatgtaccttataggttaaatgagatcacaaaagaaaaggagcaatgttgtgtttctctagctgcaggcttacctcatttttcttctggtattttccgctgctggggaagggatacttttattgcacttagaggtatactgctgattactggacgctatgtagaagccaggaatattattttagcatttgcgggtaccctgaggcatggtctcattcctaatctactgggtgaagggatttatgccagatacaattgtcgggatgctgtgtggtggtggctgcagtgtatccaggattactgtaaaatggttccaaatggtctagacattctcaagtgcccagtttccagaatgtatcctacagatgattctgctcctttgcctgctggcacactggatcagccattgtttgaagtcatacaggaagcaatgcaaaaacacatgcagggcatacagttccgagaaaggaatgctggtccccagatagatcgaaacatgaaggacgaaggttttaatataactgcaggagttgatgaagaaacaggatttgtttatggaggaaatcgtttcaattgtggcacatggatggataaaatgggagaaagtgacagagctagaaacagaggaatcccagccacaccaagagatgggtctgctgtggaaattgtgggcctgagtaaatctgctgttcgctggttgctggaattatccaaaaaaaatattttcccttatcatgaagtcacagtaaaaagacatggaaaggctataaaggtctcatatgatgagtggaacagaaaaatacaagacaactttgaaaagctatttcatgtttccgaagacccttcagatttaaatgaaaagcatccaaatctggttcacaaacgtggcatatacaaagatagttatggagcttcaagtccttggtgtgactatcagctcaggcctaattttaccatagcaatggttgtggcccctgagctctttactacagaaaaagcagggaaagctttggagattgcagaaaaaaaattgcttggtccccttggcatgaaaactttagatccagatgatatggtttactgtggaatttatgacaatgcattagacaatgacaactacaatcttgctaaaggtttcaattatcaccaaggacctgagtggctgtggcctattgggtattttcttcgtgcaaaattatatttttccagattgatgggcccggagactactgcaaagactatagttttggttaaaaatgttctttcccgacattatgttcatcttgagagatccccttggaaaggacttccagaactgaccaatgagaatgcccagtactgtcctttcagctgtgaaacacaagcctggtcaattgctactattcttgagacactttatgatttatagtttattacagatattaagtatgcaattactgtattataggatgcaaggtcatcatatgtaaatgctatatgcacaggctcaagttgttttaaaaatctcatttattataatattgatgctcaattaggtaagattgtaaaagcattgattttttttaatgtacagaggtagatttcaatttgaatcagaaagaaatatcattaccaatgaaatgtgtttgagttcagtaagaattattcaaatgcctagaaatccatagtttggaaaataaaaatcatgtcatcttctatttgtacagaaatgaaaataaaatatgaaaataatgaaagaaatgaaaagatagcttttaattgtggtatatataatcttcagtaacaatacatactgaatacgctgtggttcattaatattaacaccacgtactatagtattcttagaatacagtgctcactgcatttaataaatatttaataaatgatgaatgatagaagtttccatctacaatatatgttcctaaatggagcacagatgttcaaactatgctttcattttttcactgatatattaatttttgtgtaatgaatgccaacagtatattttatatgatttacttatgtgaggaaacatgcaaagcattaggaaatttatttcctaaaaacagttttgtaaaattagtattgagttctattgagtattataagatagcttacattttcaaaatggaaattgtcggtcatatttctagaactttaaagaaaaaagaatgttatattagttttctaaaactcaactatctttagtcatgttcaaaaatctattgctagatcatagtagatactggttttctattaactcaaaacctacattgacaagtttaacattgagaagaatcttaacaaaaatatggatatgaattcagtagatatcttaaattcaataaaatcactggaagtttttcatgataacttattttaagatgccttaaaaatcttaaagtcacaaaaggaaaaaggtttttaacatttacatgagttaacattttttcatagaacttatttcctagatagaattttttactgttttttactgttttcttaagaaaacagttaaatcattatgcattcagttggaagaaagtagtggcaagaattctttcattgctatataatattcagtggctcatttatacctaataaaataatggtattttaaaataatgctactttcaaagtagcatttttttagttagtttacaggttacatacccaaaaccttaactatgactaagaaattaaagaagaaaaccagcaaactaaaacttctgggcagcaaaaatatataaatgcttcagatgtcaaatacccatgcttgaaagctcgtgtaatttactttaagattatctgcctgctcttcttcaaagctgaccttgctttagaaatagttttaactagcttagttttctggtttccaaaactaaaatagattaaatcctacaaatttaaggacagttgtgacagtaatctgaccactatctataaatacattggacattggtttccaaatctccctttctcttcagttccttccttgttcaatatatacccttctctaaactgtgcgggtaaaaggaatgactgtccttgagagaaccattagtttatcaaaggtttatgtagttttgttgctgtaccctaactttgatattcagggaggtaggaaaggtaacagaaaaccagcatatttaatcaaagcaagaagtaatcgctgacagttaaatgtgaccaaaaaaattaaaagttcacaatttttttaatgtagccatttggggttatctctagtaaggcagatacccacgttggtaaatttttaggatattgtgttgcactagaaaactaagtggttcatatttctaatgaggaagattaatgaaagaacattgttatattctgcgtggtatattttaaagtttaagaaggcatgttaaacattatttcctctatggtagttaaaatacagaattagatttttaacaggtgtcatttgactaaacgtttcggtagaatgcttcatacttgagtgatgctggataaggtattgtatttcaacaatggactatgccttggtttttcactaatcaaaatcaaaattactctttaacatgataaatgaatttaccagtttagtatgctgtggtattttaataagttttcaaagataattgggaaaacatgagactggtcatattgatgaatattgtaacatgtgaattgtgatccatttctgatatgtcttgaactactgtgtctagtaggcaaatgtcattgttacctctgtgtgttaagaaaataaaaatattttctaaaggtcg

SEQ ID NO: 13131 - DNA, 7165 bp, Homo sapiens
ctgtctacggcagctattccagaggcaacaactgcttccctctgttctcatctccccattggtggctggcgacccgaatttgggaatggggagattgcccacctgttatctttgagcagactaatctcttgggtaactcattcgactgtggagttcttttaattcttatgaaagatttcaaatcctctggaagccaaaatgggacacagtaaacagattcgaattttacttctgaacgaaatggagaaactggaaaagaccctcttcagacttgaacaagggtatgagctacagttccgattaggcccaactttacagggaaaagcagttaccgtgtatacaaattacccatttcctggagaaacatttaatagagaaaaattccgttctctggattgggaaaatccaacagaaagagaagatgattctgataaatactgtaaacttaatctgcaacaatctggttcatttcagtattatttccttcaaggaaatgagaaaagtggtggaggttacatagttgtggaccccattttacgtgttggtgctgataatcatgtgctacccttggactgtgttactcttcagacatttttagctaagtgtttgggaccttttgatgaatgggaaagcagacttagggttgcaaaagaatcaggctacaacatgattcattttaccccattgcagactcttggactatctaggtcatgctactcccttgccaatcagttagaattaaatcctgacttttcaagacctaatagaaagtatacctggaatgatgttggacagctagtggaaaaattaaaaaaggaatggaatgttatttgtattactgatgttgtctacaatcatactgctgctaatagtaaatggatccaggaacatccagaatgtgcctataatcttgtgaattctccacacttaaaacctgcctgggtcttagacagagcactttggcgtttctcctgtgatgttgcagaagggaaatacaaagaaaagggaatacctgctttgattgaaaatgatcaccatatgaattccatccgaaaaataatttgggaggatatttttccaaagcttaaactctgggaatttttccaagtagatgtcaacaaagcggttgagcaatttagaagacttcttacacaagaaaataggcgagtaaccaagtctgatccaaaccaacaccttacgattattcaagatcctgaatacagacggtttggctgtactgtagatatgaacattgcactaacgactttcataccacatgacaaggggccagcagcaattgaagaatgctgtaattggtttcataaaagaatggaggaattaaattcagagaagcatcgactcattaactatcatcaggaacaggcagttaattgccttttgggaaatgtgttttatgaacgactggctggccatggtccaaaactaggacctgtcactagaaagcatcctttagttaccaggtattttactttcccatttgaagagatagacttctccatggaagaatctatgattcatctgccaaataaagcttgttttctgatggcacacaatggatgggtaatgggagatgatcctcttcgaaactttgctgaaccgggttcagaagtttacctaaggagagaacttatttgctggggagacagtgttaaattacgctatgggaataaaccagaggactgtccttatctctgggcacacatgaaaaaatacactgaaataactgcaacttatttccagggagtacgtcttgataactgccactcaacacctcttcacgtagctgagtacatgttggatgctgctaggaatttgcaacccaatttatatgtagtagctgaactgttcacaggaagtgaagatctggacaatgtctttgttactagactgggcattagttccttaataagagaggcaatgagtgcatataatagtcatgaagagggcagattagtttaccgatatggaggagaacctgttggatcctttgttcagccctgtttgaggcctttaatgccagctattgcacatgccctgtttatggatattacgcatgataatgagtgtcctattgtgcatagatcagcgtatgatgctcttccaagtactacaattgtttctatggcatgttgtgctagtggaagtacaagaggctatgatgaattagtgcctcatcagatttcagtggtttctgaagaacggttttacactaagtggaatcctgaagcattgccttcaaacacaggtgaagttaatttccaaagcggcattattgcagccaggtgtgctatcagtaaacttcatcaggagcttggagccaagggttttattcaggtgtatgtggatcaagttgatgaagacatagtggcagtaacaagacactcacctagcatccatcagtctgttgtggctgtatctagaactgctttcaggaatcccaagacttcattttacagcaaggaagtgcctcaaatgtgcatccctggcaaaattgaagaagtagttcttgaagctagaactattgagagaaacacgaaaccttataggaaggatgagaattcaatcaatggaacaccagatatcacagtagaaattagagaacatattcagcttaatgaaagtaaaattgttaaacaagctggagttgccacaaaagggcccaatgaatatattcaagaaatagaatttgaaaacttgtctccaggaagtgttattatattcagagttagtcttgatccacatgcacaagtcgctgttggaattcttcgaaatcatctgacacaattcagtcctcactttaaatctggcagcctagctgttgacaatgcagatcctatattaaaaattccttttgcttctcttgcctccagattaactttggctgagctaaatcagatcctttaccgatgtgaatcagaagaaaaggaagatggtggagggtgctatgacataccaaactggtcagcccttaaatatgcaggtcttcaaggtttaatgtctgtattggcagaaataagaccaaagaatgacttggggcatcctttttgtaataatttgagatctggagattggatgattgactatgtcagtaaccggcttatttcacgatcaggaactattgctgaagttggtaaatggttgcaggctatgttcttctacctgaagcagatcccacgttaccttatcccatgttactttgatgctatattaattggtgcatataccactcttctggatacagcatggaagcagatgtcaagctttgttcagaatggttcaacctttgtgaaacacctttcattgggttcagttcaactgtgtggagtaggaaaattcccttccctgccaattctttcacctgccctaatggatgtaccttataggttaaatgagatcacaaaagaaaaggagcaatgttgtgtttctctagctgcaggcttacctcatttttcttctggtattttccgctgctggggaagggatacttttattgcacttagaggtatactgctgattactggacgctatgtagaagccaggaatattattttagcatttgcgggtaccctgaggcatggtctcattcctaatctactgggtgaagggatttatgccagatacaattgtcgggatgctgtgtggtggtggctgcagtgtatccaggattactgtaaaatggttccaaatggtctagacattctcaagtgcccagtttccagaatgtatcctacagatgattctgctcctttgcctgctggcacactggatcagccattgtttgaagtcatacaggaagcaatgcaaaaacacatgcagggcatacagttccgagaaaggaatgctggtccccagatagatcgaaacatgaaggacgaaggttttaatataactgcaggagttgatgaagaaacaggatttgtttatggaggaaatcgtttcaattgtggcacatggatggataaaatgggagaaagtgacagagctagaaacagaggaatcccagccacaccaagagatgggtctgctgtggaaattgtgggcctgagtaaatctgctgttcgctggttgctggaattatccaaaaaaaatattttcccttatcatgaagtcacagtaaaaagacatggaaaggctataaaggtctcatatgatgagtggaacagaaaaatacaagacaactttgaaaagctatttcatgtttccgaagacccttcagatttaaatgaaaagcatccaaatctggttcacaaacgtggcatatacaaagatagttatggagcttcaagtccttggtgtgactatcagctcaggcctaattttaccatagcaatggttgtggcccctgagctctttactacagaaaaagcagggaaagctttggagattgcagaaaaaaaattgcttggtccccttggcatgaaaactttagatccagatgatatggtttactgtggaatttatgacaatgcattagacaatgacaactacaatcttgctaaaggtttcaattatcaccaaggacctgagtggctgtggcctattgggtattttcttcgtgcaaaattatatttttccagattgatgggcccggagactactgcaaagactatagttttggttaaaaatgttctttcccgacattatgttcatcttgagagatccccttggaaaggacttccagaactgaccaatgagaatgcccagtactgtcctttcagctgtgaaacacaagcctggtcaattgctactattcttgagacactttatgatttatagtttattacagatattaagtatgcaattactgtattataggatgcaaggtcatcatatgtaaatgctatatgcacaggctcaagttgttttaaaaatctcatttattataatattgatgctcaattaggtaagattgtaaaagcattgattttttttaatgtacagaggtagatttcaatttgaatcagaaagaaatatcattaccaatgaaatgtgtttgagttcagtaagaattattcaaatgcctagaaatccatagtttggaaaataaaaatcatgtcatcttctatttgtacagaaatgaaaataaaatatgaaaataatgaaagaaatgaaaagatagcttttaattgtggtatatataatcttcagtaacaatacatactgaatacgctgtggttcattaatattaacaccacgtactatagtattcttagaatacagtgctcactgcatttaataaatatttaataaatgatgaatgatagaagtttccatctacaatatatgttcctaaatggagcacagatgttcaaactatgctttcattttttcactgatatattaatttttgtgtaatgaatgccaacagtatattttatatgatttacttatgtgaggaaacatgcaaagcattaggaaatttatttcctaaaaacagttttgtaaaattagtattgagttctattgagtattataagatagcttacattttcaaaatggaaattgtcggtcatatttctagaactttaaagaaaaaagaatgttatattagttttctaaaactcaactatctttagtcatgttcaaaaatctattgctagatcatagtagatactggttttctattaactcaaaacctacattgacaagtttaacattgagaagaatcttaacaaaaatatggatatgaattcagtagatatcttaaattcaataaaatcactggaagtttttcatgataacttattttaagatgccttaaaaatcttaaagtcacaaaaggaaaaaggtttttaacatttacatgagttaacattttttcatagaacttatttcctagatagaattttttactgttttttactgttttcttaagaaaacagttaaatcattatgcattcagttggaagaaagtagtggcaagaattctttcattgctatataatattcagtggctcatttatacctaataaaataatggtattttaaaataatgctactttcaaagtagcatttttttagttagtttacaggttacatacccaaaaccttaactatgactaagaaattaaagaagaaaaccagcaaactaaaacttctgggcagcaaaaatatataaatgcttcagatgtcaaatacccatgcttgaaagctcgtgtaatttactttaagattatctgcctgctcttcttcaaagctgaccttgctttagaaatagttttaactagcttagttttctggtttccaaaactaaaatagattaaatcctacaaatttaaggacagttgtgacagtaatctgaccactatctataaatacattggacattggtttccaaatctccctttctcttcagttccttccttgttcaatatatacccttctctaaactgtgcgggtaaaaggaatgactgtccttgagagaaccattagtttatcaaaggtttatgtagttttgttgctgtaccctaactttgatattcagggaggtaggaaaggtaacagaaaaccagcatatttaatcaaagcaagaagtaatcgctgacagttaaatgtgaccaaaaaaattaaaagttcacaatttttttaatgtagccatttggggttatctctagtaaggcagatacccacgttggtaaatttttaggatattgtgttgcactagaaaactaagtggttcatatttctaatgaggaagattaatgaaagaacattgttatattctgcgtggtatattttaaagtttaagaaggcatgttaaacattatttcctctatggtagttaaaatacagaattagatttttaacaggtgtcatttgactaaacgtttcggtagaatgcttcatacttgagtgatgctggataaggtattgtatttcaacaatggactatgccttggtttttcactaatcaaaatcaaaattactctttaacatgataaatgaatttaccagtttagtatgctgtggtattttaataagttttcaaagataattgggaaaacatgagactggtcatattgatgaatattgtaacatgtgaattgtgatccatttctgatatgtcttgaactactgtgtctagtaggcaaatgtcattgttacctctgtgtgttaagaaaataaaaatattttctaaaggtcg

SEQ ID NO: 13132 - DNA, 7105 bp, Homo sapiens
ctgtctacggcagctattccagaggcaacaactgcttccctctgttctcatctccccattggtggctggcgacccgaatttgggaatggggagattgcccacctgttatctttgagcagactaatctcttaagccaaaatgggacacagtaaacagattcgaattttacttctgaacgaaatggagaaactggaaaagaccctcttcagacttgaacaagggtatgagctacagttccgattaggcccaactttacagggaaaagcagttaccgtgtatacaaattacccatttcctggagaaacatttaatagagaaaaattccgttctctggattgggaaaatccaacagaaagagaagatgattctgataaatactgtaaacttaatctgcaacaatctggttcatttcagtattatttccttcaaggaaatgagaaaagtggtggaggttacatagttgtggaccccattttacgtgttggtgctgataatcatgtgctacccttggactgtgttactcttcagacatttttagctaagtgtttgggaccttttgatgaatgggaaagcagacttagggttgcaaaagaatcaggctacaacatgattcattttaccccattgcagactcttggactatctaggtcatgctactcccttgccaatcagttagaattaaatcctgacttttcaagacctaatagaaagtatacctggaatgatgttggacagctagtggaaaaattaaaaaaggaatggaatgttatttgtattactgatgttgtctacaatcatactgctgctaatagtaaatggatccaggaacatccagaatgtgcctataatcttgtgaattctccacacttaaaacctgcctgggtcttagacagagcactttggcgtttctcctgtgatgttgcagaagggaaatacaaagaaaagggaatacctgctttgattgaaaatgatcaccatatgaattccatccgaaaaataatttgggaggatatttttccaaagcttaaactctgggaatttttccaagtagatgtcaacaaagcggttgagcaatttagaagacttcttacacaagaaaataggcgagtaaccaagtctgatccaaaccaacaccttacgattattcaagatcctgaatacagacggtttggctgtactgtagatatgaacattgcactaacgactttcataccacatgacaaggggccagcagcaattgaagaatgctgtaattggtttcataaaagaatggaggaattaaattcagagaagcatcgactcattaactatcatcaggaacaggcagttaattgccttttgggaaatgtgttttatgaacgactggctggccatggtccaaaactaggacctgtcactagaaagcatcctttagttaccaggtattttactttcccatttgaagagatagacttctccatggaagaatctatgattcatctgccaaataaagcttgttttctgatggcacacaatggatgggtaatgggagatgatcctcttcgaaactttgctgaaccgggttcagaagtttacctaaggagagaacttatttgctggggagacagtgttaaattacgctatgggaataaaccagaggactgtccttatctctgggcacacatgaaaaaatacactgaaataactgcaacttatttccagggagtacgtcttgataactgccactcaacacctcttcacgtagctgagtacatgttggatgctgctaggaatttgcaacccaatttatatgtagtagctgaactgttcacaggaagtgaagatctggacaatgtctttgttactagactgggcattagttccttaataagagaggcaatgagtgcatataatagtcatgaagagggcagattagtttaccgatatggaggagaacctgttggatcctttgttcagccctgtttgaggcctttaatgccagctattgcacatgccctgtttatggatattacgcatgataatgagtgtcctattgtgcatagatcagcgtatgatgctcttccaagtactacaattgtttctatggcatgttgtgctagtggaagtacaagaggctatgatgaattagtgcctcatcagatttcagtggtttctgaagaacggttttacactaagtggaatcctgaagcattgccttcaaacacaggtgaagttaatttccaaagcggcattattgcagccaggtgtgctatcagtaaacttcatcaggagcttggagccaagggttttattcaggtgtatgtggatcaagttgatgaagacatagtggcagtaacaagacactcacctagcatccatcagtctgttgtggctgtatctagaactgctttcaggaatcccaagacttcattttacagcaaggaagtgcctcaaatgtgcatccctggcaaaattgaagaagtagttcttgaagctagaactattgagagaaacacgaaaccttataggaaggatgagaattcaatcaatggaacaccagatatcacagtagaaattagagaacatattcagcttaatgaaagtaaaattgttaaacaagctggagttgccacaaaagggcccaatgaatatattcaagaaatagaatttgaaaacttgtctccaggaagtgttattatattcagagttagtcttgatccacatgcacaagtcgctgttggaattcttcgaaatcatctgacacaattcagtcctcactttaaatctggcagcctagctgttgacaatgcagatcctatattaaaaattccttttgcttctcttgcctccagattaactttggctgagctaaatcagatcctttaccgatgtgaatcagaagaaaaggaagatggtggagggtgctatgacataccaaactggtcagcccttaaatatgcaggtcttcaaggtttaatgtctgtattggcagaaataagaccaaagaatgacttggggcatcctttttgtaataatttgagatctggagattggatgattgactatgtcagtaaccggcttatttcacgatcaggaactattgctgaagttggtaaatggttgcaggctatgttcttctacctgaagcagatcccacgttaccttatcccatgttactttgatgctatattaattggtgcatataccactcttctggatacagcatggaagcagatgtcaagctttgttcagaatggttcaacctttgtgaaacacctttcattgggttcagttcaactgtgtggagtaggaaaattcccttccctgccaattctttcacctgccctaatggatgtaccttataggttaaatgagatcacaaaagaaaaggagcaatgttgtgtttctctagctgcaggcttacctcatttttcttctggtattttccgctgctggggaagggatacttttattgcacttagaggtatactgctgattactggacgctatgtagaagccaggaatattattttagcatttgcgggtaccctgaggcatggtctcattcctaatctactgggtgaagggatttatgccagatacaattgtcgggatgctgtgtggtggtggctgcagtgtatccaggattactgtaaaatggttccaaatggtctagacattctcaagtgcccagtttccagaatgtatcctacagatgattctgctcctttgcctgctggcacactggatcagccattgtttgaagtcatacaggaagcaatgcaaaaacacatgcagggcatacagttccgagaaaggaatgctggtccccagatagatcgaaacatgaaggacgaaggttttaatataactgcaggagttgatgaagaaacaggatttgtttatggaggaaatcgtttcaattgtggcacatggatggataaaatgggagaaagtgacagagctagaaacagaggaatcccagccacaccaagagatgggtctgctgtggaaattgtgggcctgagtaaatctgctgttcgctggttgctggaattatccaaaaaaaatattttcccttatcatgaagtcacagtaaaaagacatggaaaggctataaaggtctcatatgatgagtggaacagaaaaatacaagacaactttgaaaagctatttcatgtttccgaagacccttcagatttaaatgaaaagcatccaaatctggttcacaaacgtggcatatacaaagatagttatggagcttcaagtccttggtgtgactatcagctcaggcctaattttaccatagcaatggttgtggcccctgagctctttactacagaaaaagcagggaaagctttggagattgcagaaaaaaaattgcttggtccccttggcatgaaaactttagatccagatgatatggtttactgtggaatttatgacaatgcattagacaatgacaactacaatcttgctaaaggtttcaattatcaccaaggacctgagtggctgtggcctattgggtattttcttcgtgcaaaattatatttttccagattgatgggcccggagactactgcaaagactatagttttggttaaaaatgttctttcccgacattatgttcatcttgagagatccccttggaaaggacttccagaactgaccaatgagaatgcccagtactgtcctttcagctgtgaaacacaagcctggtcaattgctactattcttgagacactttatgatttatagtttattacagatattaagtatgcaattactgtattataggatgcaaggtcatcatatgtaaatgctatatgcacaggctcaagttgttttaaaaatctcatttattataatattgatgctcaattaggtaagattgtaaaagcattgattttttttaatgtacagaggtagatttcaatttgaatcagaaagaaatatcattaccaatgaaatgtgtttgagttcagtaagaattattcaaatgcctagaaatccatagtttggaaaataaaaatcatgtcatcttctatttgtacagaaatgaaaataaaatatgaaaataatgaaagaaatgaaaagatagcttttaattgtggtatatataatcttcagtaacaatacatactgaatacgctgtggttcattaatattaacaccacgtactatagtattcttagaatacagtgctcactgcatttaataaatatttaataaatgatgaatgatagaagtttccatctacaatatatgttcctaaatggagcacagatgttcaaactatgctttcattttttcactgatatattaatttttgtgtaatgaatgccaacagtatattttatatgatttacttatgtgaggaaacatgcaaagcattaggaaatttatttcctaaaaacagttttgtaaaattagtattgagttctattgagtattataagatagcttacattttcaaaatggaaattgtcggtcatatttctagaactttaaagaaaaaagaatgttatattagttttctaaaactcaactatctttagtcatgttcaaaaatctattgctagatcatagtagatactggttttctattaactcaaaacctacattgacaagtttaacattgagaagaatcttaacaaaaatatggatatgaattcagtagatatcttaaattcaataaaatcactggaagtttttcatgataacttattttaagatgccttaaaaatcttaaagtcacaaaaggaaaaaggtttttaacatttacatgagttaacattttttcatagaacttatttcctagatagaattttttactgttttttactgttttcttaagaaaacagttaaatcattatgcattcagttggaagaaagtagtggcaagaattctttcattgctatataatattcagtggctcatttatacctaataaaataatggtattttaaaataatgctactttcaaagtagcatttttttagttagtttacaggttacatacccaaaaccttaactatgactaagaaattaaagaagaaaaccagcaaactaaaacttctgggcagcaaaaatatataaatgcttcagatgtcaaatacccatgcttgaaagctcgtgtaatttactttaagattatctgcctgctcttcttcaaagctgaccttgctttagaaatagttttaactagcttagttttctggtttccaaaactaaaatagattaaatcctacaaatttaaggacagttgtgacagtaatctgaccactatctataaatacattggacattggtttccaaatctccctttctcttcagttccttccttgttcaatatatacccttctctaaactgtgcgggtaaaaggaatgactgtccttgagagaaccattagtttatcaaaggtttatgtagttttgttgctgtaccctaactttgatattcagggaggtaggaaaggtaacagaaaaccagcatatttaatcaaagcaagaagtaatcgctgacagttaaatgtgaccaaaaaaattaaaagttcacaatttttttaatgtagccatttggggttatctctagtaaggcagatacccacgttggtaaatttttaggatattgtgttgcactagaaaactaagtggttcatatttctaatgaggaagattaatgaaagaacattgttatattctgcgtggtatattttaaagtttaagaaggcatgttaaacattatttcctctatggtagttaaaatacagaattagatttttaacaggtgtcatttgactaaacgtttcggtagaatgcttcatacttgagtgatgctggataaggtattgtatttcaacaatggactatgccttggtttttcactaatcaaaatcaaaattactctttaacatgataaatgaatttaccagtttagtatgctgtggtattttaataagttttcaaagataattgggaaaacatgagactggtcatattgatgaatattgtaacatgtgaattgtgatccatttctgatatgtcttgaactactgtgtctagtaggcaaatgtcattgttacctctgtgtgttaagaaaataaaaatattttctaaaggtcg

SEQ ID NO: 13133 - DNA, 1027 bp, Homo sapiens
gactcccaagatggcggacctactgggctccatcctgagctccatggagaagccacccagcctcggtgaccaggagactcggcgcaaggcccgagaacaggccgcccgcctgaagaaactacaagagcaagagaaacaacagaaagtggagtttcgtaaaaggatggagaaggaggtgtcagatttcattcaagacagtgggcagatcaagaaaaagtttcagccaatgaacaagatcgagaggagcatactacatgatgtggtggaagtggctggcctgacatccttctcctttggggaagatgatgactgtcgctatgtcatgatcttcaaaaaggagtttgcaccctcagatgaagagctagactcttaccgtcgtggagaggaatgggacccccagaaggctgaggagaagcggaagctgaaggagctggcccagaggcaagaggaggaggcagcccagcaggggcctgtggtggtgagccctgccagcgactacaaggacaagtacagccacctcatcggcaagggagcagccaaagacgcagcccacatgctacaggccaataagacctacggctgtgtgcccgtggccaataagagggacacacgctccattgaagaggctatgaatgagatcagagccaagaagcgtctgcggcagagtggggaagagttgccgccaacctctaggcgccccgcccagctccctttgacccctggggcagggcagggggcagggagagacaaggctgctgctattagagcccatcctggagccccacctctgaaccacctcctaccagctgtccctcaggctgggggaaaacaggtgtttgatttgtcaccgttggagcttggatatgtgcgtggcatgtgtgtgtgtgtgtgagagtgtgaatgcacaggtgggtatttaatctgtattattccccgttcttggaattttcttccccatggggctggggtactttacattcaataaatactgtttaacccaaaaaaaaaaaaaaaaaaaaaaaaaaaa

SEQ ID NO: 13134 - DNA, 2456 bp, Homo sapiens
aaaaaatggcagcgctggaggaagaattcacgttgtcttcggtagtcctgagcgccgggcctgaaggactcctaggcgtggagcagagcgacaaaacagaccagtttctagtgacagacagcggcaggacagtcatcctctataaggtttctgatcagaaacccttggggagctggtcagtgaaacaaggtcaaattataacatgtccagctgtgtgcaactttcaaactggagagtatgttgttgtacacgataataaggttttaagaatatggaataatgaagatgtaaacctggataaagtatttaaagctacattgtcagcagaagtatataggatactttcagtgcaagggacagaacccttggtgctcttcaaggaaggtgctgttcgtggtttagaggccttgcttgcagacccccagcagaaaattgaaactgttatctctgatgaagaagtgattaaatggacaaagtttttcgtagtattcagacatcctgttttaatttttattactgaaaaacatggaaattactttgcttacgtgcaaatgtttaactcacgtatcttaaccaaatatacactcttacttggacaagacgaaaactctgttataaagagttttactgcatctgtagatcggaaattcatctctttgatgtcattaagctctgatggttgtatatatgaaaccttgataccaatacgtccagctgacccagaaaaaaatcagagcttagttaaatcactgctgctcaaggctgttgtatctggtaacgctcgaaatggagttgcactcactgccctggatcaggatcacgtcgcagtcctaggaagtccactagcagcttctaaggaatgcctctctgtatggaacataaaatttcaaacactacagacttcaaaagagttaccacaagggaccagtggtcaactctggtattatggagaacatttgtttatgctacatggaaaatctctaactgtgattccatacaagtgtgaagtgtcatcattagcaggtgctcttggaaaactcaagcatagtcaagatccaggaactcatgtcgtgtcccattttgtaaactgggagacacctcaaggatgtggacttgggttccagaactcagagcagtcaagaagaattttaaggagacgaaaaattgaagtgagtttacagccagaggttccaccatccaaacaacttttgtcaaccataatgaaagattcagaaaaacacattgaagtagaagtacggaaatttttggctctgaagcagacacctgactttcatactgtcattggggacacagtaacaggacttctggaaaggtgtaaagcagaaccatcattttatccccggaactgtctgatgcagcttatccaaacgcatgtgctttcttacagtttgtgccccgacttaatggagattgccttaaaaaagaaagatgtacagttgttacaactctgtctacagcagttccctgacattcctgaatcagtcacctgtgcttgcttaaaaattttcttgagcattggtgatgacagtcttcaagaaacagatgttaatatggagtcagtttttgactatagtataaattctgtacatgatgagaaaatggaagagcaaactgaaattcttcaaaatggcttcaatcctgaagaagataaatgcaataactgtgatcaagagttaaataaaaagccccaggacgaaacaaaggagagcacttcatgccctgtggtacaaaaaagagcagctctacttaatgcaattcttcattcagcatatagcgagacatttcttctgcctcatttgaaagacatcccagcacagcatatcacgctgtttcttaagtatttgtatttcctgtacctgaagtgtagcgaaaatgctactatgactcttcctggaatacacccacctaccttgaaccagattatggattggatatgtctacttctggatgcgaattttactgttgttgtaatgatgccagaagcaaagaggctactgataaatctttacaagcttgtaaaatctcagatatctgtttattctgagctcaacaagattgaagtaagttttcgggagctacagaaattaaatcaagaaaagaataatagaggattatattcaattgaagtgctggagctcttctgatattatcaattctccttcatagacattttataaagctcttttatgtgaactcttgcttcatccaggcaagaacggtgttttgtttgcgaccatctcagtgtcaagagaaacgtgtcagtgagtacctggaccatcacttaactgatgctccggggtaggactgcaggtttcacatgaacctgttctaggctgtggacattggtgtggagaggttctgcaattttttaaaaatatgtaactgggttgattttaagtaaaattatttgtgtattgataaaagtctaatttctt

SEQ ID NO: 13135 - DNA, 7719 bp, Homo sapiens
atgggcagccaggccctgcaggagtggggacagagggaacccggccggtggcccgaccctgcagggaagaaggacgtgcggcgagaagcatcggattcggggagggccgggacctggccgaggacagccaaggaaaaactaaagatcgacggggacacccgcctcccttcctcgccccaacggtttctcagaggctgtggggacttgcaccagaaacccaagttggaactaattctttctttcggaaggtgcaactcccctcccgcgagctccgcggtgccgggccgagattgccgagaggaagcggcgcagcgctgccgccaaggctcctcctgtcgccggtgcggccgggactacctggcggcgcggcgcgtgcagcgcgcagagtcccgggagcccacgcctccgcctccgcccccgccccctccgcctcccagtccacctcgcccgcccgccctctcgcccggcggagagcacagcccactccctcccacctgcggccgccgggccgccctccacccacacctctgccgcaggccggacccagtgcgcccgcccgtcggtcagtccaggccaggcgcccggcgggccgcgctcacgcagttggcgcaggaggccttacgctggcggcgcagtgcccgccccctgcgctctccccgccccctccctccctcgcaggggccgagcgaatgtagcccgcgagagaaaatggcggcggcggcggggaatcgcgcctcgtcgtcgggattcccgggcgccagggctacgagccctgaggcaggcggcggcggaggagccctcaaggcgagcagcgcgcccgcggctgccgcgggactgctgcgggaggcgggcagcgggggccgcgagcgggcggactggcggcggcggcagctgcgcaaagtgcggagtgtggagctggaccagctgcctgagcagccgctcttccttgccgcctcaccgccggcctcctcgacttccccgtcgccggagcccgcggacgcagcggggagtgggaccggcttccagcctgtggcggtgccgccgccccacggagccgcgagccgcggcggcgcccaccttaccgagtcggtggcggcgccggacagcggcgcctcgagtcccgcagcggccgagcccggggagaagcgggcgcccgccgccgagccgtctcctgcagcggcccccgccggtcgtgagatggagaataaagaaactctcaaagggttgcacaagatggatgatcgtccagaggaacgaatgatcagggagaaactgaaggcaacctgtatgccagcctggaagcacgaatggttggaaaggagaaataggcgagggcctgtggtggtaaaaccaatcccagttaaaggagatggatctgaaatgaatcacttagcagctgagtctccaggagaggtccaggcaagtgcggcttcaccagcttccaaaggccgacgcagtccttctcctggcaactccccatcaggtcgcacagtgaaatcagaatctccaggagtaaggagaaaaagagtttccccagtgccttttcagagtggcagaatcacaccaccccgaagagccccttcaccagatggcttctcaccatatagccctgaggaaacaaaccgccgtgttaacaaagtgatgcgggccagactgtacttactgcagcagatagggcctaactctttcctgattggaggagacagcccagacaataaataccgggtgtttattgggcctcagaactgcagctgtgcacgtggaacattctgtattcatctgctatttgtgatgctccgggtgtttcaactagaaccttcagacccaatgttatggagaaaaactttaaagaattttgaggttgagagtttgttccagaaatatcacagtaggcgtagctcaaggatcaaagctccatctcgtaacaccatccagaagtttgtttcacgcatgtcaaattctcatacattgtcatcatctagtacttctacgtctagttcagaaaacagcataaaggatgaagaggaacagatgtgtcctatttgcttgttgggcatgcttgatgaagaaagtcttacagtgtgtgaagacggctgcaggaacaagctgcaccaccactgcatgtcaatttgggcagaagagtgtagaagaaatagagaacctttaatatgtcccctttgtagatctaagtggagatctcatgatttctacagccacgagttgtcaagtcctgtggattccccttcttccctcagagctgcacagcagcaaaccgtacagcagcagcctttggctggatcacgaaggaatcaagagagcaattttaaccttactcattatggaactcagcaaatccctcctgcttacaaagatttagctgagccatggattcaggtgtttggaatggaactcgttggctgcttattttctagaaactggaatgtgagagagatggccctcaggcgtctttcccatgatgtcagtggggccctgctgttggcaaatggggagagcactggaaattctgggggcagcagtggaagcagcccgagtgggggagccaccagtgggtcttcccagaccagtatctcaggagatgtggtggaggcatgctgcagcgttctgtcaatggtctgtgctgaccctgtctacaaagtgtacgttgctgctttaaaaacattgagagccatgctggtatatactccttgccacagtttagcggaaagaatcaaacttcagagacttctccagccagttgtagacaccatcctagtcaaatgtgcagatgccaatagccgcacaagtcagctgtccatatcaacactgttggaactgtgcaaaggccaagcaggagagttggcagttggcagagaaatactaaaagctggatccattggtattggtggtgttgattatgtcttaaattgtattcttggaaaccaaactgaatcaaacaattggcaagaacttcttggccgcctttgtcttatagatagactgttgttggaatttcctgctgaattttatcctcatattgtcagtactgatgtttcacaagctgagcctgttgaaatcaggtataagaagctgctgtccctcttaacctttgctttgcagtccattgataattcccactcaatggttggcaaactttccagaaggatctacttgagttctgcaagaatggttactacagtaccccatgtgttttcaaaactgttagaaatgctgagtgtttccagttccactcacttcaccaggatgcgtcgccgtttgatggctattgcagatgaggtggaaattgccgaagccatccagttgggcgtagaagacactttggatggtcaacaggacagcttcttgcaggcatctgttcccaacaactatctggaaaccacagagaacagttcccctgagtgcacagtccatttagagaaaactggaaaaggattatgtgctacaaaattgagtgccagttcagaggacatttctgagagactggccagcatttcagtaggaccttctagttcaacaacaacaacaacaacaacaacagagcaaccaaagccaatggttcaaacaaaaggcagaccccacagtcagtgtttgaactcctctcctttatctcatcattcccaattaatgtttccagccttgtcaaccccttcttcttctaccccatctgtaccagctggcactgcaacagatgtctctaagcatagacttcagggattcattccctgcagaataccttctgcatctcctcaaacacagcgcaagttttctctacaattccacagaaactgtcctgaaaacaaagactcagataaactttccccagtctttactcagtcaagacccttgccctccagtaacatacacaggccaaagccatctagacctaccccaggtaatacaagtaaacagggagatccctcaaaaaatagcatgacacttgatctgaacagtagttccaaatgtgatgacagctttggctgtagcagcaatagtagtaatgctgttatacccagtgacgagacagtgttcaccccagtagaggagaaatgcagattagatgtcaatacagagctcaactccagtattgaggaccttcttgaagcatctatgccttcaagtgatacaacagtaacttttaagtcagaagttgctgtcctgtctcctgaaaaggctgaaaatgatgatacctacaaagatgatgtgaatcataatcaaaagtgcaaagagaagatggaagctgaagaagaagaagctttagcaattgccatggcaatgtcagcgtctcaggatgccctccccatagttcctcagctgcaggttgaaaatggagaagatatcatcattattcaacaggatacaccagagactctaccaggacataccaaagcaaaacaaccgtatagagaagacactgaatggctgaaaggtcaacagataggccttggagcattttcttcttgttatcaggctcaagatgtgggaactggaactttaatggctgttaaacaggtgacttatgtcagaaacacatcttctgagcaagaagaagtagtagaagcactaagagaagagataagaatgatgagccatctgaatcatccaaacatcattaggatgttgggagccacgtgtgagaagagcaattacaatctcttcattgaatggatggcagggggatcggtggctcatttgctgagtaaatatggagccttcaaagaatcagtagttattaactacactgaacagttactccgtggcctttcgtatctccatgaaaaccaaatcattcacagagatgtcaaaggtgccaatttgctaattgacagcactggtcagagactaagaattgcagattttggagctgcagccaggttggcatcaaaaggaactggtgcaggagagtttcagggacaattactggggacaattgcatttatggcacctgaggtactaagaggtcaacagtatggaaggagctgtgatgtatggagtgttggctgtgctattatagaaatggcttgtgcaaaaccaccatggaatgcagaaaaacactccaatcatcttgctttgatatttaagattgctagtgcaactactgctccatcgatcccttcacatttgtctcctggtttacgagatgtggctcttcgttgtttagaacttcaacctcaggacagacctccatcaagagagctactgaagcatccagtctttcgtactacatggtagccaattatgcagatcaactacagtagaaacaggatgctcaacaagagaaaaaaaacttgtggggaaccacattgatattctactggccatgatgccactgaacagctatgaacgaggccagtggggaacccttacctaagtatgtgattgacaaatcatgatctgtacctaagctcagtatgcaaaagcccaaactagtgcagaaactgtaaactgtgcctttcaaagaactggccctaggtgaacaggaaaacaatgaagtttgcatgactaaattgcagaagcataattttatttttttggagcactttttcagcaatattagcggctgaggggctcaggatctattttaatatttcaattattcttccatttcatatagtgatcacaagcagggggttctgcaattccgttcaaattttttgtcactggctataaaatcagtatctgcctcttttaggtcagagtatgctatgagtagcaatacatacatatatttttaaaagttgatacttctttatgacccacagttgacctttattttcttaaataccagggcagttgtggctcattgtgcattttactgttggcccattcatttcgtttttggaaattatggttttgtattttcatgtttatttacattcatttttgtttattcagggaaagctgatctttttttcaaaccagaaaaaaaaaatgaactagatatgaagtagagttcattaaatatcttgctattgtcagagtttttaaaatatagacttaattttgtttttttaaattggaatacaataaagtactacctacatttgagtcagtcaccactcttattgtgcaggttaagtacaagttaactaaaaataaactgtcctctctggtgcaactcacaaccaagatcaagattaccttaaaatttatttgaattttttagatgttttggttgtcaaactgtaggaaacttcacaacatttaagtcttactctgtatgtaacaatccatcattcaccttcactactggtagtaacatagagctgccattttccttttaccatgcatcatctctttacagtaggcctggcagatcattttttaaaaagattattcaactaccaatcagtaatgtttttaaacagtacatttgctttgaacttggaaaatgtgttcagaaagaaaaatggaattgaatttcatttatacactaattccttggattttgcacagttacctaacggttttagtctggagttaaattcagatgcatggaatcctgaaggaaaatggtagctttttaatctttttgtgtgtgtgtgagtcttttaaatcaagtactgattaactattaagtacaactttgagattttagttttaactcttcagaagccagtgtgaaatagaattggttattctcaaagactcaggataaactaaataagctatatatagagtacatttaaaatgtacaacacaaattggaaataaaataagttacaagataagtttacagggatatattgcttacaatttttaaaaggcagtttgttttttatgtgaatatgtttcttagtgaaattttacattcctttgttttggaagattggcgatatttgaagagttaaaaatagtacagaaatgtgaagtttggtatctctaaatgtgttgtacttgactttcttttttattttgtttttttttttttttgactacttagaattttcacaattctaataagattgtttccaagtctctcatgtgcaagctttaaaggatgcactcttgccattttatgtactggaagatcattggtcagatgaatactgtgtctgacaaaaatgtaaactgtataaactgaggaacctcagctaatcagtattactttgtagatcaccatgcccaccacatttcaaactcaaactatctgtagatttcaaaatccattgtgtttgagtttgtttgcagttccctcagcttgctggtaattgtggtgttttgttttttgttttgttttcaatgcaaatgtgatgtaatattcttattttctttggatcaaagctggactggaaattgtatcgtgtaattatttttgtgttcttaatgttatttggtactcaagttgtaaataacgtctactactgtttattccagtttctactacctcaggtgtcctatagatttttcttctaccaaagttcactttcacaatgaaattatatttgctgtgtgactatgattcctaagatttccagggcttaagggctaacttctattagcaccttactgtgtaagcaaatgttacaaaaaaaaaaaaaaaaaatctctgggttaagaaaatttggcttaaatgtatcctttgttattttaaatatattgagatattttaattaaaatttttaccccattgaaccgattttatagtatttgtacctattttggtgtttttgtctttatagtaaataaaagtttttgaacaaa

SEQ ID NO: 13136 - DNA, 1838 bp, Homo sapiens
ctcctgcgtaaaggagcatgagagcgtgggagttttgcagtggccgtggcgttcttcgtcgcgtctcggtcgggcgtcgctttctgcagctcctgtcagggagcgcgaggcctgttattaaccgcggagcgctttgtcacgaagtccctgtggcgtcttgaagaaggcattccccacccgccaaatggcgtccatgcccccgacgcccgaggcccagggaccaatactgtttgaggatctggctgtgtatttttctcaagaggagtgcgtgactctgcaccctgcccagaggtccctcagcaaagatggtacaaaagagtctttggaggatgcggctttgatgggagaggaaggcaagcctgagattaatcagcagttaagcctagagtctatggaacttgacgagcttgccttagaaaagtaccccattgctgcaccccttgtcccttacccagaaaaatcctctgaggatggagttggaaaccctgaagcgaaaatattaagtggaactcccacttacaagagaagggtcatcagccttttagttaccattgaaaaccacaccccattagtagaactctctgaatatttaggaaccaacacactttctgaaattcttgattctccctgggaaggagccaaaaatgtgtacaaatgtcctgagtgtgaccaaaacttcagcgatcattcatacctagttttgcatcagaaaattcattcaggagagaaaaaacataaatgtggtgactgtggaaagatcttcaatcatagagccaacctgaggacacacaggagaatccatactggtgagaaaccttataagtgtgccaagtgcagtgccagctttcgccagcactctcatctatcccgacacatgaatagccacgtaaaggagaagccctatacatgtagcatatgtggtagaggttttatgtggctcccaggattggcacagcatcagaaaagccacagtgctgaaaacacctacgaatctactaactgtgataaacattttaatgagaaaccaaatcttgctttgcctgaggaaacattcgtatcaggcccccagtaccagcacactaagtgcatgaagagcttcaggcagtccttatatcctgccctttccgagaagagccacgacgaggactctgaacgctgcagcgatgatggggacaatttcttctcattctcaaaattcaagcccttacagtgtcctgactgtgacatgacctttccttgtttctctgagcttatttcccatcagaacattcatacagaggaaaggccccataagtgcaaaacatgcgaggaaagttttgctttggactcagaacttgcatgccaccagaagagccacatgctagcggaaccttttaaatgtaccgtgtgtgggaaaactttcaagtcgaatttgcatctcattactcataagcgaactcacataaaaaacaccacgtaaagtaaatataacaaattgttattagtgattgggcttttcagtatctgtatggtgggaagcagttactgtatatgtcccaggcaatgtgctaagcactttacacacattcccatgtaatacttaattctcagcacaaccttgatttaggcagtatcatttccattttataagtagggatgcaaaatccgtgtcactaaactagtgaatgaacccaggatttgaactcagttactgtacaactgtgagccagaagaagatacacaacttttgtttaaattcaattttcattaaaatgaaggctcttgctaaagttaaaaaaaaaaaaaaaaaaaaaaaaaaaaaaaaaaaaaaaaaaaaaaaaaaaaaaaaaaaaaaaaaa

SEQ ID NO: 13137 - DNA, 4336 bp, Homo sapiens
acgtgcttaggagccatattgtcgctagtggccgctggggctgggaggggtgtgctagagaggcgcagcttctctgggcgtggtttttatcctgggggaaggatcggtggaatgtgaggggaggtggaggagatggcggcgacggcccgggaagatggcgccagcggtcaagagcgaggtcagcggggctgcgagcactatgacagaggatgtctcctaaaggcaccttgctgtgacaagctttatacttgccgcttgtgtcatgataacaatgaagatcatcaactagatcgctttaaagtgaaggaagtgcagtgcataaactgtgaaaaaattcaacatgcccaacagacttgtgaagaatgtagcacattgtttggagaatattattgcgatatatgccatttgtttgacaaagataagaagcagtatcactgtgaaaactgtggaatttgtaggattggtccaaaggaagattttttccattgtttgaaatgtaacttatgcctagctatgaatcttcaaggaagacacaagtgtattgaaaatgtgtcccgacagaattgtccaatatgtttggaggacattcacacatcccgtgttgttgctcatgtcttgccatgtggacatcttttacatagaacgtgttatgaagaaatgttgaaagaaggctacagatgtccattatgtatgcactctgctttagatatgaccaggtattggagacagctggatgatgaagtagcacagactcctatgccatcagaatatcagaacatgactgtggatattctctgcaatgactgtaatggacgatccactgttcagtttcatatattaggcatgaaatgtaagatttgtgaatcctataatactgctcaagctggaggacgtagaatttcactggatcagcaatgacgagcctacacagtactggagaacttggcattttctgatatagaaaaaggctttccttggtatcgtgttatcatgtgtcgtcatctatgcattagagttgatgtgttttgtactagtgtcacagcataaaatcatattacaagtacgtaaggattcagggtctcttgatagacttatcatagctctatattgaatgaaagccactgtgcttgtgttttgattggaaattcctttagtgtcagttttttggaagccaatgatgtttgccactgatacattcatagaagtgtattatattttcatgaagctttgctttaagtgacactacgcgtgcagttcatttctagttcttgatagaactgcacttaattttcagtagtagtcttgactttttaagggctgtgttatattaagttctcccttactgttaaaacctaattaaatatgctttagaattttctaagacagtcctctggatcctctaaatgtgaattttgatgtaataactgctaataaaattatattgaaactgttttatagaaagttttttccaaagttttctatgtttggctcaattagggcagtatcatcagttctataatgtaaaagaaattttctttcttttgaggtattccataaaagtagttgggaaaattattatgtaaaataataagactcttccaaagccttaataaaaacatcaacattgaaaacagttttttttaggttgcccaaaattatttcttcaaagagtcattcattccttcatttagcaagtatttattgagcaactgctatgtggcagatatgtttctagatgctgtagagacaacagtgaacaataaagataaaagtccttgtcctcacagcagtacattctattgttcatcatatttgatcaatgtactcatttttctttatgcaaggagtggatgtcttattgtaaatgaatagaatatttcttccctaagcgtgtgaaaataggggatggatgagtgggaagggcatgggatattcctggcaagatctctgatttcataatacttttttgggctcatgtagtggaattaaatatacctcttacttcaggaacaaagttaacaaatatgtttgatgatccagccgactttgacactgttatctccgtaatagctttaccattaggctaggatgtaaaatgtacatttatcagttgataagtacctattgagcaccagttgtatttccaactttgagctatttgaatcttctttgaataaggaagttagccttttaactagaaagcctaagagttctggcacatttatttcttcttttgttgaaatttattcacctagataaaggcagcagtttgggactcagatctttattttatcccaccttcttgtcttctgtattccactcttcttatgttctttcccttcatctgtttccttggcctggccagagcagcagtgctgatcttcatttgggaaaggatgttcctgggtattaccaattagtatacagataagtaaagactagttttccagatctaatacttttttttgaagtggttttgctctgtcatttaggctagagtgtagtgaagtgatcgtagctcactgcagccttgacttcctgggctgaactgatccttccacctcagcctcctgagtagctgggactacaggtgtgtgccaccatgcccagctaatttttaattgttttgtagaaacaaagtccaggctggtcttgaactcctgggctcaagcatttctcctacctcggccttccaagggctaggattacaggcatgagccactgtgcttggtccagatgtattactttttatgtttggtattattctgccaaaccaatcatgttattgtttttaatcattgaatcattggatctttaaataggagtgagtatataataataaggctcttctgttttcaacatctgtgctgggtcatgcattagcattaattactacaatgattctgtggggtaagtgttgtcctcatagacaagaaagctgaggtttagaggttaaaatgacacattgggggtaaataacagacactatatgttggagttgggaatcagatccaagtttgactccaaacccacttttaccacattgcttttgatctaaacttctattttgctaaaatacccctcacagctagtcatccatatcattgaagcgctcatgatttgatagattaacctttcatttttttaggtgactctagttagaaagtcttatttcacaatctgattgtttctttaacttaggatccaaacatgtccaaaataatgcagagtacatatgcaatcactcgtttatgctgtctagtcatgcacttaaagcaattttcaaatgtactcaaagtctctaggcttcggtacccagggttgcttcaagtatttgttcatgacacgtcaactcgatgattaaaatccttcaacacttctcattcacaataagaataaaatctacatcccttaccattcagtatgcaaaacttaaaatacataactttacccttaaatattttttctttctctgacttcataagtataggttatacctctataagaaagaaggtaaaaaactctcaacaatcccttctttcagagagaactactgttaacattttaacagacaacttcattcttttcctattcttttttataatgcttacaggaatgttaaatacttagacagatcttaagtacactagaattatctgtccctgaaataagttaggttgccctgccgcagaatttgtatctatagtttatttggattatttttgaaaaaagtaaaataacaatacccttacgaattttttggtgcatagcatctcagcttcttttatcattaaagatgtatgtataaaaaaaaaatgagtgtatatcaagttgttcatttcttagtttctggggtcttcttaaccagtacatagaactctttatgaattaactttagcttatgttggaagtagtagtttgtttatagtgtcatggattttaaaatcaaactcagtttttatttcttcactaaaacctattttcatatgatatacatgttaaatttcccttttattttggtcatgcatcaaaataaatttactaagtactaaagagccaacattattttataagtgcctggcaataggtattcactagttgaatagtttaatttgaaatgaattaattttaaatgggagttgttcaaaactatgccactttttcttttgtcctttgtgttattaaaatttaattgataattgtgtatattatatatatggagtacaatgtgatgttttgatatatgtttacagtgtagaatgattaaatcaatgtaataaatttattgcctcataccattttttgtggtaaaaaaaccaaaaaaaaaaaaaaaaaa

SEQ ID NO: 13138 - DNA, 818 bp, Homo sapiens
ccacgcgtccggcggggagccgggagcacggtggagcggtggagggcgtcactgggtttcggcgtctggcaagcggttcagctgtctgctccctagcagccggccttcgggtcgggcgtctccgccggctactgccgcttcagttctcccggtgtggccacgagtcgggttgcactgctgtgatccatcctcatctcctaaagatgcatcctgacttatctccacacttgcacactgaagaatgcaacgtcttgattaacttgcttaaggaatgtcacaaaaatcacaacattctgaaattttttggttattgtaatgatgttgatcgggagttgagaaaatgcctgaagaatgagtacgtagaaaacaggaccaagagcagggagcatggcattgcaatgcgaaagaaactttttaatcctccagaggaatccgaaaaataaattgtattttcactcgatgccttggctgagagaagacctaaagactctgggttgatacctgaaagaatcctgtcttatttggtctccataatcctttgaatggaaagtgacctgtgagagattgaaccatggagaaatatgaaaaccctggattctgagtatttgttgggcagggcgtttagtactgtctcccctttaccagcaaacctgacttcaccatgtttattccctttgcctacaaccagttaatatctgagtaacttatctccttcaatataataatttaaataaaaaaaaaaaaaaaaaaaaaaaaaaaaaaaaaaaaaaaaaaaaaaaaaaaaaaaaaaaaaaaaaaaaaaaaaaaaaaaaaaaaaa

SEQ ID NO: 13139 - DNA, 3569 bp, Homo sapiens
cgcccgcggccgggccgcattgtgacgtagcggggccgcggcagcgcctccaccgcccgcctacttcggctgaggctgttctgctcctgccgctgcggtccgtcggtcggtcagtcagtcccttcgcgctcctgagccgccggcgcgccgggcgccccgggaatttataagtatttgaccgtactcaaaatgtgcaaggaagaataatggaagcccctgaataccttgatttggatgaaattgactttagtgatgacatatcttattcagtcacatcactcaagacgatcccagaactgtgccgaagatgtgatacgcaaaacgaagacagatcagtttctagctctagctggaattgtggcatctcaactcttattacaaacacgcaaaagcccacaggaatcgctgatgtgtacagtaagttccgcccagtgaagcgggtttcgccactgaaacatcagccagagactctggagaacaatgaaagtgatgaccaaaagaaccagaaagtggttgagtaccagaaagggggtgagtctgacctgggcccccagcctcaggagcttggccctggagatggagtgggcggcccaccaggtaagagctctgagcccagcacatcgctgggtgaactggagcactacgacctcgacatggatgagattctggatgtgccttatattaaatccagtcagcagcttgcctcttttaccaaggtgacttcagaaaaaagaattttgggcttatgcacaaccatcaatggcctttctggcaaagcctgctctacaggaagttctgagagctcatcatccaacatggcaccattttgtgttctttctcccgtgaaaagccctcacttgagaaaagcatcagctgtcatccacgaccagcacaagctgtccactgaagaaaccgagatctcacctcctctggttaaatgtggctctgcatatgagcctgaaaaccagagtaaagacttcctaaacaagacatttagtgatcctcatggtcgaaaagttgagaagacaacaccagactgccagctcagggccttccacctacaatcctcagcagcagaatccaaaccagaagagcaggtcagtggcctaaaccggaccagctcccaaggcccagaagaaaggagtgagtatctgaaaaaagtgaaaagcatcttgaacattgttaaagaaggacagatctctctcctgccacacctagctgcagacaatctagacaaaattcacgacgaaaatggaaacaatctattacatattgcggcgtcacagggacacgcagagtgtctacagcacctcacttctttgatgggagaagactgcctcaatgagcgcaacactgagaagttgactccagcaggcctggccattaagaatggtcagttggagtgcgtacgctggatggtgagcgaaacagaagccattgcagaactgagttgttctaaggattttccaagccttattcattacgcaggttgctatggccaggaaaagattcttctgtggcttcttcagtttatgcaagaacagggcatctcgttggatgaagtagaccaggatggcaacagtgccgttcacgtagcctcacagcatggctaccttggatgcatacagaccttggttgaatatggagcaaatgtcaccatgcagaaccacgctggggaaaagccctcccagagcgccgagcggcaggggcacaccctgtgctccaggtacctggtggtggtggagacctgcatgtcgctggcctctcaagtggtgaagttaaccaagcagctaaaggaacaaacagtagaacgtgtcacgctgcagaaccaactccaacaatttctagaagcccagaaatcagagggcaagtcactcccttcttcacccagttcaccatcctcacctgcctccagaaagtcccagtggaaatctccagatgcagatgatgattctgtagccaaaagcaagccaggagtccaagaggggattcaggttcttggaagcctgtcagcctccagccgggctagacccaaagcaaaagatgaagattctgataaaatcttacgccagttattgggaaaggaaatctcagaaaatgtctgcacccaggaaaaactgtccttggaattccaggatgctcaggcttcctctagaaattctaaaaagatcccactggagaagagggaactgaagttagccaggctgagacagctgatgcagaggtcactgagtgagtctgacacagactccaacaactctgaggaccccaagactaccccagtgaggaaggctgaccgaccaaggccgcagcccattgtagaaagcgtagagagtatggacagcgcagaaagcctgcacctgatgattaagaaacacaccttggcatcagggggacgcaggtttcctttcagcatcaaggcctccaaatccctggatggccacagcccatctcccacctcagagagcagcgaaccagacttagaatcccagtatccaggctcagggagtattcctccaaaccagccctctggtgaccctcagcagcccagccctgacagtactgctgcccagaaagttgccacaagtcccaagagtgccctcaagtctccatcttccaagcgtaggacatctcagaacttaaaactgagagttacctttgaggagcctgtggtgcagatggagcagcctagccttgaactgaatggagaaaaagacaaagataagggcaggactctccagcggacctccacaagtaacgaatcgggggatcaactgaaaaggccttttggagcctttcgatctatcatggagacactaagtggcaaccaaaacaataataataactaccaggcagccaaccagctgaaaacctctacattgcccttgacctcacttgggaggaagacagatgccaagggaaaccctgccagctccgctagcaaaggaaagaataaggcagcataatgacatcaatagaaaaatgaagaaatcctacagcataaagcacattgctgagccagagtcaaaagaactcttcttgtaaatcactttttaaattttctctcactgatgccctttggaaattattggaaatttctggactatcctctttggaaagagaaccatgaaaacaatgcctcaccagcagaagaacagaatatcaggatgccttaaatttatagtagtagactgtaaaagattcattttggggtgatatctgtatatataacttgtttttttaaaagatgccgtttaaaagcatgattgggaaaatgtatgttttttaagagtagattgattcaccctacccacaggacattcaccaagccactgataccattttatatttcatcaattgcatgagtatttgctaatgttgattgaacctccctttccccataatgtgggcagatttggctcagctccttcatgagatcaggtcagtggtattgtttctgtcaagagtgttttttctgtcatttctactttttgtataaaggaaataaaacaatgttaacagccacctataagcttggggcacctactttctaacaaatctgtgatgtt

SEQ ID NO: 13140 - DNA, 9120 bp, Homo sapiens
gcggccgccgccctcgccaccccgcctgcccactcccgccgccgccccgctctcgctttccccccggcctcccctcgccccttcccctcccccttcccggcgcactcggggggctgggaacgagctgccatgtgatgcgcgtcccctccgcgagctttcggtgacccacgaactgcccacctcgccggctgccgggagggggctgcgagccgggaagacgcggggaagaggaggcggaaaaggacgcaaagttctccggcgagcgcattcattcacatagctcccagttttaacatttcgccacctactgaagacatcatttgggaccaagctgatgagcccttgaagcacagcagataagagtgttgctgttgatcatctttgcctgggaagttgaatgataaagccagaagaaagcatgctttctgatcatttgcagctgtctgcttcagaaagtgagggctccaggaatgaggagaatcttcaagaacttcctcgcactgtgacatgtctgatcccttgctcccatccctgcagcatgaacaaggtggacactcactgacctgtcacaaggttgccccacaaaactttggggtccatgtctgaatggattgccagagccttctcatctctcccttcgcccagttccctgcatcctaagactcgaaggcagcacaggacctggaaaaattacatggtgtgaacggcatgtctgtggatgagaagcctgactcccccatgtatgtgtatgagtccacagtccactgcaccaacatcctcctgggcctcaatgaccagcggaaaaaggatattctctgtgacgtgactttgatcgtggagaggaaggagttccgggcccaccgggctgtgctggccgcatgcagtgaatatttttggcaggcgctggttggacagacaaaaaatgatttggtggtcagcttgcctgaggaggtcacagccaggggctttgggccgctgttacagtttgcctacactgccaagctgttactcagcagagaaaacatccgcgaggtcatccgctgtgctgagttcctgcgcatgcacaacctggaggactcctgcttcagcttcctgcagacccagctcctgaacagtgaggatggcctgtttgtgtgccggaaggatgctgcgtgccagcgcccacacgaggactgcgagaactctgcaggagaggaggaggatgaagaggaggagacgatggattcagagacggccaagatggcttgccccagggaccagatgcttccagagcccatcagctttgaggccgccgccatccccgtagcagagaaggaagaagccctgctgcccgagcctgacgtgcccacagacaccaaggagagctcagaaaaggacgcgttaacgcagtaccccagatacaagaaataccagcttgcatgtaccaagaatgtctataatgcatcatcacacagtacctcaggttttgcaagcacattccgggaagataactctagcaacagcctcaagccggggcttgccagggggcagattaaaagtgagccgcccagtgaagagaatgaggaagagagcatcacgctctgcctgtctggagatgagcctgacgccaaggacagagcgggggatgtcgagatggaccggaaacagcccagccctgcccctacccccacggccccagctggggccgcctgcctggagagatccaggagcgtggcctcgccctcctgcttaaggtctctgttcagcataacgaaaagtgtggagctgtctggcctgcccagtacatctcagcagcactttgccaggagtccagcctgcccttttgacaaggggatcactcagggtgaccttaaaactgactacacccctttcacagggaattatggacagccccacgtgggccagaaggaggtgtccaacttcaccatggggtcgcccctcagggggcctgggttggaggctctctgtaaacaggagggagagctggaccggaggagcgtgatcttctcctccagcgcttgtgaccaagtgagcacctcggtgcattcttattctggggtgagcagtttggacaaagacctctctgagccggtgccaaagggtctgtgggtgggagccggccagtccctccccagctcgcaggcctactcccacggtgggctgatggccgaccacttgccaggaaggatgcggcccaacaccagctgcccggtgccaatcaaagtctgccctcgctcaccccccttggagaccaggaccaggacttccagctcctgctcttcctattcctacgcggaggacgggagcgggggctcaccctgcagcctccctctctgtgagttctcctcctcgccctgttcccagggagccagattccttgccacagaacatcaggaaccaggcctgatgggagatggaatgtacaaccaagtgcggccccaaattaaatgtgagcagtcttatggaaccaactccagtgacgaatccggatcgttctcggaagcagacagtgagtcgtgtcctgtgcaggacaggggccaggaggtaaaacttccttttcctgtagatcaaatcacagatcttccaaggaacgatttccagatgatgattaaaatgcacaagctaacctcagaacagttagagtttattcatgatgtccgacggcgcagcaagaaccgcatcgcggcccagcgctgccgcaaaaggaaactggactgtattcagaatttagaatgtgaaatccgcaaattggtgtgtgagaaagagaaactgttgtcagagaggaatcaactgaaagcatgcatgggggaactgttggacaacttctcctgcctttcccaggaagtttgccgagacatccagagccccgagcagatccaggccctgcatcggtattgccctgtcctcagacccatggacttgcccacggcctccagtattaaccctgcgcccttgggtgctgagcagaacattgcggcctcccaatgcgcagtgggggaaaacgtgccctgctgcttggagccaggcgcggctccccccggacccccctgggcacccagcaacacctccgagaattgtacctctgggaggagactagaaggcactgacccgggaaccttctcagagagaggacctcctcttgaacccaggagccaaacagtgaccgtggacttctgccaggaaatgactgataagtgtacaactgacgaacagcccaggaaagattatacctagtgactcggctctgcctcccagtccgcacacctctcccatccaggcgttcttcagtcagcctgtggcactgttcatctgctgtcccgaagaaaccgagaacacatttggtgcacactacagcggtcttagcagcaatactgttccgaagtatcctctcctcttctcgagcaggagtgatagttaccttcacaatggtgctaccccttgcccaggcaaggaaagacagcagtgatgacactgtctgtctgtggctcaatttcagtcttcacagggatagactacaacacctctaggccccaaccacggattttttttctcagtggcccatgtcacaaaccctatctcaggaatttcttctgaatgttcaatttttttcattgaagacagcttctatacacatcaaagttttatagctagactgtacatattatatataatatatatataaaaaatatatatatatatatatatccatatgcaaaagtcctgcatgcctcaactttctcatcctaaaactggaaacttatttctcatttagaaacaggttccaacattcctcttcttttgtctctgatgctagaactagtttggtaactgttaacgtggtcatttttcttgcttcacagttcaattttcaattcgtacttatttatggacaaaattcagtgttggaagctttttcccaaggttttatttcagatttctttttcgtttggtttggttttggcacctccaagtggtgtcatttgagcattgtaggtttgttttttgtttgtttggggggttttgtttgtttttgtttttgtttttgttttccttgcagatactgtacagtaatggtcaactttgccacttgcactgagttttgggtcaaacctattttcttaaatgaagttgtaacttcggtataactcaagtatactgtatattctttgcttttagttaaaaaagtaaaacattttagctaattaaaaagcactcaggtgataattatgtaggaaaaacaatcttgccaaataatgaattcatcctaggatgtgtagacaataatctgcttgaatatttttatatttcacctcctccccacctttccctaagcaaagtttaaacgcagatagagagttcagagttgatgctggatgttcagattcctaagtggggagagagtttggacatctcactcaaaagtacatcagaaaaacaggaatccgtgattttataccagaactcagcaggcattggctcctagaaatcaagttagaaagttttcacccagggagtaagtcccattcatttcaacacgtcctgaggcctcggcttgctcttggaagtggtgtgcagtaggacctgctcccctgaaggacggggccaaccagccactggctttcctgcccaggcttggcctcccaggacatctggcctgaggggatttgaatcacagccccgaaggtcctgccttcaccccattgggagagagcagggcatcctggcatctgcgatccatccctgacacaggctgacacattctttctcctttccttctccaaaggcttggagttttcttctgaggtttttctgccagtgtcttgtctgaaggcagacttcattctgaggctttggacaagctattcaccgggaaccctccctgtccccttcccgaatcacacacataccctaccctcacctgatgataattttctcttcttgctgcaaaactggttggcttgcaacccagagagagcagcttcccttggctctgggggccgtgttggccccagccacgtttacaggaaggtgtgccccagaggaggaggaatcagctccctcgctccagtggccttgggtccgggtctcactgagcagcccgagggccactccagcccggctggggaagagagtcctgaacggtttgatgtggggatggggtggtgggcagtggggaatagatggttgactttgtttctttatttgtgccattgtttggacaatattaaagctgcatgtaaaaggggaaattagtatatgatgtaggctaaaagtgaaatcatagtaacatatgttttagtattattaacttttttctgtacaaatattagcactaaatgtttaaatatgtatgaatgccagaaatttgtcagttcatgcagtaggataaaaaaaaaaaaaaaaaaaaaagggcttttctttttaaacagttccacttttaaaacctgcctctgggtttttgttttttcttgtttgtgtgtgtgtgtgtgtgtgtgtgtgtgtgtgtgtgtgtgtgtgtgtgtctgaaacagatcttgataaagctctgtgttggagctgctggtttttgttatggttgttggaatttcttggcctactaggacagttctgtgcttcaccatgaggtttgcctttgtggaaaactcgtgggtgacagtgagaatataaactcaatgtgaatcacgtgatacttcggcaggcgtgtgttacagtggagtcagctgacagtattttgctttttaactctattgttgcctttccaagtgacctctcctcttcttttaaaaaaagaacactttctgctcatatcataaccaggtccaacccagcttcttggcatgaggtttaccctggtaacaactcatgtgcaactggtagtcttgaccacattccatccatttcctcaggtttctgtggttcagtagcccagacctgtttggcagccatttctagcaggggcggggcctctttatttctctccaccctaactcagacctcaccttcctcccacccacccctgccttgcttttcttcctcttcccccaacctaacttctgccatgggaactggttaaaaacactgctctaaaaaccatcttccaatttcatagagatttctcacaagttatttcattcataatccaccatgaacagtgactagcttcgtgcagttgttcatgtgatgtgtgtgtgtcttttcctattcagaactatgtgcttgtcaaaattatttctgggttgattcaaagggaggacttgctggggaccagaatccaaacggcctcaagtggaattttaaaacctagcctgtctcttttccctgggatccctctgtcaaccccacgccttttaggaaaaagaaaagtgagtgaacagcaaggaagagtgtttgcacagtacagtaacatttggttgttcttaaggctcttttcttacaaaaataagagaccctccaaccacgggctgtttaggaggatgcctgcttgggtctccaaatggctggggtaggaatggttgttggggcagagccagtggaggtgagtgaccctgagactaatgaacatcccacctaaatccagtcctccccttggatctgcctttgtcctgcttgtgtatccaggcaacctcttttcaagttggtcaggctttggacaggtgagtgatttgctgtatgtgtttgtttctctgcgttacctgggggtgccttgattaaaatcgaactttattacatactgattctggaacaaaacagttagaaaaactttaaactttaaaaaaaaaaaaaccgacaaagttacgaggccatcctgctatttatcttctgagttcccagcaatgactcaggcatcagagatgatgctgcagtggaaaacctgactctgtgtgtctgcaactgaatgttgtgcgagtaatttattaactgtctttctaaaggtttgctgcttttaagatgcactataattcgggatgtaatccttacattgcttttccaaggaagggaacaaaagtctagtgattagtatgccaactgccactactccttcaaaaggagccaggaccagcgacaagactcatgagaggactggctaaagtgaagtgtgcacagtgtgaagtttaatgctgttgtcaagaggcctaaacccacattttctcttttaatattttatgattgccatcaaagaagaagaaaaagaaggaacagacaaaggtttgaaaatgataagcctgttaagacaccaaaaactcctgtcccgtgaagctgcttgacatcctgtggagtagcataatcctctcaaaatgaggaagagctgcctgcaaagctttctcaagtccctatttggctacctacttctctacattatgccccatttaaactaggagctgtcttagaaatgacttcaaactgcttcactattgcttacagtttaggaggagtctcagatccagaaggagcaagaatcaagtttggtcctcaaatgactgtaaatagactaaagaacaaggtgttttttgtttttgtttttgttttctaagaataaagctgttcgttgtatcatgagttagtgtttcttccccaaactgaagactgtgttggaagtgcaatttctggtgagtcagtccacaatacaatgccctgtgtggagttggtattcatacaggaaatctgtgtgcacgaggcattgtgtgttgaaagtgtatgtttatagtactgcctgagccatctcatgaccccagcgtccaaaaccgatgctgtagaacagaacatatctgtcacaaataggtgtgtgcaaatagcatttgtacatagaaaagtctcattgtggcagattgagcataaattattcaactgacggtgcaaaaacattacttgcaaagaaaagtttatagtattttcctacactccaccctgggagatgatatttctatcaaatgaatatcagtgcattttaaatgtaatatgaaaacgatgctgccattttgtgaagaatacccacttggttgcagaggccaactttcatagctttgatttaatgttgtgacacggtgtatgcattttgctgtcaagcaatggataaacagctctgactttcattctcattccagtttattgacctcagataaaacactggcccttcttagaagcagaagtgtgcaccaagaccattcatttcaggtagactcacattcagtgccaagtgctcccatgggaataatcagacgcatatgttgcgaaagagtgaagggacttggacaaagaggggttttcctacagatggatgctcagtcttctaccaaaacatgtttggaggcagaactatgacctccccttaagtcctaacaatgtattttgtgtgtgcaaatcctgggatgcccgtttcacgctctgacataaagacatggcacctctagtgagtgatcaggaagattccatatgcatttgggagcttcaggtgcttgttagacacagtgagccattcaaggcaagcaccacctttgctagtgaggccaagagagcctgtgacaatttgacaatttgttccagaaccagtctgatgcaagtgcacctctaatatatgccttacaaactccagaggccatattcaaaacagggtcttctcagtgtatgcaaggggctgcagcccctcttctcttcctccccaggttgaacaatacggacagttttcacacatatctacctgtataaccctctgtacctctcataactggtcaacgactgtaacaggttacatcaggtgtttttctacatactttttacacagattctatgcgattaatgtaatttaattcaatgcatcattttattgtactagttcttaggcttgtccttatttttttctaagtgattgtggtttttctcgtggtttttattgtaaaaaatgaaaggctgttgatgcttattctctgtaactaagaattttaccttttgggggaaaaaagcattgctatgaactaatggaattggaacttcatttactcattgtaaatacactattgtgcaaaaaaagttttcactcaattgaattgctagtgttaactgaattttgtctagacaccatttctgttgatgaaataaagacatatcattatgcattgtaaactg

SEQ ID NO: 13141 - DNA, 2545 bp, Homo sapiens
actcattcacataaaacgctgcgcggccggcggaatccccggcttctagggcggcgagcggccgggctggctatcgagcgagcggggcgggaacgcggagttgcgccgccgctcgggcgccgggctccgtcgcggccgcagccccgcgggtcgccctcccgtgcctcgcccgcggacaccctggccgtggacaccctggccgtgggcacccgcggggcgcgcggcgcggggccgctggccggcggcggcggcggcatgaaggtcacgtcgctcgacgggcgccagctgcgcaagatgctccgcaaggaggcggcggcgcgctgcgtggtgctcgactgccggccctatctggccttcgctgcctcgaacgtgcgcggctcgctcaacgtcaacctcaactcggtggtgctgcggcgggcccggggcggcgcggtgtcggcgcgctacgtgctgcccgacgaggcggcgcgcgcgcggctcctgcaggagggcggcggcggcgtcgcggccgtggtggtgctggaccagggcagccgccactggcagaagctgcgagaggagagcgccgcgcgtgtcgtcctcacctcgctactcgcttgcctacccgccggcccgcgggtctacttcctcaaagggggatatgagactttctactcggaatatcctgagtgttgcgtggatgtaaaacccatttcacaagagaagattgagagtgagagagccctcatcagccagtgtggaaaaccagtggtaaatgtcagctacaggccagcttatgaccagggtggcccagttgaaatccttcccttcctctaccttggaagtgcctaccatgcatccaagtgcgagttcctcgccaacctgcacatcacagccctgctgaatgtctcccgacggacctccgaggcctgcgcgacccacctacactacaaatggatccctgtggaagacagccacacggctgacattagctcccactttcaagaagcaatagacttcattgactgtgtcagggaaaagggaggcaaggtcctggtccactgtgaggctgggatctcccgttcacccaccatctgcatggcttaccttatgaagaccaagcagttccgcctgaaggaggccttcgattacatcaagcagaggaggagcatggtctcgcccaactttggcttcatgggccagctcctgcagtacgaatctgagatcctgccctccacgcccaacccccagcctccctcctgccaaggggaggcagcaggctcttcactgataggccatttgcagacactgagccctgacatgcagggtgcctactgcacattccctgcctcggtgctggcaccggtgcctacccactcaacagtctcagagctcagcagaagccctgtggcaacggccacatcctgctaaaactgggatggaggaatcggcccagccccaagagcaactgtgatttttgtttttaagactcatggacatttcatacctgtgcaatactgaagacctcattctgtcatgctgccccagtgagatagtgagtggtcaccaggcttgcaaatgaacttcagacggacctcagggtaggttctcgggactgaaggaaggccaagccattacgggagcacagcatgtgctgactactgtacttccagacccctgccctcttgggactgcccagtccttgcacctcagagttcgccttttcatttcaagcataaggcaataaatacctgcagcaacgtgggagaaagaagttgctggaccaggagaaaaggcagttatgaagccaattcattttgaaggaagcacaatttccaccttattttttgaactttggcagtttcaatgtctgtctctgttgcttcggggcataagctgatcaccgtctagttgggaaagtaaccctacagggtttgtagggacatgatcagcatcctgatttgaaccctgaaatgttgtgtagacaccctcttgggtccaatgaggtagttggttgaagtagcaagatgttggcttttctggattttttttgccatgggttcttcactgaccttggactttggcatgattcttagtcatacttgaacttgtctcattccacctcttctcagagcaactcttcctttgggaaaagagttcttcagatcatagaccaaaaaagtcataccttcgaggtggtagcagtagattccaggaggagaagggtacttgctaggtatcctgggtcagtggcggtgcaaactggtttcctcagctgcctgtccttctgtgtgcttatgtctcttgtgacaattgttttcctccctgcccctggaggttgtcttcaagctgtggacttctgggatttgcagattttgcaacgtggtactactttttttttctttttgtctgttagttatttctccaggggaaaaggcaataattttctaagacccgtgtgaatgtgaagaaaagcagtatgttactggttgttgttgttgttcttgttttttatagtgtaaaataaaaatagtaaaaggagaaaagcaaaaaaaaaaaaaaaaaa

SEQ ID NO: 13142 - DNA, 5597 bp, Homo sapiens
cgcgcttccgggttggctgtggctgtggctgcggcggcggcgcaggagcagaaaccggtgcggcgcagaagccccagaggcgggcggggcggagcggagggccagcgggccccggcgtgggtctcccgccaggccgccggatttaacccttagtggcttctgaagaaaatggcagaaacatcgccagagccttctgggcagcttgttgtacactcagacgctcacagtgacactgtgctggccagttttgaggatcagaggaagaaaggcttcctctgtgacattactttaatcgtggagaatgtacatttccgggcccacaaagccttacttgctgccagtagtgaatacttctcaatgatgtttgcagaagagggggaaatcggccaatccatttatatgctggaaggcatggttgcagacacctttggtatcctgctggaatttatctacacaggttatctccatgccagtgagaaaagtacagaacaaatcctggctactgctcagttcttaaaagtctatgacctggtaaaggcttacacagacttccaaaataatcatagctccccaaagccaacaactttgaacactgctggtgccccagtggttgttatccctaataagaaaaacgatcctccaaagcggaaacggggaagaccaaaaaaagtcaatacattgcaggaggagaaatcagaactggctgcagaggaagaaatacagttaagagtgaacaattcagttcagaatagacaaaactttgtggttaaaggagacagtggtgtactgaatgagcaaattgcagcaaaagaaaaggaagaatcggagcctacttgtgagccaagtagagaggaggaaatgccagttgaaaaagatgagaactatgatcccaagaccgaggatggccaggcaagccagagtcgatacagcaagcggaggatttggagatccgtcaaacttaaagattacaaacttgttggggatcaagaggaccatggttcagccaagaggatctgtggaaggagaaagcgccctggaggccctgaggcccgctgtaaagactgtggcaaggtctttaagtacaatcactttttagcaatccaccagaggagccacacaggggagcgacctttcaaatgtaatgagtgtggaaaaggctttgcccagaagcactcgctacaggtccacaccaggatgcacacaggcgagcggccgtacacctgcaccgtgtgcagcaaggctctgaccaccaagcactcactgctggagcacatgagcctgcactcaggacagaagtcttttacctgtgatcaatgcggaaaatatttcagccagaacagacagctaaagagccattaccgagttcatacaggccactcattaccggaatgcaaagactgccatcgcaaattcatggatgtgtctcagctaaagaaacatctgcgaacacacacaggtgagaagccatttacttgtgaaatctgtggcaaatctttcacagcaaagagttctcttcagacccacatcagaatccatcgaggagaaaagccatactcctgtggcatttgtggcaaatccttctctgactccagtgccaaaaggagacactgcattctacacactggcaagaagcctttctcctgccctgagtgtaacttacagtttgctcgcttagacaacttgaaggctcacttgaaaattcatagcaaggagaagcatgcttcagatgccagcagcatttctggcagtagtaatacagaagaggtcaggaatattcttcagctacagccatatcaactctctacctcgggagagcaggaaattcagcttctcgtaaccgattctgtacataacatcaatttcatgcccggtcctagccagggaatcagcattgtgactgcagagagttcccaaaacatgactgcagaccaggctgctaatcttaccctgctcacgcagcagccagagcaactgcagaatttaattctttcagctcaacaggagcaaacagaacacattcagagcctcaatatgattgaaagccagatggggccctcacaaacagagccagtgcacgtgatcactctgtccaaggaaacactggaacatcttcatgcccatcaagagcaaacagaggagctccatttagctacaagtacttcagatccagctcagcacctgcagctgacacaggagcctggtccgccaccacccactcaccacgtgccccagccaacgccacttggccaggagcagagctgacctgtaaacacgtttgactgcttgattgggctcttcttataagccagctctgactggattttgaacgcttgaaatcaggctctccacaccattgacttgcagatgcttctgtgagagctgtgatggctaactgatgtttataatgccctccatccaggtagcaagatgtgtgtatgtcttgtctaaggtactgatttgtattgagcatttcaatattattgaatggttttcattttaatctgcaatgtctcataaagactcgggtagtttttctttgggggcattgatctcagtttttctgtaaggtttaaatgttcacagccataggttatggtcttgccaacctccccagttatgtttttttgttttctaggacaaagggagtcattttggttgaactgggcagaatggtttgttctattttcttatttttcttaggcaacacagttgttaccacaagacaagtcagggctaaatatgacagatcacaatgtatggggaatttgcccttttaataatttccagtcccctaagacaaagtaaccctcaacgttttatctttatgcagtacagtgggcttattgtgttaacacttcagaaagattcaaactcataaactcagtattttaactcaaaattcatgtaacaagatagccaaaagcataggatttcttaaaattctgaattcgtcttttctgagaaacataaatttacatatttttcaacagaaggctatcaaaattttaattaagtttaaaatacaaaattggatcaagacattcaccctaaattctgaatttttgtcagaaaagagatttgattttcatgaaggtaaagctttcttcactattctggaacataaaactttattcagtgtaatttaagtcttatatatactctactgaattctaactgatctcctgaaaatgttgatctacgtgttgtgtctgataactttctggagatggaagcttataattcatttttattgcagactagttaaatcccacaaagtgaatatcttctcctaatctttccttttttagagacggggtctcactgtatcacccaggccagagtgtagtggcacaatcattgctcactgtagcctcgaattcctgggctcaagcaaccctcccaccttagcctccctagtagctgggactacagggatgtaccaccacacccagctaatcttcatctaatcttaaaactttgagcctcagagactttgtagccagcatgtgtctgtaattgtatgatttttaaatcatcatcaaaagattaaattatgtttgggttaggttttcaagctaagcttattgaattcttttaccactttcatgtaagctggtaggggatttttgagaaaagaaggtgggcactagtatatctaaattaacaatgctgatggggagtagggggtaatctactctaaaattaatagagcctttccatcaattgttttgttttagacatccttgatttctccctaaatcaaataagttatttggaggttagagtaatagagaattcttcaggtttgagagaagataaaaacattttggttgcatatttgctaagctatattttattatatgtaattcacaaaacttccaaaatgatatatatcttatatgtatcaaccaaactaatgttaaatcaggcctgactagagcaaagataacaattttttacaaacactgttaagccctaagtattatttcaggttctcgtttaaactgtttaattttattcttaaaacacaaagtttttaccaacttttcaaagcccaccaatccacattttctccaggaaattaaatatttaagtaagtgagtgtttactcactctggatagctaggtgattattcagaaaatacggttacatagctatttataagtcaagtttcactggctctataacagtctacctctacactaagagaactataacatgaacaacataggtcactttaaatgttctagtagcaacttttaaaaacataaaaagaagcaggtgaaaatgttaataaaagtttatttaatccaacatttgccaaatatttcaacatataaaaatatattagtgagacattttacattctctttttcatactaagctttcgaaatctggtgtgtattttacactttctgcacatctccatttggatgctaatgttcattggacatacttgatctgtatttagatttcatacaacttacagttgaaaacagattctcatatcaagtagctaagacaaaagtttttttcaagaattgaaataagtatcagtttaaaaatttatattaaatttattaaaattaaaatccagttccttgttgcatgggacacagtgcaaatgcttgataagcacatgtggctagtggctgctatattggacagcatgggccacctgtttctaacttgagcatcagtcctagctatgcctgaattatttgaccagctgtcaaagagaaacaaggaaatgatagctttgttaatctagcctctttctttgtcccacatatacattctacccctttgaataaaaaagttcaatgacgccgggcgtggaggctcatgcctgtaatcccagcactttgggaggccaaggtgggcggatcacgaggtcaggagttcgagggcagcctgaccaacatagtgaaaccccatctctactaaaaatacaaaaattagctgggcgtggtggtgtacccctgtaatcccagctactcgggaggctgagacaggagaatcacttgagcccaggaggcggaggctgcagtgagctgagatcacgccattgcactcaagcctggcgacagagcgagactccgtctcaaaaaaaaaagttaaatgacttgagtacccaaaagaaatgtcgtgaacatgaaagtacttctcatgtgtccttgagaaatgatgttgctagtgcagtgtttcacaattcattttctactaaatgtgtaccattttttaaattgttttaacagaaatatagagtgtgtttcttaggaaatagaatgttatgctttggggctcctgaaacacctcgttttgaaggtgaatctttggttttctcccagaagagggtctgccttgagatgattggagctcttaccatcaaaatcagttattcaagtgcttgcccagtgcttcttgaaactcacctctactctgtattttctacagttggttcttgtgttataaatgttgtgagcaacagattaaatgatgctgaggaatgaaaaaagattctcattataaatgcttacctaggattctcattatagatgcttatctaggttttcataaatgggaatgtaacaat

SEQ ID NO: 13143 - DNA, 771 bp, Homo sapiens
atggtgctcaacgagagtcactcagagggcagcagagtgatcgccaacaacactgagagcatcccaatgccctacgatcatgtgaaacttacgttcagtgacatgaataatgtgccagaggcctccaaagggaccaagaaaggcaccatctaccttacccctttcatctttctgtccagggcgaaggatgccacgcagtccttcgtaatgtcattttatctcttgaaggcctatgagatcaagcagcctgtgtttgacacaaactgcatcaagggaacagtgaacaccgaagcaggcggtggctgggaaggctctgcttccggcaagtccgccttcacggcagggggcgccactgaatctggacagcaggtgctccaggtgacatctcaagcgtccaggggtgaagccctcagtggagcctacggccactctcacgtgcctggcaggacatgtgtctttcccccgccagtcactagtggaatgtatccctgccctcctggctgcccttctccaccaccttcccctgagttctatccaggacctcccaagatggacagggccatggggtatgtgcaacccccgccactgccctgtcctgggcccatggaacctccggtcagcccagatgttccctgcactcctgcagccgaagccagggccacaaaagcagctgccagcacctattataacccaggcaaaccacaccacgtctccatgcccacgaagcagcctccgccatcttacccgagggaagataagaagacccagtag

SEQ ID NO: 13144 - DNA, 7299 bp, Homo sapiens
ctccgctgcctgagtcctcggcgaacatggcggcccccgagtcagggccggctttgagtccaggcactgcagagggtgaggaggagacgattctctatgacttgttggtcaacaccgagtggccaccggagactgaagtacagcctagaggcaaccaaaaacatggtgcatcctttatcatcacgaaagcaattcgagatcgtttattatttttacgccaatacatctggtacagcccggcaccttttttgctccctgatggactggttcgcttggttaataaacagataaactggcatttggtacttgcaagcaatggaaagcttttggctgctgttcaagatcagtgtgtggaaatcaggtctgcaaaagatgattttacatccattattgggaaatgtcaagttccgaaagacccgaaaccccagtggagacgggtagcatggagttacgattgtaccctactggcctatgccgaaagcacaggaactgtgagggtgtttgatctcatgggaagtgaactctttgtcatttccccggcatctagttttataggtgacttaagctatgccattgctgggttgatatttttagaatataaagcaagtgcacagtggtctgcagaactcctggtcatcaattaccgaggagaacttagaagttaccttgtaagtgttggaacaaatcagagctaccaagaaagtcactgtttcagcttcagtagtcattatcctcatggaatcaacacagctatttaccaccctggtcacagacttttacttgttggtggatgtgaaactgctgaagtaggcatgtcaaaagcttctagctgtggcctttctgcctggagagttctttcaggatcaccgtattataagcaggttactaatggtggagacggggttactgcagtaccgaagacactgggattattaaggatgttaagtgtcaagttttacagtcgccagggacaagaacaggatggaatttttaagatgagcctttctccagatgggatgctcctggcagccattcacttctcagggaaactgagcatctgggcgattccatctctgaagcaacaaggggaatggggtcaaaatgagcagccaggctatgatgaccttaatcctgattggaggctctctactgagaagagaaaaaaaatcaaagataaagagtccttttacccactgatagatgtcaattggtgggcagacagtgcagtgactttagctcgatgctctggtgctttaactgtttcatctgtgaaaactttgaagaatttactgggaaaatcctgtgaatggtttgaaccatcacctcaagtcactgctacccatgatgggggatttttaagtttggagtgtgagattaaacttgcccccaaacgatctcgtttggagactagagctggagaagaagatgaaggagaagaggattctgattctgattatgaaatatctgccaaggctcgctactttggttatataaaacagggcctttacttggtgactgaaatggagcgatttgcaccaccacggaaacgcccacgaaccattactaaaaactaccgccttgtgagtttgcgctccacgacaccagaggaactttatcagaggaagattgaaagtgaagagtatgaggaagccttgtccttggctcatacctacggcctggatactgaccttgtatatcagaggcagtggaggaagtcagcggtcaacgttgcttcaattcagaattatttgagtaaaataaagaagcgatcctgggttctccatgagtgtttggaaagagttcctgaaaatgtggatgctgcaaaagaactgcttcagtatggattaaaaggcacagacctggaggctcttttagcaatagggaaaggagcagatgatggcagatttacattacctggtgaaatagacattgacagtatctcctatgaagagctttcaccacctgatgaagagcctgccaagaataaaaaggaaaaggagctcaagaagagacaagaactactgaaattagtgaacttttccaagttgacactggaacaaaaggaactttgccgttgtagacggaagttattaacctacttagatcgacttgcaacatatgaggaaatcctaggagtgcctcatgcatctgaacagagatatgatgctgaattctttaagaaattcagaaatcagaatattgttctctcagcaagaacttatgctcaggaaagtaatgtacaagccctggaaattctgtttacttaccatggttccgacctgcttcctcatcgccttgcaattctgtccaactttccagagaccacttctccacatgaatattctgttttgctgcccgaagcttgttttaacggtgactccctgatgatcattccttggcatgaacataaacaccgagctaaagattggtgcgaggagttggcttgcagaatggttgttgagccgaatctccaagatgaaagtgaattcttgtatgctgcacagcctgagttactaaggttcaggatgacccagcttacggtggagaaggttatggactggtatcagaccagagcagaggaaatagagcattatgctcggcaggtggactgtgcattgtcacttattcgacttgggatggagcggaatattcctggtttgctggttctctgtgacaatttggttactctggaaacattggtttatgaagccaggtgtgatgtaactctaaccctgaaagaactccagcagatgaaagacattgaaaaactaagattactgatgaatagttgttctgaggataaatatgtgacaagtgcctaccagtggatggttccctttcttcatcgttgtgagaaacagtcgcctggtgtggctaatgagctattaaaagaatatttagtaactttagctaaaggggacttaaaatttcccctgaagatatttcagcattccaaaccagatctgcagcaaaaaattattcctgatcaggaccaactgatggcaatagcactagagtgcatctatacctgtgaacgaaatgatcaactctgtctttgctatgacctactagaatgtctgccagaaagaggatatggtgataagacagaggcaaccacaaagcttcatgacatggtagaccaactggaacaaattctcagtgtgtcagagcttttggaaaaacatggactcgagaaaccaatttcatttgttaaaaacactcaatctagctcagaagaggcacgcaagctgatggttagattgacgaggcacactggccggaagcagcctcctgtcagtgagtctcattggagaacgttgctgcaagacatgttaactatgcagcagaatgtatacacatgtctagattctgatgcctgctatgagatatttacagaaagccttctgtgctctagtcgccttgaaaacatccacctggctggacagatgatgcactgcagtgcttgttcagaaaatcctccagctggtatagcccataaagggaaaccccactacagggtcagctacgaaaagagtattgacttggttttggctgccagcagagagtacttcaattcttctaccaacctcactgatagctgcatggatctagccaggtgctgcttacaactgataacagacagaccccctgccattcaagaggagctagatcttatccaagccgttggatgtcttgaagaatttggggtaaagatcctgcctttgcaagtgcgattgtgccctgatcggatcagtctcatcaaggagtgtatttcccagtcccccacatgctataaacaatccaccaagcttctgggccttgctgagctgctgagggttgcaggtgagaacccagaagaaaggcggggacaggttctaatccttttagtggagcaggcacttcgcttccatgactacaaagcagccagtatgcattgtcaggagctgatggccacaggttatcctaaaagttgggatgtttgtagccagttaggacaatcagaaggttaccaggacttggccactcgtcaagagctcatggcttttgctttgacacattgccctcctagcagcattgaacttcttttggcagctagcagctctctgcagacagaaattctttatcaaagagtgaatttccagatccatcatgaaggaggggaaaatatcagtgcttcaccattaactagtaaagcagtacaagaggatgaagtaggtgttccaggtagcaattcagctgacctattgcgctggaccactgctaccaccatgaaagtcctttccaacaccacaaccaccaccaaagcggtgctgcaggccgtcagtgatgggcagtggtggaagaagtctttaacttaccttcgaccccttcaggggcaaaaatgtggtggtgcatatcaaatcggaactacagccaatgaagatctagagaaacaagggtgtcatcctttttatgaatctgtcatctcaaatccttttgtcgctgagtctgaagggacctatgacacctatcagcatgttccagtggaaagctttgcagaagtattgctgagaactggaaaattggcagaggctaaaaataaaggagaagtatttccaacaactgaagttctcttgcaactagcaagtgaagccttgccaaatgacatgaccttggctcttgcttaccttcttgccttaccacaagtgttagatgctaaccggtgctttgaaaagcagtccccctctgcattatctctccagctggcagcgtattactatagcctccagatctatgcccgattggccccatgtttcagggacaagtgccatcctctttacagggctgatcccaaagaactaatcaagatggtcaccaggcatgtgactcgacatgagcacgaagcctggcctgaagaccttatttcactgaccaagcagttacactgctacaatgaacgtctcctggatttcactcaggcgcagatccttcagggccttcggaagggtgtggacgtgcagcggtttactgcagatgaccagtataaaagggaaactatccttggtctggcagaaactctagaggaaagcgtctacagcattgctatttctctggcacaacgttacagtgtctcccgctgggaagtttttatgacccatttggagttcctcttcacggacagtggtttgtccacactagaaattgaaaatagagcccaagaccttcatctctttgagactttgaagactgatccagaagcctttcaccagcacatggtcaagtatatttaccctactattggtggctttgatcacgaaaggctgcagtattatttcactcttctggaaaactgtggctgtgcagatttggggaactgtgccattaaaccagaaacccacattcgactgctgaagaagtttaaggttgttgcatcaggtcttaattacaaaaagctgacagatgaaaacatgagtcctcttgaagcattggagccagttctttcaagtcaaaatatcttgtctatttccaaacttgttcccaaaatccctgaaaaggatggacagatgctttccccaagctctctgtacaccatctggttacagaagttgttctggactggagaccctcatctcattaaacaagtcccaggctcttcaccggagtggcttcatgcctatgatgtctgcatgaagtactttgatcgtctccacccaggtgacctcatcactgtggtagatgcagttacattttctccaaaagctgtgaccaagctgtctgtggaagcccgtaaagagatgactagaaaggctattaagacagtcaaacattttattgagaagccaaggaaaagaaactcagaagacgaagctcaagaagctaaggattctaaagttacctatgcagatactttgaatcatctggagaaatcacttgcccacctggaaaccctgagccacagcttcatcctttctctgaagaatagtgagcaggaaacactgcaaaaatacagtcacctctatgatctgtcccgatcagaaaaagagaaacttcatgatgaagctgtggctatttgtttagatggtcagcctctagcaatgattcagcagctgctagaggtggcagttggccctcttgacatctcacccaaggatatagtgcagagtgcaatcatgaaaataatttctgcattgagtggtggcagtgctgaccttggtgggccaagggacccactgaaggtcctggaaggtgttgttgcagcagtccacgccagtgtggacaagggtgaggagctggtttcacctgaggacctgctggagtggctgcggcctttctgtgctgatgacgcctggccggtgcggccccgcattcacgtgctgcagattttggggcaatcatttcacctgactgaggaggacagcaagctcctcgtgttctttagaactgaagccattctcaaagcctcctggccccagagacaggtagacatagctgacattgagaatgaagagaaccgctactgtctattcatggaactcctggaatctagtcaccacgaggctgaatttcagcacttggttttacttttgcaagcttggccacctatgaaaagtgaatatgtcataaccaataatccatgggtgagactagctacagtgatgctaaccagatgtacgatggagaacaaggaaggattggggaatgaagttttgaaaatgtgtcgctctttgtataacaccaagcagatgctgcctgcagagggtgtgaaggagctgtgtctgctgctgcttaaccagtccctcctgcttccatctctgaaacttctcctcgagagccgagatgagcatctgcacgagatggcactggagcaaatcacggcagtcactacggtgaatgattccaattgtgaccaagaacttctttccctgctcctggatgccaagctgctggtgaagtgtgtctccactcccttctatccacgtattgttgaccacctcttggctagcctccagcaagggcgctgggatgcagaggagctgggcagacacctgcgggaggccggccatgaagccgaagccgggtctctccttctggccgtgagggggactcaccaggccttcagaaccttcagtacagccctccgcgcagcacagcactgggtgtgagggccacctgtggccctgctccttagcagaaaaagcatctggagttgaatgctgttcccagaagcaacatgtgtatctgccgattgttctccatggttccaacaaattgcaaataaaactgtatggaaacgatgagcaagtaaaaaaaaaaaaaatt

SEQ ID NO: 13145 - DNA, 2905 bp, Homo sapiens
agcgttgggccgcggtcgcggggccgtctcaggctgccgtcccgcccctcccgtccggccgccgccgccgccaccgccgccaccgcctgggggttggttgaggcggacggcggggtccgggccggagtacgtcgttcccgctgcgctaggggaagcgggcagtcagaaaaatgggtaagaagagtcgagtaaaaactcagaaatctggcactggtgctacagcaactgtgtcaccaaaggaaatcttgaacctgaccagtgagctgctgcagaaatgcagcagtccggcgcctggcccaggaaaagagtgggaagagtatgtgcagatccggactctggttgagaaaatacggaaaaagcaaaaaggtctgtccgttacttttgatggaaaaagagaagattactttcctgatctaatgaaatgggcctctgaaaatggggcttctgtcgagggttttgaaatggttaacttcaaagaagagggctttggtttgagagcaacaagagatatcaaggcagaagaattgtttttatgggttccacgaaaattgctaatgactgttgaatctgctaaaaattcagtgttggggcccttatattctcaagaccgaatccttcaagccatgggaaacatcgcactggcctttcatttgctgtgtgagcgagccagccctaactccttctggcagccctatattcaaaccctccccagtgaatatgacactcctctctactttgaagaagatgaagttcggtatcttcagtccacacaagctatacatgatgtcttcagccagtataaaaacacagctcgacagtacgcctacttctataaagtcatccagacccatcctcatgccaacaaactacccttgaaggattctttcacttacgaggactacaggtgggcagtctcttctgttatgacgaggcaaaaccaaattcccacagaggatggttcccgcgtgaccctggctctgattcctttatgggatatgtgtaaccacaccaacggcctgatcactactggttacaacctggaagatgaccgctgtgagtgtgtggctctgcaggattttcgggctggagagcagatttacattttttatggcactcgatccaacgcagagtttgtgatccacagtggttttttctttgacaataactcacacgacagagtgaaaataaagcttggagtgagtaaaagtgacagactctacgccatgaaggccgaggtcttggctcgtgccggcatccccacttccagtgtttttgcattgcattttaccgagccgcccatctctgctcagcttttggcttttctccgagtattctgtatgactgaagaagaactgaaagaacacttgctgggagacagcgctattgatagaatcttcaccttggggaactcggaatttcctgttagctgggacaacgaggtcaaactttggacatttcttgaagatagagcctcacttcttttaaaaacatataaaacaactattgaggaagataaatccgtcttgaaaaaccacgatctttctgttcgtgcaaaaatggccatcaaattgcgcttaggtgagaaagagattttggaaaaagcagtaaagagtgcagctgtcaaccgggaatactatcgccaacagatggaggaaaaggctccgcttcccaaatatgaagagagtaaccttgggctgttggagagcagcgtgggggactcgaggctccccctggtcttgagaaacctcgaggaggaggctggagtgcaggatgccttgaacatcagagaggcaatcagcaaagcaaaggccacagaaaacgggcttgtaaacggtgaaaactctatccctaatgggaccaggtccgaaaatgaaagtctcaatcaagaaagtaaaagagcagttgaagacgccaaaggatcttcttcagacagcactgctggagttaaggagtagctcgaggtgaagctggatgggggatccagtggagcaggagttgacggacagtccgttcacatcgctgtgtttccttgttaacatttttctttctgcagagaggaagatatgtttttgctgctttatataaaaatggtttttttaagttattttaaaaatctagcttccctttttgattaagattgccatcttgcttttaggcaaaacaaaccaattaacaaacaaccacaagaaagggagaagaggtgcctgtgggagattttgcagacctattgtgggtataggtattttcttcctggggaagaattcagttcccgtctcagctgtacttttgtgggcctgtcatcttgatgaccagaatgaaagcttgctctgcctcctgccagccagaattggtggcgggacttggggatacagcgtgaaggtggggaagttgcacagcagaaaacagaattgaagttgggaaactctagagtctgggcaaaatgtttggttttttctcttaaaaaaaataacaccccattaccaaaagaaaaggtaaggtggcaaccttatttttaatagtttgaaatgatgataatcctaattatataaaaatatatatataaacacacatatatatagtgatttctaaagatttgtttacttttgtgttttgttttactgtactaagaacttgtcctttctccttgaatcaaagtaggacatgcatcatcctcctaattttaaatgttggctctgattttaaagtggtgcatttgattccagccttggtaatggagagtttgcaaacacacagcggcccacagcttcacgtggtggtgtgcagtgtgaggcagctccttggctttcctggttttcacaacaagctagagattttcaaagctacacttttgagtaaaaacccttattaaaagaaaaacatgattaataaaaaaaaaaaaaaaaaa

SEQ ID NO: 13146 - DNA, 5118 bp, Homo sapiens
ggggtttcggcggccgggagggagttgtcggcgccgcggccgctgcggacggacgctcgcctgccggctgaggaaaaagaagcaactaacaaaacactgtgataataaggattattcagtatgcagtttgcaggatatccatgacgacattgaaaatgaattttttgtattcaccagatattcttatatgagaagatctattttaaacagtctaaatattttttcttctgttggaccagcatggcaggatttaagcgagggtatgatggaaagattgctggattatatgatctggataaaaccttgggtcgaggccattttgccgtggttaaacttgccaggcatgtctttacgggtgaaaaggtggcagtaaaagttattgacaagacaaaactggacactctagctactggtcatcttttccaggaagtgagatgcatgaaactagtgcagcatcctaacatcgtccgcctttatgaagttattgacacccagaccaaactatatcttattctagaacttggggatgaaggagatatgtttgattatataatgaaacatgaggagggtcttaatgaagacttgcccaagaagtattttgctcagatagttcatgctatatcttattgccataaactccatgtggttcacagagacttaaaaccagagaatgtagtcttctttgaaaaacaaggtcttgtaaagttgacagactttgggttcagcaacaaatttcaaccagggaagaagctcactacaagctgtggatctcttgcatattccgctccagaaattctgcttggtgatgagtatgatgcacctgcagtagatatttggagtctgggagtgatccttttcatgttggtgtgtgggcagccgccctttcaagaagccaatgacagtgaaacactgacaatgatcatggattgcaaatatacagtaccatcccatgtgtctaaagagtgtaaagacctaatcacacggatgctacagagagatcccaagagaagggcttctttagaagagattgaaaatcatccttggcttcagggagtggacccttcaccagctacaaagtataacattccccttgtgtcatacaaaaatctctcggaagaggagcacaacagcatcattcagcgcatggtgcttggggacatagcggatcgagacgccattgtagaagccctggaaaccaacaggtataaccatatcacagccacatacttcctgctggctgaaaggatcctgagagaaaagcaagagaaagaaatacagaccagatctgcaagcccgagcaatatcaaggcccagtttaggcagtcatggccaaccaaaattgatgtaccccaggaccttgaggatgacctcacggccactcctttgtcccacgcgactgtccctcagtctcctgctcgggctgctgacagtgtcctcaatggccacaggagcaaaggcctgtgtgactcagctaagaaagatgacctccctgagttggctggaccagcactctctacggtgccacccgcaagcttaaaacccacagccagtgggcggaagtgtctgttcagggtggaagaagatgaagaggaagatgaggaggacaagaaacccatgtccctctcaacacaagtggttttgcgccggaagccatctgtaaccaaccgcctgacatccaggaagagtgcgcccgtcctcaaccagatctttgaggaaggggaatctgatgatgagtttgacatggatgagaatctgcctcccaagttgagcaggttaaagatgaatatagcttctccaggtacagttcacaaacgctaccaccggaggaaaagtcagggccggggctccagctgcagtagttcggagaccagtgatgatgattctgaaagccggcggcggctcgataaagatagcgggttcacctactcctggcaccgacgggatagcagcgaggggccccctggcagtgagggggatggcgggggccagagcaagccgagcaatgccagtggaggggtggacaaggccagccccagtgagaacaatgctggtgggggcagtccctccagcggctcgggtggcaaccccaccaatacatcgggtaccacacgccgctgtgccggccccagcaactccatgcagctggcctctcgcagtgctggggagctcgttgagagcctcaaactcatgagcctctgcctcggctcccagcttcatgggagcaccaagtacattattgatccacagaatggcttgtcattttccagtgtgaaagtccaagagaaatctacgtggaaaatgtgcattagctccacagggaatgcagggcaggtccctgcagtgggcggcataaagtttttctctgaccacatggcagataccaccactgaattggaacggataaagagcaagaacctgaaaaataacgtgctgcagctacctctgtgcgaaaagaccatctctgtgaacatccagcggaaccctaaggaggggctgctgtgcgcatccagcccagccagctgttgccatgtcatctgactgtggccccatctggccgctagcacgcttcctgctcagagcagtgaagaccggctcacttcactgttccatttggttttactattttaaagtgggcgttaggagcaattatttattacctttccatttgttcgcctgatgatgtgacaatgcatggtctttgtgcatgctgctagacacttttctttcccagccgaaaagcctattatgtaatttttacattcataattttaatgtggatgatcaggattaaatcaagatatatatctggaacctcttataaatggagcacttagaaatttgttgttctgcacttaacctagagagagaaaaaatgcttttctttgtgaaaaatctgaattcctgtcctgaccttctgtgatgtggaaaccctaggctctgagacacactctctggtgtctgagacagaaccaaagcaataacgttgtgatgcccacaggcctggagccagctagcgaccttgtgccgcccagctgtccatggcccgtgcagagcagaggacagtgagtgtctgcactgagaaccttaaaccacagttgaacatacccacacctgtttgtcttaagctatagtgtaaaaacaaagtttgggctctgaaaatttaactgaaaaagatttccttgtttttgtaataggtgagataaagtacttagatttataaggcagcttcccctgtagtgataaattacaagcagacaatcttattttgtaatgtgatgaagtgatgatgtcttaactctacttagagagtgtatgtctgtctaacagaacaaaaagatgctctgtgtaaattccttcctgtagggcacactgcaggatttccatgtagatagaagaactatagggcctagtacagaaggtgcacacaaatgttggcaaagtcaaaccccatgaattaaaacctactggaatttggtttttaggagtttggtaattagattatctcttttgttattttcattcagttatatcctttggctcagctagctttgaaattggctgatgaaaaaatatacataaaagggtaaaattcacacatacagcaaacaaaaatgcacaaagcctgcttcgtaacttttttttctggaattgtttttcactttgcctttttctgccaaaacaataatcaaagaactcttgctttaacctattcctgtacaaagactgtttttgaccagataatcatctgttgtggcattctatcttgtaggacactgtatattgcaaattgctgattatggaaggggccagttgctgttttttcatgcagtgccctgggagtcttaaaagcagtgcttagcaacattggtgatagcatgtggctgggacccagggcccttccccactcttcagccccgagtcatgtgtctgaggtgacggactgagacgcatctggtcctgtaattcagagagtgggcacatcaccaaagaactgcattgctgtggtcactgtttcttcaagtacacactgactctgctactttaggataaatatattttactcagaactctgaatttcacagtatacttactaaactaagtaaaaatgatacttaaaatacttattttactttctagacctaggctagatgttttaagctacagctctagttcattgtgatatttataatttgaaagctatgagaatagatgtgtgggtgaagccatagaacatatttgcttgaaattcttgagcagggatcttataaagggccagaaataagatgtgtggttcacatagatagtgagcgtaacatctgtattaaacataggagagaagtttataaagggcattggcaataaactctttgttgcagctgttttccaagcagtgtaaatactttttcctgtgattatgtatagccttggaatggcaccttttaactaacccatatgtgtttggtttcaatggttttttatattcagatgtatatatggtgctcactttaggatcagcagtgttgaccatttatgctgcatagctgtattatagccttattagttgtgtggttgacccttggggtatacaaatgtcagtctgagtggtgtcttactcctttgtttataagtgaatgattgtgcatgttttgtatgtcatagtatgtcgtcacataaaagggagggagcgaaaaaccattacattaagataatattggaccaaactacttacttgctctaaacagttacttgtaccccttaacctgtcttcaaaagttgcatatagttacagtagtgtataaattaaatattgtggaaaaacagtcttgtatttttctgtatgtgtgtatatatatataattatgtacttctggcaattctatctgtatttaaagatgtgacaatcttgacaccaattttaagaatagctgtgagaccgaattaaagataatccctaccaagtgaaaattgatgtgtgttaagagggtacagaattatcaactgatttggtcagttgcttccaatgctggttgatttccctcattgtgtaaacattgacaggtatgtgacaaatgggaaaaaaaatccaaataataaagtgacatattggtgttcagcaat

SEQ ID NO: 13147 - DNA, 11893 bp, Homo sapiens
ccgcgcgtccctgtgcgtccccgggtccctgcgggcgggcgggcgcggtcgccgccgagcaacccggcctgcgcccggcacgactgtagatgtcaggctttgcccggggagccgagcggcagcggggctgtgagtttcaaattaaccttccgctttgttgctgtgtaatgtggatccccgaaggccccccgccccgcccgccccccttccccgggcggtgcgcgctgcaaactgcgagttgggcttcatttacataaagcgattccgggcgggcggcggaagaggaggaggcggcggcggcgggcaggccggggacccggacgccagcgccgcgccccgtgggtgaatccccgccgcgtcccggggacctccctccggggacgggccgaccgccagccctgccgccaccatgagctcccctcccctgtctccgggccccctgctcctgaccagagccacctccgagtcctggggccagcgggaggtggggagcataccgcctggggtgggtgagctcggggctcgggtgccactggaatttcccgttgttgcgcatggcggcgcggcccccggacctgcaagtgccgcctccctccggaggtgcgcggaggcttggtgtgccaggtccgagcctccgtactgggtgcaatgaaagctccacgcaggccttaccatggaaggctgtgactcgcccgtcgtctcggggaaggacaatgggtgcggtatccctcagcaccagcaatggactgaactcaacagcacccacctccctgacaaacccagtagcatggaacagtccacaggcgagagccacgggcccttggacagcctgagggcccccttcaatgagcgcctcgcggagagcaccgcgtcggccgggccccccgccgagcccgccagcaaggaggtcacctgcaacgaatgttcggcctcctttgccagcctccagacctacatggagcaccactgccccagcgcgcgccccccgccacccctgagagaggagagcgctagcgacaccggtgaggagggggacgaggagagtgacgtggagaacctggccggggagatcgtctaccagccggacggctccgcatacattgtggagagcctgagccagctgacccagggcgggggcgcctgtgggagtggcagtggcagtgggcctctcccctcgcttttcctgaactctctccctggcgcggggggcaagcaaggggacccttcgtgtgctgcacccgtgtacccgcagatcatcaacactttccacatagcctcatccttcgggaaatggtttgagggcccagaccaggctttcccgaatacctcagccctggcggggctcagccccgtcctgcacagcttccgcgtgtttgacgtgcgacacaaaagcaacaaggattacctgaacagcgacggttctgccaaaagctcctgcgtatccaaagatgttcccaacaatgtggacctgtccaaattcgatggctttgtgctctatggcaagaggaagcccatcctgatgtgtttcttgtgcaaactctcctttgggtacgtccgttcgtttgtgacccacgcggtgcatgaccatcgaatgaccctgagcgaagacgagcggaaaattcttagcaataagaacatctccgctatcatccaagggatcggcaaagacaaggaaccccttgtaagttttctggaaccaaaaaacaaaaactttcaacaccctttagtttccacagctaacctcataggccccggacacagtttttatggtaaatttagtggcattcgaatggaaggggaggaagctctcccagcgggctccgccgctggccccgagcagccccaggctggtctcttgacccccagcaccctgttgaaccttggcgggctcaccagctcggtactgaagacccccattacctcagtccccctgggggctctggcttccagtcctaccaaatcctcagagggcaaggactctggggcggcagaaggagagaagcaggaagtgggcgacggggattgcttctctgagaaggtagagccagccgaagaggaggcggaggaggaagaggaggaggaagaggcggaggaggaggaggaagaagaggaggaggaagaagaggaggaggaagacgagggttgcaaaggactctttccaagcgagttggatgaggaactggaggacaggccccatgaggagcctggggccgcagcaggtagtagcagcaaaaaggaccttgctctctcaaaccaaagcatttctaactcccccttaatgcctaacgtgctccagaccctgtcgaggggcacagcttctactagttctaattctgcttcttcctttgttgtctttgatggtgcgaacaggaggaatcgtttaagctttaacagtgagggcgtcaggaccaatgtggcagagggcggcaggaggctggacttcgctgacgaaagtgccaataaagacaatgccacagcaccagaaccaaatgaaagtacagagggtgacgatgggggcttcgttccccatcaccagcacgctggctccctctgcgagcttggggttggggagtgcccctcggggagtggcgtggagtgccccaaatgcgacacggtcctgggctcctcccgctcgctgggcggccacatgaccatgatgcattctcgtaactcgtgtaagacactcaagtgccccaagtgcaactggcactataagtaccagcagaccctggaggcacacatgaaggagaagcacccggagccggggggctcctgtgtctactgcaaaagcgggcagccccacccccggctggcacgaggcgagagctacacgtgtggttacaagcctttccgctgcgaggtgtgtaactactccacaactaccaaaggcaacctcagtattcatatgcagtctgacaagcatctcaacaacatgcagaacctacagaatggagggggggagcaggtcttcatccacactgccggggcggcggcggcggcggcggctgcggcggcggcggcagccaatatcagtagctcctgcggggccccctcgcccaccaaaccaaaaaccaaacccacctggcggtgcgaggtgtgtgattatgagaccaacgtggccaggaacctccgcattcacatgaccagtgagaagcacatgcataacatgatgttactgcaacagaacatgacccagatccaacacaaccaccaccgggtcctcggcagcctgccctcacccgccgaggccgagctctaccaatactacctggcccagaacatgaacctgcccaacctgaagatggacagtgctgcctcggacgcccagttcatgatgagcggattccagctggatcccgccgggcccatggccgccatgacgcctgctctagtgggcggtgagatccccctagacatgcggctcgggggcgggcagctggtgtcagaggagctgatgaacctgggcgagagcttcatccagaccaacgacccgtcgctgaagctcttccagtgcgccgtctgcaacaagttcacgacggacaacctggacatgctgggcctgcacatgaacgtggagcgcagcctgtcggaggacgagtggaaggcggtgatgggggactcataccagtgcaagctctgccgctacaacacccagctcaaggccaacttccagctgcactgcaagacagacaagcacgtgcagaagtaccagctggtggcccacatcaaggagggcggcaaggccaacgagtggaggctcaagtgtgtggccatcggcaaccccgtgcacctcaagtgcaacgcctgtgactactacaccaacagcctggagaagctgcggctgcacacggtcaactccaggcacgaggccagcctgaagttgtacaagcacctgcagcagcatgagagtggtgtagaaggtgagagctgctactaccactgcgttctgtgcaactactccaccaaggccaagctcaacctcatccagcatgtgcgctccatgaagcaccagcgaagcgagagcctgcgaaagctgcagcggctgcagaagggccttccagaggaggacgaggacctggggcagatcttcaccatccgcaggtgcccctccacggacccagaagaagccattgaagatgttgaaggacccagtgaaacagctgctgatccagaggagcttgctaaggaccaagagggcggagcatcgtccagccaagcagagaaggagctgacagattctcctgcaacctccaaacgcatctccttcccaggtagctcagagtctcccctctcttcgaagcgaccaaaaacagctgaggagatcaaaccggagcagatgtaccagtgtccctactgcaagtacagtaatgccgatgtcaaccggctccgggtgcatgccatgacgcagcactcggtgcaacccatgcttcgctgccccctgtgccaggacatgctcaacaacaagatccacctccagctgcacctcacccacctccacagcgtggcacctgactgcgtggagaagctcattatgacggtgaccacccctgagatggtgatgccaagcagcatgttcctcccagcagctgttccagatcgagatgggaattccaatttggaagaggcaggaaagcagcctgaaacctcagaggatctgggaaagaacatcttgccatccgcaagcacagagcaaagcggagatttgaaaccatcccctgctgacccaggctctgtgagagaagactcaggcttcatctgctggaagaaggggtgcaaccaggttttcaaaacttctgctgcccttcagacgcattttaatgaagtgcatgccaagaggcctcagctgccggtgtcagatcgccatgtgtacaagtaccgctgtaatcagtgtagcctggccttcaagaccattgaaaagttgcagctccattctcagtaccatgtgatcagagctgccaccatgtgctgtctttgtcagcgcagtttccgaactttccaggctctgaagaagcaccttgagacaagccacctggagctgagtgaggctgacatccaacagctttatggtggcctgctggccaatggggacctcctggcaatgggagaccccactctggctgaggaccataccataattgttgaggaagacaaggaggaagagagtgacttggaagataaacagagcccaacgggcagtgactctgggtcagtacaagaagactcgggctcagagccaaagagagctctgcctttcagaaaaggtcccaattttactatggaaaagttcctagacccttctcgcccttacaagtgtaccgtctgcaaggaatctttcactcaaaagaatatcctgctagtacactacaattctgtctcccacctgcataagttaaagagagcccttcaagaatcagcaaccggtcagccagaacccaccagcagcccagacaacaaaccttttaagtgtaacacttgtaatgtggcctacagccagagttccactctggagatccatatgaggtctgtgttacatcaaaccaaggcccgggcagccaagctggaggctgcaagtggcagcagcaatgggactgggaacagcagcagtatttccttgagctcctccacgccaagtcctgtgagcaccagtggcagtaacacctttaccacctccaatccaagcagtgctggcattgctccaagctctaacttactaagccaagtgcccactgagagtgtagggatgccacccctggggaatcctattggtgccaacattgcttccccttcagagcccaaagaggccaatcggaagaaactggcagatatgattgcatccaggcagcagcaacaacagcagcagcaacagcaacaacaacaacaacaacaacaacaacaagcacaaacgctggcccaggcccaggctcaagttcaagctcacctgcagcaggagctgcagcaacaggctgccctgatccagtctcagctgtttaaccccaccctccttcctcacttccccatgacaactgagaccctgctgcaactacagcagcagcagcacctcctcttccctttctacatccccagtgctgagttccagcttaaccccgaggtgagcttgccagtgaccagtggggcactgacactgactgggacaggcccaggcctgctggaagatctgaaggctcaggttcaggtcccacagcagagccatcagcagatcttgccgcagcagcagcagaaccaactctctatagcccagagtcactctgccctccttcagccaagccagcaccccgaaaagaagaacaaattggtcatcaaagaaaaggaaaaagaaagccagagagagagggacagcgccgaggggggagagggcaacaccggtccgaaggaaacactgccagatgccttgaaggccaaagagaagaaagagttggcaccagggggtggttctgagccttccatgctccctccacgcattgcttcagatgccagagggaacgccaccaaggccctgctggagaactttggctttgagttggtcatccagtataatgagaacaagcagaaggtgcagaaaaagaatgggaagactgaccagggagagaacctggaaaagctcgagtgtgactcctgcggcaagttgttttccaacatcttgattttaaagagtcatcaagagcacgttcatcagaattactttcctttcaaacagctcgagaggtttgccaaacagtacagagaccactacgataaactgtacccactgaggccccagaccccagagccaccaccacctccccctccaccccctccacccccacttccggcagcgccgcctcagccggcgtccacaccagccatccccgcatcagccccacccatcacctcacctacaattgcaccggcccagccatcagtgccgctcacccagctctccatgccgatggagctgcccatcttctcgccgctgatgatgcagacgatgccgctgcagaccttgccggctcagctacccccgcagctgggacctgtggagcctctgcctgcggacctggcccaactctaccagcatcagctcaatccaaccctgctccagcagcagaacaagaggcctcgcaccaggatcacagatgatcagctccgagtcttgcggcaatattttgacattaacaactcccccagtgaagagcaaataaaagagatggcagacaagtccgggttgccccagaaagtgatcaagcactggttcaggaacactctcttcaaagagaggcagcgtaacaaggactccccttacaacttcagtaatcctcctatcaccagcctggaggagctcaagattgactcccggcccccttcgccggaacctccaaagcaggagtactggggaagcaagaggtcttcaagaacaaggtttacggactaccagctgagggtcttacaggacttcttcgatgccaatgcttacccaaaggatgatgaatttgagcaactctctaatttactgaaccttccaacccgagtgatagtggtgtggtttcagaatgcccgacagaaggccaggaagaattatgagaatcagggagagggcaaagatggagagcggcgtgagcttacaaatgatagatacattcgaacaagcaacttgaactaccagtgcaaaaaatgtagcctggtgtttcagcgcatctttgatctcatcaagcaccagaagaagctgtgttacaaggatgaggatgaggaggggcaggacgacagccaaaatgaggattccatggatgccatggaaatcctgacgcctaccagctcatcctgcagtaccccgatgccctcacaggcttacagcgccccagcaccatcagccaataatacagcttcctccgctttcttgcagcttacagcggaggctgaggaactggccaccttcaattcaaaaacagaggcaggcgatgagaaaccaaagctggcggaagctcccagtgcacagccaaaccaaacccaagaaaagcaaggacaaccaaagccagagctgcagcagcaagagcagcccgagcagaagaccaacactccccagcagaagctcccccagctggtgtccctgccttcgttgccacagcctcctccacaagcgccccctccacagtgccccttaccccagtcgagccccagtccttcccagctctcccacctgcccctcaagcccctccacacatcaactcctcaacagctcgcaaacctacctcctcagctaatcccctaccagtgtgaccagtgtaagttggcatttccgtcatttgagcactggcaggagcatcagcagctccacttcctgagcgcgcagaaccagttcatccacccccagtttttggacaggtccctggatatgcctttcatgctctttgatcccagtaacccactcctggccagccagctgctctctggggccatacctcagattccagcaagctcagccacttctccttcaactccaacctccacaatgaacactctcaagaggaagctggaggaaaaggccagtgcaagccctggcgaaaacgacagtgggacaggaggagaagagcctcagagagacaagcgtttgagaacaaccatcacaccggaacaactagaaattctctaccagaagtatctactggattccaatccgactcgaaagatgttggatcacattgcacacgaggtgggcttgaagaaacgtgtggtacaagtctggtttcagaacacccgagctcgggaaaggaaaggacagttccgggctgtaggcccagcgcaggcccacaggagatgccctttttgcagagcgctcttcaaagccaagactgctcttgaggctcatatccggtcccgtcactggcatgaagccaagagagctggctacaacctaactctgtctgcgatgctcttagactgtgatgggggactccagatgaaaggagatatttttgacggaactagcttttcccacctacccccaagcagtagtgatggtcagggtgtccccctctcacctgtgagtaaaaccatggaattgtcacccagaactcttctaagcccttcctccattaaggtggaagggattgaagactttgaaagcccctccatgtcctcagttaatctaaactttgaccaaactaagctggacaacgatgactgttcctctgtcaacacagcaatcacagataccacaactggagacgagggcaacgcagataacgacagtgcaacgggaatagcaactgaaaccaaatcctcttctgcacccaacgaagggttgaccaaagcggccatgatggcaatgtctgagtatgaagatcggttgtcatctggtctggtcagcccggccccgagcttttatagcaaggaatatgacaatgaaggtacagtggactacagtgaaacctcaagccttgcagatccctgctccccgagtcctggtgcgagtggatctgcaggcaaatctggtgacagcggagatcggcctgggcagaaacgttttcgcactcaaatgaccaatctgcagctgaaggtcctcaagtcatgctttaatgactacaggacacccactatgctagaatgtgaggtcctgggcaatgacattggactgccaaagagagtcgttcaggtctggttccagaatgcccgggcaaaagaaaagaagtccaagttaagcatggccaagcattttggtataaaccaaacgagttatgagggacccaaaacagagtgcactttgtgtggcatcaagtacagcgctcggctgtctgtacgtgaccatatcttttcccaacagcatatctccaaagttaaagacaccattggaagccagctggacaaggagaaagaatactttgacccagccaccgtacgtcagttgatggctcaacaagagttggaccggattaaaaaggccaacgaggtccttggactggcagctcagcagcaagggatgtttgacaacacccctcttcaggcccttaaccttcctacagcatatccagcgctccagggcattcctcctgtgttgctcccgggcctcaacagcccctccttgccaggctttactccatccaacacagctttaacgtctcctaagccgaacttgatgggtctgcccagcacaactgttccttcccctggcctccccacttctggattaccaaataaaccgtcctcagcgtcgctgagctccccaaccccagcacaagccacgatggcgatgggccctcagcaacccccccagcagcagcagcagcagcagcaaccacaggtgcagcagcctcccccgccgccagcagcccagccgccacccacaccacagctcccactgcaacagcagcagcaacgcaaggacaaagacagtgagaaagtaaaggagaaggaaaaggcacacaaagggaaaggggaacccctgcctgtccccaagaaggagaaaggagaggcccccacggcaactgcagccacgatctcagccccgctgcccaccatggagtatgcggtagaccctgcacagctgcaggccctgcaggccgcgttgacttcggaccccacagcattgctcacaagccagttccttccttactttgtaccaggcttttctccttattatgctccccagatccctggcgccctgcagagcgggtacctgcagcctatgtatggcatggaaggcctgttcccctacagccctgcactgtcgcaggccctgatggggctgtccccaggctccctactgcagcagtaccagcaataccagcagagtctgcaggaggcaattcagcagcagcagcagcggcaactacagcagcagcagcagcaaaaagtgcagcagcagcagcccaaagcaagccaaaccccagtcccccccggggctccttccccagacaaagaccctgccaaagaatcccccaaaccagaagaacagaaaaacaccccccgtgaggtgtcccccctcctgccgaaactccctgaagagccagaagcagaaagcaaaagtgcggactccctctacgaccccttcattgttccaaaggtgcagtacaagttggtctgccgcaagtgccaggcgggcttcagcgacgaggaggcagcgaggagccacctgaagtccctctgcttcttcggccagtctgtggtgaacctgcaagagatggtgcttcacgtccccaccggcggcggcggcggtggcagtggcggcggcggcggcggtggcggcggcggcggcggcggcggctcgtaccactgcctggcgtgcgagagcgcgctctgtggggaggaagctctgagtcaacatctcgagtcggccttgcacaaacacagaacaatcacgagagcagcaagaaacgccaaagagcaccctagtttattacctcactctgcctgcttccccgatcctagcaccgcatctacctcgcagtctgccgctcactcaaacgacagcccccctcccccgtcggccgccgccccctcctccgcttccccccacgcctccaggaagtcttggccgcaagtggtctcccgggcttcggcagcgaagcccccttcttttcctcctctctcctcatcttcaacggttacctcaagttcatgcagcacctcaggggttcagccctcgatgccaacagacgactattcggaggagtctgacacggatctcagccaaaagtccgacggaccggcgagcccggtggagggtcccaaagaccccagctgccccaaggacagtggtctgaccagtgtaggaacggacaccttcagattgtaagctttgaagatgaacaatacaaacaaatgaatttaaatacaaaaattaataacaaaccaatttcaaaaatagactaactgcaattccaaagcttctaaccaaaaaaca

SEQ ID NO: 13148 - DNA, 1023 bp, Homo sapiens
gttggctgccggtgagttgggtgccggtggagtcgtgttggtcctcagaatccccgcgtagccgctgcctcctcctaccctcgccatgtttcttacccggtctgagtacgacaggggcgtgaatactttttctcccgaaggaagattatttcaagtggaatatgccattgaggctatcaagcttggttctacagccattgggatccagacatcagagggtgtgtgcctagctgtggagaagagaattacttccccactgatggagcccagcagcattgagaaaattgtagagattgatgctcacataggttgtgccatgagtgggctaattgctgatgctaagactttaattgataaagccagagtggagacacagaaccactggttcacctacaatgagacaatgacagtggagagtgtgacccaagctgtgtccaatctggctttgcagtttggagaagaagatgcagatccaggtgccatgtctcgtccctttggagtagcattattatttggaggagttgatgagaaaggaccccagctgtttcatatggacccatctgggacctttgtacagtgtgatgctcgagcaattggctctgcttcagagggtgcccagagctccttgcaagaagtttaccacaagtctatgactttgaaagaagccatcaagtcttcactcatcatcctcaaacaagtaatggaggagaagctgaatgcaacaaacattgagctagccacagtgcagcctggccagaatttccacatgttcacaaaggaagaacttgaagaggttatcaaggacatttaaggaatcctgatcctcagaacttctctgggacaatttcagttctaataatgtccttaaattttatttccagctcctgttccttggaaaatctccattgtatgtgcattttttaaatgatgtctgtacataaaggcagttctgaaataaagaaaattttaaaataaaaaaaaaaaaaaaaaaaaaaaaaaaaaaaaaaaaaaaaaaaaaaaaaa

SEQ ID NO: 13149 - DNA, 2004 bp, Homo sapiens
ctggaggcgaaaagcggggagcggaggggggccgctggagccgagtagcgtacagagcggcgtgtgacgcggggacgccgcgtgctcccaacgtcgccccggtttgacgcacacggcaccaaactgtttgatttaattttggatgagatcgttcttgcagcaagatgttaataagacaaaatctagccttagattgtaagcaaaagaaatcaaggtcaagatctggaagcaagaagaaaatgctaacattacctcatggtgctgacgaggtttacattctccgatgcaggttttgtggcctagtctttcgaggacccttgtctgttcaggaagactggattaagcacttacaacgacatattgtaaacgctaatcttccacggactggagctggcatggtggaagtcacgtcactacttaaaaagcctgcctccattacagaaacttcattttctctactaatggccgaagcagcttcatagaaccaggaaaccttttaaatagccagtttgaattggatgtaaatttgaaattctttttttttaagccacattaaattatctgtttataaatactaaagcaggaaaatggggggaaagtgaattacagtgacatcagagcaaattgaatacttaaaacagtaagtagtctatatattttatatagggtggaagatgtgtttttaaggtttatgaagttttgttggttaactgtgttcactcagtaaaagagcagtacatgtaagcagccattaataaactgttgcacatggatacttatagacagacttattggacaattatgttttttgcagtgttaccagaatcaaggctctgtttattccccacaagacttgcatagaaaaataagatattatattttgtttgtatgtatttagtgttttgtataataccaagaaccgctgactaaatttactcaaattagggcattaaatatcatgtacttcatagtttgagactgttcactcaaatagggcagagtactattctatctagatgtgtaagtgttttttttaaaatcacatggaacggttttttttatactaaaaagtggagggagatttgtttaaacaagtatttctaaaagaaatatgtacatagttctggaaattatttgtggtaaggaaatattctttactccagttgcatttctcagacaataaagtggtgcatccatgctacctcctactttgtcaacaaagatgctatttaccctttacatttttgtatcataatagattttaaaaatctaatgttctttattgcaagacattcttttgttaacaggtttgtttctttttaatgttttacctaaaatttgacatgcttacaggacaggtttgcctcttactttatttaacattgtagaaatgtaattaataaacaatgctcactacacagtttagaatagacgttctcatttatattatcttccaaatttgatcagttagcaaaacttaatacaccaattaaaatatttctacatatgagaatgtttacaatttaaattttagaacttgttttggatgtgattatatgtacgaaaatcgtgtaacactatgctcatgctaagaaccgacataacagaattactgaaataaatgtgctgtgaggaatggaaaatatggtgcaggtgtcttggtcatgataaattgtgattctttttaaaaattttttccaaaaacaattaggtattttaatctgaaatcagattcctttacaaacaacaagtttttgtatgcaagcaccattttatttcatgtagtatggctaatactatagttgaaccaaggatatgcattgattctttgcttcgtatgtaaataaagttaaaaacagttaaaataaggagtattttggtagagtatatacatacctcactgccagtgaaattgctttcctatggtatatctccttaccagaaaaatctctaaataaaaaaaggtttaaagaaaattaaaaaaaaaaaaaaaaaaaaaaaaaa

SEQ ID NO: 13150 - DNA, 2085 bp, Homo sapiens
gcaatgcactgagtaacggggcgggccgagagcagtcaccaacccctctcgttgaggctgctcggttgtggccagaaacgctggctctggcattaactgtctacacccctccccttacttgggacaggaccgcatagccctcccctccccccgtcctgcaagatcttatgcggctaggtgcctgggaagtaacagcaagaggtttgatttaattttggatgagatcgttcttgcagcaagatgttaataagacaaaatctagccttagattgtaagcaaaagaaatcaaggtcaagatctggaagcaagaagaaaatgctaacattacctcatggtgctgacgaggtttacattctccgatgcaggttttgtggcctagtctttcgaggacccttgtctgttcaggaagactggattaagcacttacaacgacatattgtaaacgctaatcttccacggactggagctggcatggtggaagtcacgtcactacttaaaaagcctgcctccattacagaaacttcattttctctactaatggccgaagcagcttcatagaaccaggaaaccttttaaatagccagtttgaattggatgtaaatttgaaattctttttttttaagccacattaaattatctgtttataaatactaaagcaggaaaatggggggaaagtgaattacagtgacatcagagcaaattgaatacttaaaacagtaagtagtctatatattttatatagggtggaagatgtgtttttaaggtttatgaagttttgttggttaactgtgttcactcagtaaaagagcagtacatgtaagcagccattaataaactgttgcacatggatacttatagacagacttattggacaattatgttttttgcagtgttaccagaatcaaggctctgtttattccccacaagacttgcatagaaaaataagatattatattttgtttgtatgtatttagtgttttgtataataccaagaaccgctgactaaatttactcaaattagggcattaaatatcatgtacttcatagtttgagactgttcactcaaatagggcagagtactattctatctagatgtgtaagtgttttttttaaaatcacatggaacggttttttttatactaaaaagtggagggagatttgtttaaacaagtatttctaaaagaaatatgtacatagttctggaaattatttgtggtaaggaaatattctttactccagttgcatttctcagacaataaagtggtgcatccatgctacctcctactttgtcaacaaagatgctatttaccctttacatttttgtatcataatagattttaaaaatctaatgttctttattgcaagacattcttttgttaacaggtttgtttctttttaatgttttacctaaaatttgacatgcttacaggacaggtttgcctcttactttatttaacattgtagaaatgtaattaataaacaatgctcactacacagtttagaatagacgttctcatttatattatcttccaaatttgatcagttagcaaaacttaatacaccaattaaaatatttctacatatgagaatgtttacaatttaaattttagaacttgttttggatgtgattatatgtacgaaaatcgtgtaacactatgctcatgctaagaaccgacataacagaattactgaaataaatgtgctgtgaggaatggaaaatatggtgcaggtgtcttggtcatgataaattgtgattctttttaaaaattttttccaaaaacaattaggtattttaatctgaaatcagattcctttacaaacaacaagtttttgtatgcaagcaccattttatttcatgtagtatggctaatactatagttgaaccaaggatatgcattgattctttgcttcgtatgtaaataaagttaaaaacagttaaaataaggagtattttggtagagtatatacatacctcactgccagtgaaattgctttcctatggtatatctccttaccagaaaaatctctaaataaaaaaaggtttaaagaaaattaaaaaaaaaaaaaaaaaaaaaaaaaaaaaaa

SEQ ID NO: 13151 - DNA, 4430 bp, Homo sapiens
gagagccgccatttttgagagcgggggagaagagacaagcaggggcggcagaggctcaacgggatgctgactgggttttgcttttcgtcccagccttgtggggccgggacggaagaacccatcaaagcccttcctcccgccgcctctccggaatgaggtctcagcacccgcgcgggacagcacccttcctcctgcgacagagcccaagaagaggccgaaaccgagaccatgccagggaagctgaaggtgaaaatcgtggccgggcgccatttgccagtgatggaccgtgctagtgacctgactgatgccttcgtggaggtaaaatttggtaataccacctttaaaacagatgtgtaccttaagtcactcaaccctcagtggaactcggagtggtttaaatttgaggtggatgatgaagacttacaagatgaacctttacagatcacagttcttgaccatgatacttacagtgcaaatgatgccattggtaaagtgtacattgatattgatcctttactgtatagtgaagctgcaacagtcatctcaggatggtttccaatttatgacaccatacatggtatccgtggggaaatcaatgtagttgtcaaagtagacctcttcaatgatttaaatcgatttaggcagtcatcatgtggagtcaaattcttttgcacaacgtctattccaaaatgctatagagctgtgataattcatggatttgtagaagaacttgtggtcaatgaagacccagaatatcagtggattgatcgaattcgcacaccaagggcatcaaatgaggccagacagagactcatttcgttaatgtcaggtgagctgcagaggaagattggcttgaaagtacttgaaatgagaggaaatgcagttgtggggtacttacagtgtttcgatctggagggcgagtctgggttagtggtgcgagccataggaacggcgtgtactctggataaattaagtagcccagcagcattccttcctgcatgtaattccccatccaaagaaatgaaggagattcccttcaatgaagatcccaatcccaatactcactcatcaggaccctcaacccctctgaaaaaccaaacttattccttttcaccttccaagtcctacagtcgacagtcctcttcttctgacacagatttgagtttgacacccaaaactggaatgggaagtggtagtgctggaaaagaaggggggccctttaaagctcttttaagacaacagactcaatcagcgttggaacagagggaatttccattttttaccttgacggcatttcctcctggattccttgtacacgttgggggtgtagttagtgcacgttctgtgaagcttttggatcgtatccacaatcctgatgaaccagaaactcgagatgcatggtgggcagaaatcagacaagaaataaaatcacatgctaaagcattaggctgtcatgctgtagtgggctacagtgaatcaactagcatctgtgaagaggtctgcattttatctgcatctggcacagcggctgtactgaatcctagatttctgcaggatggcaccgtggaaggctgtttggaacagaggcttgaagaaaatttgcctacacgttgtggattttgtcatataccatatgatgaactgaatatgccatttccagctcatctcacatattgctataactgcaggaaacaaaaagttcctgatgttctgtttacaactatagacctcccaacagatgcaacagttattggaaaaggttgtcttattcaagcaaggttatgtcgcttaaaaaagaaagcacaggcagaagcaaatgctacagctatcagtaatctcttgccatttatggaatatgaagtgcatactcagctaatgaataaactaaaactcaaaggaatgaatgctttgtttggactaagaattcagatcacagtgggtgaaaatatgttgatgggcttagcgtctgccacaggtgtgtatttagcagctttaccaactcctggtggtattcagattgctgggaagactcctaatgatggctcatatgaacaacacatctctcatatgcagaagaagataaatgacacaattgctaaaaacaaagagttatatgaaatcaatcctccagagatatctgaagagattataggatcacccatcccagaacctaggcaacgctcaagacttctaagatctcaatcagaaagctcggatgaagttacagaattagacctttcacatgggaaaaaagatgcttttgttttggagattgatgacacagatgccatggaagatgtccattctctacttactgatgttcctcctccttcaggcttttatagttgtaatacagaaattatgcccggtataaataattggacctctgaaatacagatgttcacttcagtaagagtaatcagattaagcagcctcaacctgactaatcaagctctcaataagaactttaatgatctctgtgaaaatttgctcaagagcctgtactttaaactacgatctatgatcccctgctgcctttgccatgtaaattttacagtatctctgcctgaagatgaattaattcaggttacagtcacggcagtcgcaatcacttttgacaaaaatcaggctttacaaaccacaaaaacccctgttgaaaagtcattgcaaagagcctcaacagataatgaagaacttttacaatttccactggaactgtgttcagattcacttccttctcatccttttccaccagctaaagccatgacagttgaaaaagcaagtccagtgggtgatggaaatttccggaatcgttctgctccaccttgtgcaaattccacagttggggttgttaagatgacacctctttcttttattcctggagcaaaaataactaagtatcttgggataattaacatgttttttattcgagagactacttctcttcgggaggaaggaggagtcagtggttttctccatgcttttattgctgaagtgtttgcaatggtgagagctcatgttgctgcattaggagggaatgctgttgtctcctacataatgaagcagtgtgtcttcatggagaatccaaataaaaaccaggcacagtgtcttataaatgtaagtggtgacgcagtggtttttgttcgtgaatctgacttagaagtggtgtcatctcagcaacctactaccaactgccagtcatcatgtactgaaggcgaagttacaacctgaggaaaattaggaaaaaagagctcaactaaatgaaattcatcaatctctgttattttgtcattaattatcttcttagacttaaaattgaacttgagataaataaggaagaattgagtagatttgatttgcctggagtcttttggaggcatgagaattttctaatcttgacattttgtttgcctgttctagacaggccctgtggggtcttgacccttcagtaagttaagataaatttttaaaagaaccgtagcaaagatggaacctttgtaatttatgttgattttaataaaatcataatttaaaaaatgaaatgggaagattgtcaggaaattaggatagctactctagtataatttagaaaaactaagcaagagattctccagttgctagtgagtaagcactctgatttgagaaatgtgtggggacaatggagaaaagttttcagaaaactgctatgtagatttctgaatgtgttgtattttgctgaggaattcggtaacaactgaaagggaaaagtgcttcagccatcttttgaaaacaagttaaaattctggaacttgtatctgtaatacatcctaactcttgtaaaagaaaataatttatcatagctggtgtcctttcattgaaagttgtaatactgtctctaaggagggaggaaaagattattatataattttataactggcaacatttgagttagtattgactttgtctaaaagaggcttgacttcaactgggataaaaatgtcagtgaattttgttaaagtagtaaaaatgcagttgacttagtaggaacataaaattatttcctaataagataatattgcactcctaccaaataaacaggattttagtaatatctgagggattgttgatggtgagttagactgtatttggcatagaatttggaaatgtaacttgaatgtaaatatgctgcaaaatgttgaatgtatacatagaaagactttttctgtcgacgccaaatgcccgttgtaaatgaaccttaaatattacattcctcctttgcacaataatatttctttataacacttatgattttttcccccaggacaacaaactgcccttaagagtcatttccttgttatcacaggtgtcaatatttttctgtattttgtttataattttattttttaaataaaaagtgtataaaaataaaaaaaaaaaaaaaaaaaaaaaaa

SEQ ID NO: 13152 - DNA, 8265 bp, Homo sapiens
gcctccacacggctccgtcgggcgccgcgctcttccggcagcggtacgtttggagacgccgggaacccgcgttggcgtggttgactagtgcctcgcagcctcagcatgggggaacatggcctggagctggcttccatgatccccgccctgcgggagctgggcagtgccacaccagaggaatataatacagttgtacagaagccaagacaaattctgtgtcaattcattgaccggatacttacagatgtaaatgttgttgctgtagaacttgtaaagaaaactgactctcagccaacctccgtgatgttgcttgatttcatccagcatatcatgaaatcctccccacttatgtttgtaaatgtgagtggaagccatgagcgcaaaggcagttgtattgaattcagtaattggatcataacgagacttctgcggattgcagcaactccctcctgtcatttgttacacaagaaaatctgtgaagtcatctgttcattattatttctttttaaaagcaagagtcctgctatttttggggtactcacaaaagaattattacaactttttgaagacttggtttacctccatagaagaaatgtgatgggtcatgctgtggaatggccagtggtcatgagccgatttttaagtcaattagatgaacacatgggatatttacaatcagctcctttgcagttgatgagtatgcaaaatttagaatttattgaagtcactttattaatggttcttactcgtattattgcaattgtgttttttagaaggcaagaactcttactttggcagataggttgtgttctgctagagtatggtagtccaaaaattaaatccctagcaattagctttttaacagaactttttcagcttggaggactaccagcacaaccagctagcacttttttcagctcatttttggaattattaaaacaccttgtagaaatggatactgaccaattgaaactctatgaagagccattatcaaagctgataaagacactatttccctttgaagcagaagcttatagaaatattgaacctgtctatttaaatatgctgctggaaaaactctgtgtcatgtttgaagacggtgtgctcatgcggcttaagtctgatttgctaaaagcagctttgtgccatttactgcagtatttccttaaatttgtgccagctgggtatgaatctgctttacaagtcaggaaggtctatgtgagaaatatttgtaaagctcttttggatgtgcttggaattgaggtagatgcagagtacttgttgggcccactttatgcagctttgaaaatggaaagtatggaaatcattgaggagattcaatgccaaactcaacaggaaaacctcagcagtaatagtgatggaatatcacccaaaaggcgtcgtctcagctcgtctctaaacccttctaaaagagcaccaaaacagactgaggaaattaaacatgtggacatgaaccaaaagagcatattatggagtgcactgaaacagaaagctgaatcccttcagatttcccttgaatacagtggcctaaagaatcctgttattgagatgttagaaggaattgctgttgtcttacaactgactgctctgtgtactgttcattgttctcatcaaaacatgaactgccgtactttcaaggactgtcaacataaatccaagaagaaaccttctgtagtgataacttggatgtcattggatttttacacaaaagtgcttaagagctgtagaagtttgttagaatctgttcagaaactggacctggaggcaaccattgataaggtggtgaaaatttatgatgctttgatttatatgcaagtaaacagttcatttgaagatcatatcctggaagatttatgtggtatgctctcacttccatggatttattcccattctgatgatggctgtttaaagttgaccacatttgccgctaatcttctaacattaagctgtaggatttcagatagctattcaccacaggcacaatcacgatgtgtgtttcttctgactctgtttccaagaagaatattccttgagtggagaacagcagtttacaactgggccctgcagagctcccatgaagtaatccgggctagttgtgttagtggattttttatcttattgcagcagcagaattcttgtaacagagttcccaagattcttatagataaagtcaaagatgattctgacattgtcaagaaagaatttgcttctatacttggtcaacttgtctgtactcttcacggcatgttttatctgacaagttctttaacagaacctttctctgaacacggacatgtggacctcttctgtaggaacttgaaagccacttctcaacatgaatgttcatcttctcaactaaaagcttctgtctgcaagccattccttttcctactgaaaaaaaaaatacctagtccagtaaaacttgctttcatagataatctacatcatctttgtaagcatcttgattttagagaagatgaaacagatgtaaaagcagttcttggaactttattaaatttaatggaagatccagacaaagatgttagagtggcttttagtggaaatatcaagcacatattggaatccttggactctgaagatggatttataaaggagctttttgtcttaagaatgaaggaagcatatacacatgcccaaatatcaagaaataatgagctgaaggataccttgattcttacaacaggggatattggaagggccgcaaaaggagatttggtaccatttgcactcttacacttattgcattgtttgttatccaagtcagcatctgtctctggagcagcatacacagaaattagagctctggttgcagctaaaagtgttaaactgcaaagttttttcagccagtataagaaacccatctgtcagtttttggtagaatcccttcactctagtcagatgacagcacttccgaatactccatgccagaatgctgacgtgcgaaaacaagatgtggctcaccagagagaaatggctttaaatacgttgtctgaaattgccaacgttttcgactttcctgatcttaatcgttttcttactaggacattacaagttctactacctgatcttgctgccaaagcaagccctgcagcttctgctctcattcgaactttaggaaaacaattaaatgtcaatcgtagagagattttaataaacaacttcaaatatattttttctcatttggtctgttcttgttccaaagatgaattagaacgtgcccttcattatctgaagaatgaaacagaaattgaactggggagcctgttgagacaagatttccaaggattgcataatgaattattgctgcgtattggagaacactatcaacaggtttttaatggtttgtcaatacttgcctcatttgcatccagtgatgatccatatcagggcccgagagatatcatatcacctgaactgatggctgattatttacaacccaaattgttgggcattttggctttttttaacatgcagttactgagctctagtgttggcattgaagataagaaaatggccttgaacagtttgatgtctttgatgaagttaatgggacccaaacatgtcagttctgtgagggtgaagatgatgaccacactgagaactggccttcgattcaaggatgattttcctgaattgtgttgcagagcttgggactgctttgttcgctgcctggatcatgcttgtctgggctcccttctcagtcatgtaatagtagctttgttacctcttatacacatccagcctaaagaaactgcagctatcttccactacctcataattgaaaacagggatgctgtgcaagattttcttcatgaaatatattttttacctgatcatccagaattaaaaaagataaaagccgttctccaggaatacagaaaggagacctctgagagcactgatcttcagacaactcttcagctctctatgaaggccattcaacatgaaaatgtcgatgttcgtattcatgctcttacaagcttgaaggaaaccttgtataaaaatcaggaaaaactgataaagtatgcaacagacagtgaaacagtagaacctattatctcacagttggtgacagtgcttttgaaaggttgccaagatgcaaactctcaagctcggttgctctgtggggaatgtttaggggaattgggggcgatagatccaggtcgattagatttctcaacaactgaaactcaaggaaaagattttacatttgtgactggagtagaagattcaagctttgcctatggattattgatggagctaacaagagcttaccttgcgtatgctgataatagccgagctcaagattcagctgcctatgccattcaggagttgctttctatttatgactgtagagagatggagaccaacggcccaggtcaccaattgtggaggagatttcctgagcatgttcgggaaatactagaacctcatctaaataccagatacaagagttctcagaagtcaaccgattggtctggagtaaagaagccaatttacttaagtaaattgggtagtaactttgcagaatggtcagcatcttgggcaggttatcttattacaaaggttcgacatgatcttgccagtaaaattttcacctgctgtagcattatgatgaagcatgatttcaaagtgaccatctatcttcttccacatattctggtgtatgtcttactgggttgtaatcaagaagatcagcaggaggtttatgcagaaattatggcagttctaaagcatgacgatcagcataccataaatacccaagacattgcatctgatctgtgtcaactcagtacacagactgtgttctccatgcttgaccatctcacacagtgggcaaggcacaaatttcaggcactgaaagctgagaaatgtccacacagcaaatcaaacagaaataaggtagactcaatggtatctactgtggattatgaagactatcagagtgtaacccgttttctagacctcataccccaggatactctggcagtagcttcctttcgctccaaagcatacacacgagctgtaatgcactttgaatcatttattacagaaaagaagcaaaatattcaggaacatcttggatttttacagaaattgtatgctgctatgcatgaacctgatggagtggccggagtcagtgcaattagaaaggcagaaccatctctaaaagaacagatccttgaacatgaaagccttggcttgctgagggatgccactgcttgttatgacagggctattcagctagaaccagaccagatcattcattatcatggtgtagtaaagtccatgttaggtcttggtcagctgtctactgttatcactcaggtgaatggagtgcatgctaacaggtccgagtggacagatgaattaaacacgtacagagtggaagcagcttggaaattgtcacagtgggatttggtggaaaactatttggcagcagatggaaaatctacaacatggagtgtcagactgggacagctattattatcagccaaaaaaagagatatcacagctttttatgactcactgaaactagtgagagcagaacaaattgtacctctttcagctgcaagctttgaaagaggctcctaccaacgaggatatgaatatattgtgagattgcacatgttatgtgagttggagcatagcatcaaaccacttttccagcattctccaggtgacagttctcaagaagattctctaaactgggtagctcgactagaaatgacccagaattcctacagagccaaggagcctatcctggctctccggagggctttactaagcctcaacaaaagaccagattacaatgaaatggttggagaatgctggctgcagagtgccagggtagctagaaaggctggtcaccaccagacagcctacaatgctctccttaatgcaggggaatcacgactcgctgaactgtacgtggaaagggcaaagtggctctggtccaagggtgatgttcaccaggcactaattgttcttcaaaaaggtgttgaattatgttttcctgaaaatgaaaccccacctgagggtaagaacatgttaatccatggtcgagctatgctactagtgggccgatttatggaagaaacagctaactttgaaagcaatgcaattatgaaaaaatataaggatgtgaccgcgtgcctgccagaatgggaggatgggcatttttaccttgccaagtactatgacaaattgatgcccatggtcacagacaacaaaatggaaaagcaaggtgatctcatccggtatatagttcttcattttggcagatctctacaatatggaaatcagttcatatatcagtcaatgccacgaatgttaactctatggcttgattatggtacaaaggcatatgaatgggaaaaagctggccgctccgatcgtgtacaaatgaggaatgatttgggtaaaataaacaaggttatcacagagcatacaaactatttagctccatatcaatttttgactgctttttcacaattgatctctcgaatttgtcattctcacgatgaagtttttgttgtcttgatggaaataatagccaaagtatttctagcctatcctcaacaagcaatgtggatgatgacagctgtgtcaaagtcatcttatcccatgcgtgtgaacagatgcaaggaaatcctcaataaagctattcatatgaaaaaatccttagagaagtttgttggagatgcaactcgcctaacagataagcttctagaattgtgcaataaaccggttgatggaagtagttccacattaagcatgagcactcattttaaaatgcttaaaaagctggtagaagaagcaacatttagtgaaatcctcattcctctacaatcagtcatgatacctacacttccatcaattctgggtacccatgctaaccatgctagccatgaaccatttcctggacattgggcctatattgcagggtttgatgatatggtggaaattcttgcttctcttcagaaaccaaagaagatttctttaaaaggctcagatggaaagttctacatcatgatgtgtaagccaaaagatgacctgagaaaggattgtagactaatggaattcaattccttgattaataagtgcttaagaaaagatgcagagtctcgtagaagagaacttcatattcgaacatatgcagttattccactaaatgatgaatgtgggattattgaatgggtgaacaacactgctggtttgagacctattctgaccaaactatataaagaaaagggagtgtatatgacaggaaaagaacttcgccagtgtatgctaccaaagtcagcagctttatctgaaaaactcaaagtattccgagaatttctcctgcccaggcatcctcctatttttcatgagtggtttctgagaacattccctgatcctacatcatggtacagtagtagatcagcttactgccgttccactgcagtaatgtcaatggttggttatattctggggcttggagaccgtcatggtgaaaatattctctttgattctttgactggtgaatgcgtacatgtagatttcaattgtcttttcaataagggagaaacctttgaagttccagaaattgtgccatttcgcctgactcataatatggttaatggaatgggtcctatgggaacagagggtctttttcgaagagcatgtgaagttacaatgaggctgatgcgtgatcagcgagagcctttaatgagtgtcttaaagacttttctacatgatcctcttgtggaatggagtaaaccagtgaaagggcattccaaagcgccactgaatgaaactggagaagttgtcaatgaaaaggccaagacccatgttcttgacattgagcagcgactacaaggtgtaatcaagactcgaaatagagtgacaggactgccgttatctattgaaggacatgtgcattaccttatacaagaagctactgatgaaaacttactatgccagatgtatcttggttggactccatatatgtgaaatgaaattatgtaaaagaatatgttaataatctaaaagtaatgcatttggtatgaatctgtggttgtatctgttcaattctaaagtacaacataaatttacgttctcagcaactgttatttctctctgatcattaattatatgtaaaataatatacattcagttattaagaaataaactgctttcttaataaaaaaaaaaaaaaaaaaaaaaaaaaaaaaaaaa

SEQ ID NO: 13153 - DNA, 3897 bp, Homo sapiens
acgcccaggtcgcccgcatcccgctgccgcaggagagagacagcgcgccccggccctgctccccaggcttcgcccgggcgccctcaactctgtccccagagactgagcacctgtcctccgcctcggcctctgctgagagccctctcctctggagcacacaccacccctgcagcccaagaagagtcccagccccacgccggctaccaccatggcggagaccaacaacgaatgtagcatcaaggtgctctgccgattccggcccctgaaccaggctgagattctgcggggagacaagttcatccccattttccaaggggacgacagcgtcgttattggggggaagccatatgtttttgaccgtgtattccccccaaacacgactcaagagcaagtttatcatgcatgtgccatgcagattgtcaaagatgtccttgctggctacaatggcaccatttttgcttatggacagacatcctcagggaaaacacataccatggagggaaagctgcacgaccctcagctgatgggaatcattcctcgaattgcccgagacatcttcaaccacatctactccatggatgagaaccttgagttccacatcaaggtttcttactttgaaatttacctggacaaaattcgtgaccttctggatgtgaccaagacaaatctgtccgtgcacgaggacaagaaccgggtgccatttgtcaagggttgtactgaacgctttgtgtccagcccggaggagattctggatgtgattgatgaagggaaatcaaatcgtcatgtggctgtcaccaacatgaatgaacacagctctcggagccacagcatcttcctcatcaacatcaagcaggagaacatggaaacggagcagaagctcagtgggaagctgtatctggtggacctggcagggagtgagaaggtcagcaagactggagcagagggagccgtgctggacgaggcaaagaatatcaacaagtcactgtcagctctgggcaatgtgatctccgcactggctgagggcactaaaagctatgttccatatcgtgacagcaaaatgacaaggattctccaggactctctcgggggaaactgccggacgactatgttcatctgttgctcaccatccagttataatgatgcagagaccaagtccaccctgatgtttgggcagcgggcaaagaccattaagaacactgcctcagtaaatttggagttgactgctgagcagtggaagaagaaatatgagaaggagaaggagaagacaaaggcccagaaggagacgattgcgaagctggaggctgagctgagccggtggcgcaatggagagaatgtgcctgagacagagcgcctggctggggaggaggcagccctgggagccgagctctgtgaggagacccctgtgaatgacaactcatccatcgtggtgcgcatcgcgcccgaggagcggcagaaatacgaggaggagatccgccgtctctataagcagcttgacgacaaggatgatgaaatcaaccaacaaagccaactcatagagaagctcaagcagcaaatgctggaccaggaagagctgctggtgtccacccgaggagacaacgagaaggtccagcgggagctgagccacctgcaatcagagaacgatgccgctaaggatgaggtgaaggaagtgctgcaggccctggaggagctggctgtgaactatgaccagaagtcccaggaggtggaggagaagagccagcagaaccagcttctggtggatgagctgtctcagaaggtggccaccatgctgtccctggagtctgagttgcagcggctacaggaggtcagtggacaccagcgaaaacgaattgctgaggtgctgaacgggctgatgaaggatctgagcgagttcagtgtcattgtgggcaacggggagattaagctgccagtggagatcagtggggccatcgaggaggagttcactgtggcccgactctacatcagcaaaatcaaatcagaagtcaagtctgtggtcaagcggtgccggcagctggagaacctccaggtggagtgtcaccgcaagatggaagtgaccgggcgggagctctcatcctgccagctcctcatctctcagcatgaggccaagatccgctcgcttacggaatacatgcagagcgtggagctaaagaagcggcacctggaagagtcctatgactccttgagcgatgagctggccaagctccaggcccaggaaactgtgcatgaagtggccctgaaggacaaggagcctgacactcaggatgcagatgaagtgaagaaggctctggagctgcagatggagagtcaccgggaggcccatcaccggcagctggcccggctccgggacgagatcaacgagaagcagaagaccattgatgagctcaaagacctaaatcagaagctccagttagagctagagaagcttcaggctgactacgagaagctgaagagcgaagaacacgagaagagcaccaagctgcaggagctgacatttctgtacgagcgacatgagcagtccaagcaggacctcaagggtctggaggagacagttgcccgggaactccagaccctccacaaccttcgcaagctgttcgttcaagacgtcacgactcgagtcaagaaaagtgcagaaatggagcccgaagacagtggggggattcactcccaaaagcagaagatttcctttcttgagaacaacctggaacagcttacaaaggttcacaaacagctggtacgtgacaatgcagatctgcgttgtgagcttcctaaattggaaaaacgacttagggctacggctgagagagttaaggccctggagggtgcactgaaggaggccaaggagggcgccatgaaggacaagcgccggtaccagcaggaggtggaccgcatcaaggaggccgttcgctacaagagctcgggcaaacggggccattctgcccagattgccaaacccgtccggcctggccactacccagcatcctcacccaccaacccctatggcacccggagccctgagtgcatcagttacaccaacagcctcttccagaactaccagaatctctacctgcaggccacacccagctccacctcagatatgtactttgcaaactcctgtaccagcagtggagccacatcttctggcggccccttggcttcctaccagaaggccaacatggacaatggaaatgccacagatatcaatgacaataggagtgacctgccgtgtggctatgaggctgaggaccaggccaagcttttccctctccaccaagagacagcagccagctaatctcccacacccacggctgcatacctgcactttcagtttctaagagggactgaggcctcttctcagcatgctgcaaacctgtggtctctgatactaactccctccccaacccctgttgttggactgtactatgtttgatgtcttctcttacttactctgtatctctttgtactctgtatctatatatcaaaagctgctgctatgtctctcttctgtcttattctcaagtatctactgatgtatttagcaatttcaaagcatagtctaccttccttatttggggcaatagggaggagggtgaatgtttcttctttctcatctactcgtctcacactgagtggtgttagtcactgagtagaggtcacagagatgacaaaaggaaaaatgggagctagagggttgtgacccttcatacacacacgcacgcacgcacacaaacatgcacacacgcatgcacacacacaaagccttaagcagaagaatgtcttagcatcatgagacagagaaatagactcttcctccctcctctttcacatatagcacaggggaaggtaaaatggaagggctgctaattgagacatataattttc

SEQ ID NO: 13154 - DNA, 4431 bp, Homo sapiens
gtggcggcttcgcccgcgagtccagaggcaggcgagcagctcggtcgcccccaccggccccatggcagcccccggcgccccagctgagtacggctacatccggaccgtcctgggccagcagatcctgggacaactggacagctccagcctggcgctgccctccgaggccaagctgaagctggcggggagcagcggccgcggcggccagacagtcaagagcctgcggatccaggagcaggtgcagcagaccctcgcccggaagggccgcagctccgtgggcaacggaaatcttcaccgaaccagcagtgttcctgagtatgtctacaacctacacttggttgaaaatgattttgttggaggccgttcccctgttcctaaaacctatgacatgctaaaggctggcacaactgccacttatgaaggtcgctggggaagaggaacagcacagtacagctcccagaagtccgtggaagaaaggtccttgaggcatcctctgaggagactggagatttctcctgacagcagcccggagagggctcactacacgcacagcgattaccagtacagccagagaagccaggctgggcacaccctgcaccaccaagaaagcaggcgggccgccctcctagtgccaccgagatatgctcgttccgagatcgtgggggtcagccgtgctggcaccacaagcaggcagcgccactttgacacataccacagacagtaccagcatggctctgttagcgacaccgtttttgacagcatccctgccaacccggccctgctcacgtaccccaggccagggaccagccgcagcatgggcaacctcttggagaaggagaactacctgacggcagggctcactgtcgggcaggtcaggccgctggtgcccctgcagcccgtcactcagaacagggcttccaggtcctcctggcatcagagctccttccacagcacccgcacgctgagggaagctgggcccagtgtcgccgtggattccagcgggaggagagcgcacttgactgtcggccaggcggccgcagggggaagtgggaatctgctcactgagagaagcactttcactgactcccagctggggaatgcagacatggagatgactctggagcgagcagtgagtatgctcgaggcagaccacatgccgccatccaggatttctgctgcagctactttcatacagcacgagtgcttccagaaatctgaagctcggaagagggttaaccagcttcgtggcatcctcaagcttctgcagctcctaaaagttcagaatgaagacgttcagcgagctgtgtgtggggccttgagaaacttagtatttgaagacaatgacaacaaattggaggtggctgaactaaatggggtacctcggctgctccaggtgctgaagcaaaccagagacttggagactaaaaaacaaataacagaccatacagtcaatttaagaagtaggaatggctggccgggcgcggtggctcacgcctgtaatcccagcactttgggaggccaaggcgggcggatcacgaggtcaggagttcgagaccagcctgaccaacatggtttgctgtggaatttgtcatctaatgacaaactcaagaatctcatgataacagaagcattgcttacgctgacggagaatatcatcatccccttttctgggtggcctgaaggagactacccaaaagcaaatggtttgctcgattttgacatattctacaacgtcactggatgcctaagaaacatgagttctgctggcgctgatgggagaaaagcgatgagaagatgtgacggactcattgactcactggtccattatgtcagaggaaccattgcagattaccagccagatgacaaggccacggagaattgtgtgtgcattcttcataacctctcctaccagctggaggcagagctcccagagaaatattcccagaatatctatattcaaaaccggaatatccagactgacaacaacaaaagtattggatgttttggcagtcgaagcaggaaagtaaaagagcaataccaggacgtgccgatgccggaggaaaagagcaaccccaagggcgtggagtggctgtggcattccattgttataaggatgtatctgtccttgatcgccaaaagtgtccgcaactacacacaagaagcatccttaggagctctgcagaacctcacggccggaagtggaccaatgccgacatcagtggctcagacagttgtccagaaggaaagtggcctgcagcacacccgaaagatgctgcatgttggtgacccaagtgtgaaaaagacagccatctcgctgctgaggaatctgtcccggaatctttctctgcagaatgaaattgccaaagaaactctccctgatttggtttccatcattcctgacacagtcccgagtactgaccttctcattgaaactacagcctctgcctgttacacattgaacaacataatccaaaacagttaccagaatgcacgcgaccttctaaacaccgggggcatccagaaaattatggccattagtgcaggcgatgcctatgcctccaacaaagcaagtaaagctgcttccgtccttctgtattctctgtgggcacacacggaactgcatcatgcctacaagaaggctcagtttaagaagacagattttgtcaacagccggactgccaaagcctaccactcccttaaagactgaggaaaatgacaaagtattctcggctgcaaaaatccccaaaggaaaacacctatttttctactacccagcccaagaaacctcaaaagcatgccttgtttctatccttctctatttccgtggtcccctgaatccagaaaacaaatagaacataattttatgagtcttccagaagacctttgcaagtttgccaccagtagataccggccacaggctcgacaaatagtggtctttgttattagggcttatggtacatggcttcctggaatcaaaatgtgaattcatgtggaagggacattaatccaataaataaggaaagaagctgttgcattactgggattttaaaagtttgatttacatttatattccttttctggttcccatgttttgtcactcatgtgcacattgcttcgccattgggcctccagtgtattgttctgcagtgttgaaacagaatggaaatgacaagaaatatctgcagttatccaggagaaagtataatggcaaaattattggtttctttctttactttgtgcttgtttttatccccttgggttgtttttctctgatttttaaataaacttaagaaatttagattacagagtatgcatgactgtaagaaaaagaaattgagaggaagtgatcatagcaaattaaagaagtcttttcctcccagaacttaaagtaaaataaaaaataaataaataaataaaatcttttccacagagaaaggcaactgtgatgataaaatttaacgttcccccaaacactgagtcaatgagatttttctcaggagatactttacctataacaacgccgttaaatccaaatctcttctaaacgatggcattctatgtaatgcctttcctggacttttttggccactgccctggactagtgaaagaatggactctatctttatctgcaagaggaactaaggccttctatcagactgcctggccagcctggggcactgaaaatacggctcatgttaatgagttacattatcagccagcccagccttgcccaccatttaagaaatatcacagagccactagatctcatatgatcttcttcaagccattattttaactcaagaaaactctagagaagaaaagtgaagaagtcatgttgaagaagatgtaagaatgtgtcaagaccatccagaaatgatatgagaaatactgatattttaaatggttgacatcatccagcgaaatgaatctacattaaatgttgttttaactgcgctatgattaaaaccattcatatagagttagtctttacaactactattctgttatttttttttttaatctgacaacatttgtcctaagtaagataagcaaaaaaattcttcaactccttttggcaagaaaactgtaacagaaaataaattttgaatgtgtacttaagtctttattatatttgaagcaattttttttcaattttaaaagctgaatgaagacaacttaggttgctaacctagttcaaaatgaaattatttagataccaatttttaaaatactggagagaatttatatgtctttttccagagttctgatgataagcatttggagtgcatttattcctccagataataaatgtgtgttcagaactttttgtgttttttaaggcattaataaagccttcgataatattaaatacaaaatgaaaaaaaaaaaaaaaaaaaaaaaaaaaaaaaaaaaaaaaaaaaaaaaaaaaaa

SEQ ID NO: 13155 - DNA, 2568 bp, Homo sapiens
gccagggaccagtggtgggaggaggctgcggcgctagatgcggacacctggaccgccgcgccgaggctcccggcgctcgctgctcccgcggcccgcgccatgccctcctacacggtcaccgtggccactggcagccagtggttcgccggcactgacgactacatctacctcagcctcgtgggctcggcgggctgcagcgagaagcacctgctggacaagcccttctacaacgacttcgagcgtggcgcggtggattcatacgacgtgactgtggacgaggaactgggcgagatccagctggtcagaatcgagaagcgcaagtactggctgaatgacgactggtacctgaagtacatcacgctgaagacgccccacggggactacatcgagttcccctgctaccgctggatcaccggcgatgtcgaggttgtcctgagggatggacgcgcaaagttggcccgagatgaccaaattcacattctcaagcaacaccgacgtaaagaactggaaacacggcaaaaacaatatcgatggatggagtggaaccctggcttccccttgagcatcgatgccaaatgccacaaggatttaccccgtgatatccagtttgatagtgaaaaaggagtggactttgttctgaattactccaaagcgatggagaacctgttcatcaaccgcttcatgcacatgttccagtcttcttggaatgacttcgccgactttgagaaaatctttgtcaagatcagcaacactatttctgagcgggtcatgaatcactggcaggaagacctgatgtttggctaccagttcctgaatggctgcaaccctgtgttgatccggcgctgcacagagctgcccgagaagctcccggtgaccacggagatggtagagtgcagcctggagcggcagctcagcttggagcaggaggtccagcaagggaacattttcatcgtggactttgagctgctggatggcatcgatgccaacaaaacagacccctgcacactccagttcctggccgctcccatctgcttgctgtataagaacctggccaacaagattgtccccattgccatccagctcaaccaaatcccgggagatgagaaccctattttcctcccttcggatgcaaaatacgactggcttttggccaaaatctgggtgcgttccagtgacttccacgtccaccagaccatcacccaccttctgcgaacacatctggtgtctgaggtttttggcattgcaatgtaccgccagctgcctgctgtgcaccccattttcaagctgctggtggcacacgtgagattcaccattgcaatcaacaccaaggcccgtgagcagctcatctgcgagtgtggcctctttgacaaggccaacgccacagggggcggtgggcacgtgcagatggtgcagagggccatgaaggacctgacctatgcctccctgtgctttcccgaggccatcaaggcccggggcatggagagcaaagaagacatcccctactacttctaccgggacgacgggctcctggtgtgggaagccatcaggacgttcacggccgaggtggtagacatctactacgagggcgaccaggtggtggaggaggacccggagctgcaggacttcgtgaacgatgtctacgtgtacggcatgcggggccgcaagtcctcaggcttccccaagtcggtcaagagccgggagcagctgtcggagtacctgaccgtggtgatcttcaccgcctccgcccagcacgccgcggtcaacttcggccagtacgactggtgctcctggatccccaatgcgcccccaaccatgcgagccccgccaccgactgccaagggcgtggtgaccattgagcagatcgtggacacgctgcccgaccgcggccgctcctgctggcatctgggtgcagtgtgggcgctgagccagttccaggaaaacgagctgttcctgggcatgtacccagaagagcattttatcgagaagcctgtgaaggaagccatggcccgattccgcaagaacctcgaggccattgtcagcgtgattgctgagcgcaacaagaagaagcagctgccatattactacttgtccccagaccggattccgaacagtgtggccatctgagcacactgccagtctcactgtgggaaggccagctgccccagccagatggactccagcctgcctggcaggctgtctggccaggcctcttggcagtcacatctcttcctccgaggccagtacctttccatttattctttgatcttcagggaactgcatagattgatcaaagtgtaaacaccatagggacccattctacacagagcaggactgcacagcgtcctgtccacacccagctcagcatttccacaccaagcagcaacagcaaatcacgaccactgatagatgtctattcttgttggagacatgggatgattattttctgttctatttgtgcttagtccaattccttgcacatagtaggtacccaattcaattactattgaatgaattaagaattggttgccataaaaataaatcagttcatttaaaaaaaaaaaaaaaaaa

SEQ ID NO: 13156 - DNA, 2162 bp, Homo sapiens
aaaaagacggaggagatccagttcgggctgacagtgagaggatgcagcccggtgtctgggcgggctcttaccggcgaagcggatcttcacgaggtcgagcggatgcagcgcaaggttggataagacgccgccgctcacgcccgctatcaggttctcataccggacgtggcggaataccgtgctccacgccgacgacccggacgccgactggccctggcccgtcataggctcggggcccgtcgacaccacggcgcccagggccgcggaggtgggacgcgatgcagtggccgccaccgtggcgacggtcgccccttgtgagcgcaaccccacctccgggaccaacgagaggactcttatgcccaaggcgcgtgagcgaagccggagactctagtactgagggggcaagaacggggcacagccactacgtcacgccggcggaaagcgcgatggaggggaggtcccagcctctcccgagtctccgccctgcctcgcccacaaatgctccagcccacggacgcggaagcgactgcacagctaaagaaccgccccttgctaacgtttgccggcaaaactacggagcggcgcaggatccagttgagctagcaggccgccgctccgcgagtcacgtgactggaagcagtctgggaaaagcggaagtcgcctgtgggaggaggtggcggtgggcggaactcctagcggacacctcgtggagtccggccggaagagcaaccgagatgaaggtgaagatgctgagccggaatccggacaattatgtccgcgaaaccaagttggacttacagagagttccaagaaactatgatcctgctttacatccttttgaggtcccacgagaatatgtaagagctttaaatgctaccaaactggaacgagtatttgcaaaaccattccttgcttcgctggatggtcaccgtgatggagtcaattgcttggcaaagcatccagagaagctggctactgtcctttctggggcgtgtgatggagaggttagaatttggaatctaactcagcggaattgtatccgtacaatacaagcacatgaaggctttgtacgaggaatatgtactcgcttttgtgggacttcttttttcactgttggtgatgacaaaactgtgaagcagtggaaaatggatgggccaggctatggagacgaggaagagccattacatacaatattaggaaagacagtgtatactgggattgatcatcactggaaagaagctgtttttgccacatgtggacagcaagtagacatttgggatgaacaaagaactaatcctatatgttcaatgacctggggatttgacagtataagtagtgttaaatttaacccaattgagacatttctcttgggaagttgtgcatctgacaggaatatagtactgtacgatatgaggcaagctactcctttgaaaaaggttatcttagatatgagaacaaatacaatctgttggaaccctatggaagctttcatttttacagcagcaaatgaagattataacttatatacttttgatatgcgtgcactggacactcctgtaatggtccatatggatcatgtatctgcagtgcttgatgtggattactctcccactgggaaggagtttgtgtctgctagtttcgataaatctattcgaatctttcctgtagacaaaagtcgaagcagggaggtatatcatacaaagagaatgcaacatgttatctgtgtaaaatggacttctgacagcaagtatattatgtgtggatctgatgaaatgaacattcgcctgtggaaagctaatgcttctgaaaaattgggtgtgcttacatcacgagaaaaagcagccaaggattataaccagaaattgaaggagaaatttcagcattatcctcatataaaacgtatagctcgtcatcgacatctaccaaaatctatctatagccagattcaggaacagcgcatcatgaaagaagctcgtcgacgaaaggaagtgaatcgtattaaacacagcaagcctggatctgtgccacttgtgtcagagaagaagaaacacgtagtggcagttgtaaaataattggtattcctaacaatcctgatgtataattatttgttacttttgatttgagaactctacaaataaaagtgctgggactagattaattgc

SEQ ID NO: 13157 - DNA, 2169 bp, Homo sapiens
ctcggtctttaaaaggaagaaggggcttatcgttaagtcgcttgtgatcttttcagtttctccagctgctggctttttggacacccactcccccgccaggaggcagttgcaagcgcggaggctgcgagaaataactgcctcttgaaacttgcagggcgaagagcaggcggcgagcgctgggccggggagggaccacccgagctgcgacgggctctggggctgcggggcagggctggcgcccggagcctgagctgcaggaggtgcgctcgctttcctcaacaggtggcggcggggcgcgcgccgggagaccccccctaatgcgggaaaagcacgtgtccgcattttagagaaggcaaggccggtgtgtttatctgcaagccattatacttgcccacgaatctttgagaacattataatgacctttgtgcctcttcttgcaaggtgttttctcagctgttatctcaagacatggatataaaaaactcaccatctagccttaattctccttcctcctacaactgcagtcaatccatcttacccctggagcacggctccatatacataccttcctcctatgtagacagccaccatgaatatccagccatgacattctatagccctgctgtgatgaattacagcattcccagcaatgtcactaacttggaaggtgggcctggtcggcagaccacaagcccaaatgtgttgtggccaacacctgggcacctttctcctttagtggtccatcgccagttatcacatctgtatgcggaacctcaaaagagtccctggtgtgaagcaagatcgctagaacacaccttacctgtaaacagagagacactgaaaaggaaggttagtgggaaccgttgcgccagccctgttactggtccaggttcaaagagggatgctcacttctgcgctgtctgcagcgattacgcatcgggatatcactatggagtctggtcgtgtgaaggatgtaaggccttttttaaaagaagcattcaaggacataatgattatatttgtccagctacaaatcagtgtacaatcgataaaaaccggcgcaagagctgccaggcctgccgacttcggaagtgttacgaagtgggaatggtgaagtgtggctcccggagagagagatgtgggtaccgccttgtgcggagacagagaagtgccgacgagcagctgcactgtgccggcaaggccaagagaagtggcggccacgcgccccgagtgcgggagctgctgctggacgccctgagccccgagcagctagtgctcaccctcctggaggctgagccgccccatgtgctgatcagccgccccagtgcgcccttcaccgaggcctccatgatgatgtccctgaccaagttggccgacaaggagttggtacacatgatcagctgggccaagaagattcccggctttgtggagctcagcctgttcgaccaagtgcggctcttggagagctgttggatggaggtgttaatgatggggctgatgtggcgctcaattgaccaccccggcaagctcatctttgctccagatcttgttctggacagggatgaggggaaatgcgtagaaggaattctggaaatctttgacatgctcctggcaactacttcaaggtttcgagagttaaaactccaacacaaagaatatctctgtgtcaaggccatgatcctgctcaattccagtatgtaccctctggtcacagcgacccaggatgctgacagcagccggaagctggctcacttgctgaacgccgtgaccgatgctttggtttgggtgattgccaagagcggcatctcctcccagcagcaatccatgcgcctggctaacctcctgatgctcctgtcccacgtcaggcatgcgagtaacaagggcatggaacatctgctcaacatgaagtgcaaaaatgtggtcccagtgtatgacctgctgctggagatgctgaatgcccacgtgcttcgcgggtgcaagtcctccatcacggggtccgagtgcagcccggcagaggacagtaaaagcaaagagggctcccagaacccacagtctcagtgacgcctggccctgaggtgaactggcccacagaggtcacaggctgaagcgtgaactccagtgtgtcaggagcctgggcttcatctttctgctgtgtggtccctcatttgg

SEQ ID NO: 13158 - DNA, 15882 bp, Homo sapiens
gaagatggcgacgagcggcggcgaagaggcggcggcagcggctccggcgccggggaccccggcaacgggggcggacacgaccccgggctgggaggtggctgtgcggcccctgctgtccgcgtcctactccgccttcgagatgaaggagttgccgcagctggtggcctcagtcatcgagagtgaatcagaaatcctgcaccatgagaagcagtacgagccattctactcatcttttgttgcactttccacacactatattacaacagtttgcagtctcattccccggaaccaacttcagtcagtggcagcagcctgtaaagttctaattgagttttctctcctgcgtctggagaatccagatgaggcttgtgctgtgtcccagaaacacttgattctcctaatcaagggcctgtgcactggctgtagccgactagatagaactgaaattatcacatttacagcaatgatgaaatccgccaagctgccccaaacagtgaagacactttcagacgtggaagatcagaaagagctggcctcaccagtaagccctgagttgaggcaaaaggaggtacagatgaattttttgaaccagctgacctcagtttttaaccctagaactgtagcatcacaacctatcagtacacagactctggtggaaggagaaaatgatgagcagtcatctacagatcaagcctcagctatcaaaaccaagaatgtgttcatagctcagaacgtggctagtcttcaagagcttggtggctcggagaagctactgcgtgtatgtttgaacctgccatatttcctacgctatatcaatcggttccaagatgcagttttagctaattccttcttcataatgcctgcaacagtagcagatgccactgctgttcgtaatggctttcattcattggtgattgatgtaactatggcattggataccctttctctacctgtgttggaacctctcaatccttctcgtctacaagatgtgacagtcctcagcctaagttgtctgtatgcaggtgtgagtgtggcaacgtgcatggccatcctccatgtgggtagtgcccagcaagtgcggacagggtccacgagctccaaagaagatgactatgaaagtgacgcagctacaattgtccagaaatgtctcgaaatctatgacatgattggacaagcaatcagcagttctcgccgggctggtggtgagcactatcagaatttccaattgctgggtgcttggtgcttgttaaacagccttttcctcatactgaacctcagtcctactgcgttggctgataaggggaaagagaaggacccactggctgccctccgagtcagagacatcctttctcgtactaaagagggagtgggctcccctaaactggggcctggaaaagggcatcagggatttggggtactctcagtaatattggcaaaccatgccatcaaactgctaacgtctctctttcaagacctacaagtggaggcccttcacaagggttgggagacagatggcccccctgcagccttgagcattatggcccagagcacctccatacagaggattcaacggctgattgactctgtcccactgatgaacctgctcttgacgttactttcaacttcctacagaaaggcatgtgtcctgcagcggcagaggaagggctccatgagcagcgatgccagcgcctccaccgactccaatacttactatgaggacgatttcagtagcacggaggaggacagcagccaagacgatgacagtgagcctattttggggcaatggtttgaggagactatttctcccagtaaagagaaagcagcacctccgcctcctcccccacctcctccactggaaagctctcctcgggttaaaagccccagtaagcaggcccctggtgagaagggcaacattctggcgagtcgcaaagatcctgagttgttcttaggtctggcttccaacattttgaacttcatcacctcttccatgctgaactctcggaacaattttatccgaaactatctgagtgtatctctttcagaacaccatatggccaccctagccagtatcatcaaggaggtggacaaagatggactcaagggttcatcagatgaagagtttgctgcagctctctatcacttcaaccactcactggtaacctctgaccttcagtcacctaacctgcagaacacactgttgcagcagctaggagtggctcctttttctgagggcccttggcccttgtacattcaccctcaaagcctctctgtgctttcacgcctcctgctcatctggcaacataaagccagtgctcaaggtgaccctgacgtcccagaatgccttaaagtttgggacaggtttttgtctacaatgaagcagaatgccctgcaaggtgtggtgcccagtgagacagaggatctgaatgtagaacacctgcagatgctcctcctcattttccacaatttcaccgagacaggccggcgggccatattgtcgctttttgtccagatcatccaggagttgagcgtcaacatggatgctcagatgcgcttcgtgccgcttatcttggctcgcctccttctcatctttgattatctgcttcatcagtactccaaagcccctgtgtatctatttgagcaggtacagcataacctgctaagtcctccctttgggtgggcaagtggatcccaggacagcaacagccgccgggcaaccactcctctctatcatggattcaaagaagtagaagaaaactggtctaagcatttctcatcagatgctgtcccacaccccagattctactgtgtcctgtccccagaagcctcagaggatgatttgaaccgacttgattctgtggcatgtgacgtccttttctccaagcttgtcaagtatgatgagctttatgctgcactgacagccctgcttgcagctgggtcccagcttgatacagttaggagaaaggaaaacaagaatgtaacagccttggaggcctgtgcccttcaatattacttcttgatactgtggaggatcctaggaattttaccaccatcaaagacttacattaaccagctatccatgaactcacctgagatgagcgaatgtgacatcttgcacactctgcgatggtcttctcggctccggatcagctcctatgtcaactggataaaggatcaccttatcaaacagggaatgaaggctgagcatgctagctcgcttctagaactggcatccaccactaagtgtagctcagtgaaatatgatgttgaaatagtagaggaatacttcgctcgacagatctcatccttctgtagtatcgactgtaccaccatcttgcagctgcatgaaattcccagtctgcagtccatctacacccttgatgccgcgatctcaaaggtccaggtctctttggatgagcatttttctaagatggctgctgagactgatcctcataagtcgtctgagattaccaagaacctacttccagccacgctgcaactcattgacacctatgcatcgttcaccagagcctatttgctgcaaaactttaatgaagagggaacaactgagaaaccttccaaggagaaactgcaaggctttgctgctgttttggctattggctctagcaggtgcaaggcaaatactctgggtccgacactggttcagaatttgccatcgtcagtgcagactgtgtgtgagtcctggaacaacatcaataccaatgaatttcccaatattggatcctggcgcaatgcctttgccaatgacaccatcccttcagagagttatattagtgcagtgcaggctgcacacctggggactctctgtagccaaagtctgcccctggctgcttccctgaagcataccctcctctcactggtcaggttgactggagatcttattgtttggtcagatgagatgaacccaccacaggtaattcggacactgctacctcttcttttggaatcaagcactgagagtgttgccgagatcagtagcaactccctggaacgcatcttgggccctgctgagtctgatgagttcttggctcgtgtttatgagaagctgatcactggttgttacaacattctggccaatcatgcagatcctaacagtggactggatgaatccatcctggaggaatgtctccagtacttggaaaagcagctggaaagtagccaggctcgtaaagctatggaggagtttttctctgacagtggagaacttgtacagatcatgatggcaacagccaatgagaacctctctgctaaattctgtaaccgagttttgaaattcttcaccaaactcttccagctgactgagaagagccctaacccgagcctgttgcatctctgtggctccctggcacaactggcctgtgtggaacctgtgcgcctgcaggcctggctcacccgcatgactacatcgcccccaaaagattctgatcagctggatgtaattcaggagaaccggcagctgctgcagttactgaccacatacattgttcgggaaaacagccaagttggggaaggtgtgtgtgctgttcttctgggcaccctgactcccatggcaacagagatgctggccaacggtgatgggactggcttccctgaacttatggttgtgatggccactctggccagtgcaggtcaaggtgctggtcaccttcagcttcataatgctgctgtggattggctgagcagatgcaagaaatacctgtcacagaagaatgtagttgaaaaactgaatgccaatgtaatgcatggaaagcatgtgatgatcttggagtgcacatgccatatcatgtcttacttggctgatgtcacgaatgccctgagccagagtaatggtcaaggcccaagtcatctctcagtggatggggaagagcgggccattgaagtagactcagactgggtggaggagttggcggtggaagaggaagattcccaggctgaggattcagatgaagattctctttgcaataaactctgcacttttacgatcacacagaaagaattcatgaaccagcattggtaccactgtcacacctgtaaaatggtggatggcgtgggtgtctgcacagtgtgtgctaaggtgtgccacaaggatcatgagatttcctatgccaagtatggatccttcttctgtgactgtggagccaaggaagatggcagctgtttggctctggtgaagagaactcctagcagtggcatgagctctaccatgaaggagtcggcatttcagagtgaacccaggatttcagagagtctagtgcgtcatgccagcacctcctcgccagctgacaaagccaaggttaccatcagtgatggaaaggttgctgacgaagagaagcccaagaagagcagcctctgccgcacagtagagggctgccgggaggaattacagaaccaggccaatttctccttcgctcctctcgtgttagacatgcttaatttccttatggatgccattcagaccaacttccagcaagcttcagccgtcgggagcagcagccgtgctcagcaagccctcagtgagctacacactgtggagaaggcagtggagatgacagaccagctgatggttcccaccttagggtcccaggaaggtgcctttgagaatgtgcggatgaattacagtggagaccagggccagaccatccggcagctgatcagtgctcatgtgctcaggcgggtggctatgtgtgtgctctcctctccccatgggcgccgccaacatttggctgtcagccatgagaagggcaagatcaccgttctgcagctctctgcactcctgaagcaagcagattccagcaaaaggaagttaactctgacccgcttggcttctgccccagttccttttactgtgttgagcctcacaggaaatccctgcaaggaagactacttggcggtttgtgggctaaaggactgtcatgtgctcacctttagtagctcaggctctgtttcggatcacttggttttgcaccctcagttggcaacggggaacttcatcatcaaagccgtgtggttacctggttcacagaccgagttagcaattgtcaccgcagactttgttaagatttatgacctgtgtgttgatgccttgagtccaaccttctattttctcctgccaagctcaaagataagagatgttaccttccttttcaatgaggagggaaagaacatcattgttataatgtcttcggctgggtacatctatactcagcttatggaagaggccagcagtgcccagcagggacccttctatgtcactaatgtgttggaaatcaatcatgaggacctgaaggacagtaacagccaggtggcgggcggtggtgtgtccgtgtactactcccacgtgttgcagatgttgttcttcagctattgtcaaggcaaatcattcgcagccaccatcagcaggacaaccctggaggtgttgcaactcttccccatcaacatcaaaagttccaatggtggcagtaagacttctcctgctctttgccagtggtctgaggtgatgaaccaccctggcttggtgtgctgtgtccagcaaactacaggggtgccgctggtagttatggtgaaaccagacacttttcttatccaggagattaagactcttcctgctaaagcgaagatccaagacatggttgctattaggcacacggcctgcaatgagcagcagcggacaacaatgattctgctgtgtgaggatggcagcctgcgcatttacatggccaacgtggagaacacctcctactggctgcagccatccctgcagcccagcagtgtcatcagcatcatgaagcctgttcgaaagcgcaaaacagctacaatcacaacccgcacgtctagccaggtgactttccccattgacttttttgaacacaaccagcagctgacagatgtggagtttggtggtaacgacctcctacaggtctataatgcacaacagataaaacaccggctgaattccactggcatgtatgtggccaacaccaagcccggaggcttcaccattgagattagtaacaacaatagcactatggtgatgacaggcatgcggatccagattgggactcaagcaatagaacgggccccgtcatatatcgagatcttcggcagaactatgcagctcaacctgagtcgctcacgctggtttgacttccccttcaccagagaagaagccctgcaggctgataagaagctgaacctcttcattggggcctcggtggatccagcaggtgtcaccatgatagatgctgtaaaaatttatggcaagactaaggagcagtttggctggcctgatgagcccccagaagaattcccttctgcctctgtcagcaacatctgcccttcaaatctgaaccagagcaacggcactggagatagcgactcagctgcccccactacgaccagtggaactgtcctggagaggctggttgtgagttctttagaagccctggaaagctgctttgccgttggcccaatcatcgagaaggagagaaacaagaatgctgctcaggagctggccactttgctgttgtccctgccagcacctgccagtgtccagcagcagtccaagagccttctggccagcctgcacaccagccgctcggcctaccacagccacaaggatcaggccttgctgagcaaagctgtgcagtgtctcaacacatctagcaaagagggcaaggatttggaccctgaggtgttccagaggctagtgatcacagctcgctccattgccatcatgcgccccaacaaccttgtccactttacggagtcaaagctgccccagatggaaacagaaggaatggatgaagggaaggaaccgcagaagcagttggaaggagattgctgtagtttcatcacccagcttgtgaaccacttctggaaactccatgcatccaaacccaagaatgccttcttggcacctgcctgccttccaggactaactcatattgaagctactgtcaatgctctggtggacatcatccatggctactgtacctgtgagctggattgtattaacacagcatccaagatctacatgcagatgctcttgtgtcctgatcctgctgtgagcttctcttgtaaacaagctctaattcgagtcctaaggcccaggaacaaacggagacatgtgactttaccctcttcccctcgaagcaacactccaatgggagacaaggatgatgatgacgatgatgatgcagatgagaaaatgcagtcatcagggatcccgaatggtggtcacatccgtcaggaaagccaggaacagagtgaggtggaccatggagattttgagatggtgtctgagtcgatggtcctggagacagctgaaaatgtcaacaatggcaacccctctcccctggaggccctgctggcaggcgcagagggcttcccccccatgctggacatcccacctgatgcagatgacgagaccatggttgaactagccattgccctgagcctgcagcaggaccaacaaggcagcagcagcagtgccctgggcctgcagagcctgggactgtccggccaggcacccagctcttcctctctggacgcaggaaccctctctgacaccacagcatcagctccagcctcagacgacgagggcagtacagcagcgacagatggttctacccttcggacctctcctgctgaccacggtggtagtgtgggctcggagagcgggggcagtgcagtggactcagtggctggcgagcacagtgtatctggccggagcagtgcttatggcgatgctacagctgaggggcatccggctggaccaggaagtgtcagctcaagcactggagccatcagcaccaccactgggcaccaggagggagatggctccgagggagaaggagaaggagaaactgaaggagatgtccacactagcaacaggctgcacatggtccgtctaatgctgttggagagattactgcagaccctgcctcaattacgaaacgttggcggtgtccgggccatcccatacatgcaggtcattctaatgctcactacagatctggatggagaagatgagaaagacaagggggccctagacaacctgctctcccagcttattgctgagttgggtatggataaaaaggatgtctccaagaagaatgagcgcagcgccctgaatgaagtccatctggtagtaatgagactcctgagtgtcttcatgtcccgcaccaaatctggatccaagtcttccatatgtgagtcatcttccctcatctccagtgccacagcagcagctctactgagctctggggctgtggactactgcctgcacgtgctcaaatcactgctggaatattggaagagccaacagaatgacgaggagcctgtggctaccagccagttgctgaaaccacatactacctcctccccacctgacatgagcccattctttctccgccagtatgtgaagggtcatgctgctgatgtgtttgaggcctatactcagcttctaacagaaatggtactgaggcttccttaccaaatcaaaaagattactgacaccaattctcgaatcccacctcctgtctttgaccactcgtggttttactttctctccgagtacctcatgatccagcagactccatttgtgcgccgtcaagtccgcaaacttctgctcttcatctgtggatccaaagagaagtaccgccagctccgggatttgcacaccctggactctcacgtgcgtgggatcaagaagctgctagaagagcaggggatattcctccgggcaagtgtggttacagccagctcaggctccgccttgcaatatgacacactcatcagcctgatggagcacctgaaagcctgtgcagagattgccgcccagcgaaccatcaactggcagaaattctgcatcaaagatgactccgtcctgtacttcctcctccaagtcagtttccttgtggatgagggcgtgtccccagtgctgctgcaactgctctcctgtgctctgtgcggcagcaaggtgctcgctgcactggcagcctcttcgggatcctccagtgcttcttcctcctcagcccctgtggctgccagttctggacaagccacaacacagtccaagtcttccactaaaaagagcaagaaagaagaaaaagaaaaggagaaagatggtgagacctctggcagccaggaggaccagctgtgcacagctctggtgaaccagctgaacaaatttgccgataaggaaaccctgatccagttcctgcgttgtttcctgttagagtccaattcttcctcggtgcgctggcaggcccactgtctgacactgcacatctacagaaattccagcaaatctcaacaggagctcctgctagatctgatgtggtccatctggccagaactcccagcctatggtcgtaaggctgcccagtttgtggacctactaggatatttctccctgaaaactccacaaacagagaagaagttgaaggagtattcacagaaggctgtggagattctgcggactcaaaaccatattcttaccaaccaccccaactcgaacatttataacactttgtctggcttagtggagtttgatggctattacctggagagcgatccctgcctggtgtgtaataacccggaagtaccgttctgttatatcaagctgtcttccattaaagtggacacgcggtacaccaccacccagcaggttgtgaagctcattggcagtcacaccatcagcaaagtgacagtgaaaatcggggatctgaaacggaccaagatggtgcggaccatcaacctgtattataacaaccgaaccgtgcaggccatcgtggagttgaaaaacaagccagctcgctggcacaaagccaagaaggttcagctgacccctggacagacagaggtgaagattgacctgccgttgcccattgtggcctccaatctgatgattgagtttgcagacttctatgaaaactaccaggcctccacagagaccctgcagtgccctcgctgtagtgcctcggtccctgccaacccaggagtctgtggcaactgtggagagaatgtgtaccagtgtcacaaatgcagatccatcaactacgatgaaaaggatcccttcctctgcaatgcctgtggcttctgtaaatatgcccgcttcgacttcatgctctatgccaagccttgctgtgcagtggatcccattgagaatgaagaagaccggaagaaggctgtatccaacatcaatacacttttggacaaagctgatcgagtgtatcatcagctgatgggacaccggccacagctggagaacctgctctgcaaagtgaatgaggcagctccagaaaagccacaggatgactcaggaacagcagggggcatcagctccacttctgccagtgtgaatcgttacatcctgcagttggctcaggagtattgtggagactgcaagaactcttttgatgaactctccaaaatcatccagaaagtctttgcttcgcgcaaagagttgttggaatatgacctacagcagagggaagcagccactaaatcatcccggacctccgtgcagcccacattcactgccagccagtaccgtgccttatccgtcctgggctgtggccacacatcctccaccaagtgctatggctgcgcctcggctgtcacagaacattgtatcacactacttcgggccctggccaccaacccagccttgaggcacatccttgtctcccagggccttatccgggagctctttgattataatcttcgccgaggggctgcggccatgcgggaggaggtccgccagctcatgtgcctcctaactcgagacaacccagaagccacccaacagatgaatgacctgattattggcaaggtctccacagccctgaagggccactgggccaaccccgatctggcaagtagcctgcagtatgaaatgctgctgctgacggattctatctccaaggaggacagctgctgggagctccggttacgctgtgctctcagccttttcctcatggctgtgaacattaagactcctgtggtggttgaaaacattaccctcatgtgcctgaggatcttgcagaagctgataaaaccacctgctcccactagcaagaagaacaaggatgtccccgttgaggccctcaccacggtgaagccatactgcaatgagatccatgcccaggctcaactgtggctcaagagagaccccaaggcatcctatgatgcctggaagaagtgtcttcctatcagagggatagatggcaatgggaaagcccccagcaaatcagagctccgccatctctatttgactgagaagtatgtgtggaggtggaaacagttcctgagtcgtcgggggaagaggacctcccccttggatctcaaactggggcataacaactggctgcgacaagtgcttttcactccagcaacgcaggccgcacggcaggcagcctgtaccattgtggaagctctagccaccattcccagccgcaagcagcaggtcctggacctgcttaccagttacctggatgagctgagcatagctggggagtgtgcagctgagtacctggctctctaccagaagctcatcacttctgcgcactggaaagtctacttggcagctcggggagtcctaccctatgtgggcaacctcatcaccaaggaaatagctcgtctgctggccctggaggaggctaccctgagtaccgatctgcagcagggttatgcccttaaaagtctcacaggccttctctcctcctttgttgaggtggaatccatcaaaagacattttaaaagtcgcttggtgggtactgtgctgaatggatacctgtgcttgcggaagctggtggtgcagaggaccaagctgatcgatgagacgcaggacatgctgctggagatgctggaggacatgaccacaggtacagaatcagaaaccaaggccttcatggctgtgtgcattgagacagccaagcgctacaatctggatgactaccggaccccggtgttcatcttcgagaggctctgcagcatcatttatcctgaggagaatgaagtcactgagttctttgtgaccctggagaaggatccccaacaagaagacttcttacagggcaggatgcctgggaacccgtatagcagcaatgagccaggcatcgggccgctgatgagggatataaagaacaagatttgccaggactgtgacttagtggccctcctggaagatgacagtggcatggagcttctagtgaacaataaaatcattagtttggaccttcctgtggctgaagtttacaagaaagtctggtgtaccacgaatgagggagagcccatgaggattgtttatcgtatgcgggggctgctgggcgatgccacagaggagttcattgagtccctggactctactacagatgaagaagaagatgaagaagaagtgtataaaatggctggtgtgatggcccagtgtgggggcctggaatgcatgcttaacagactcgcagggatcagagatttcaagcagggacgccaccttctaacagtgctactgaaattgttcagttactgcgtgaaggtgaaagtcaaccggcagcaactggtcaaactggaaatgaacaccttgaacgtcatgctggggaccctaaacctggcccttgtagctgaacaagaaagcaaggacagtgggggtgcagctgtggctgagcaggtgcttagcatcatggagatcattctagatgagtccaatgctgagcccctgagtgaggacaagggcaacctcctcctgacaggtgacaaggatcaactggtgatgctcttggaccagatcaacagcacctttgttcgctccaaccccagtgtgctccagggcctgcttcgcatcatcccgtacctttcctttggagaggtggagaaaatgcagatcttggtggagcgattcaaaccatactgcaactttgataaatatgatgaagatcacagtggtgatgataaagtcttcctggactgcttctgtaaaatagctgctggcatcaagaacaacagcaatgggcaccagctgaaggatctgattctccagaaggggatcacccagaatgcacttgactacatgaaaaagcacatccctagcgccaagaatttggatgccgacatctggaaaaagtttttgtctcgcccagccttgccatttatcctaaggctgcttcggggcctggccatccagcaccctggcacccaggttctgattggaactgattccatcccgaacctgcataagctggagcaggtgtccagtgatgagggcattgggaccttggcagagaacctgctggaagccctgcgggaacaccctgacgtaaacaagaagattgacgcagcccgcagggagacccgggcagagaagaagcgcatggccatggcaatgaggcagaaggccctgggcaccctgggcatgacgacaaatgaaaagggccaggtcgtgaccaagacagcactcctgaagcagatggaagagctgatcgaggagcctggcctcacgtgctgcatctgcagggagggatacaagttccagcccacaaaggtcctgggcatttataccttcacgaagcgggtagccttggaggagatggagaataagccccggaaacagcagggctacagcaccgtgtcccacttcaacattgtgcactacgactgccatctggctgccgtcaggttggctcgaggccgggaagagtgggagagtgccgccctgcagaatgccaacaccaagtgcaacgggctccttccggtctggggacctcatgtccctgaatcagcttttgccacttgcttggcaagacacaacacttacctccaggaatgtacaggccagcgggagcccacgtatcagctcaacatccatgacatcaaactgctcttcctgcgcttcgccatggagcagtcgttcagcgcagacactggcgggggcggccgggagagcaacatccacctgatcccgtacatcattcacactgtgctttacgtcctgaacacaacccgagcaacttcccgagaagagaagaacctccaaggctttctggaacagcccaaggagaagtgggtggagagtgcctttgaagtggacgggccctactatttcacagtcttggcccttcacatcctgccccctgagcagtggagagccacacgtgtggaaatcttgcggaggctgttggtgacctcgcaggctcgggcagtggctccaggtggagccaccaggctgacagataaggcagtgaaggactattccgcttaccgttcttcccttctcttttgggccctcgtcgatctcatttacaacatgtttaagaaggtgcctaccagtaacacagagggaggctggtcctgctctctcgctgagtacatccgccacaacgacatgcccatctacgaagctgccgacaaagccctgaaaaccttccaggaggagttcatgccagtggagaccttctcagagttcctcgatgtggccggtcttttatcagaaatcaccgatccagagagcttcctgaaggacctgttgaactcagtcccctgaccaccacacagcagctgcggcggcgaagacgaagctggcttgccttccaccctctgttctccctccttgtgcattaagttccctccgcgggatgctgcattgttaccccgccctcccctctctcatttttcttggtgtggcttggggtttttaggcttcctgttttatctcgtgtgtgtggtgcaccagctatgaggttgtctgtaacccaagccatcaaagggcctgtacatacctaggagccatgagttgtcccggccagcttcatacttgagtgtgcacatcttgagaaataaacaagtgacttaacacacattgaaaaggaa

SEQ ID NO: 13159 - DNA, 6044 bp, Homo sapiens
gcgcgggagacagttcgctccgactgcccgagcgagggcgcttcgctcccagccaggacatggccgcacctctccgcatcaggagcgccggctcacggacttctcgcccaactccctgagcgctccctcgtttcgatctttagaaaaccccgctttctttctggggccgtgacgaggggcagggagcggcgagcaaggatgcgttgaggaccgcgagggcgcgcgtctcgggtgccgccgtgggtcccgacgcggaagccgagccgcctccgcctgcctcgacttccccacagcgcttccgccgccgcctgccgtgcttgatgtgcagaaagaagccggacaccatgatcctaacacaaattgaagccaaggaagcttgtgattggctacgggcaactggtttcccccagtatgcacagctttatgaagatttcctgttccccatcgatatttccttggtcaagagagagcatgattttttggacagagatgccattgaggctctatgcaggcgtctaaatactttaaacaaatgtgcggtgatgaagctagaaattagtcctcatcggaaacgaagtgacgattcagacgaggatgagccttgtgccatcagtggcaaatggactttccaaagggacagcaagaggtggtcccggcttgaagagtttgatgtcttttctccaaaacaagacctggtccctgggtccccagacgactcccacccgaaggacggccccagccccggaggcacgctgatggacctcagcgagcgccaggaggtgtcttccgtccgcagcctcagcagcactggcagcctccccagccacgcgccccccagcgaggatgctgccaccccccggactaactccgtcatcagcgtttgctcctccagcaacttggcaggcaatgacgactctttcggcagcctgccctctcccaaggaactgtccagcttcagcttcagcatgaaaggccacgaaaaaactgccaagtccaagacgcgcagtctgctgaaacggatggagagcctgaagctcaagagctcccatcacagcaagcacaaagcgccctcaaagctggggttgatcatcagcgggcccatcttgcaagaggggatggatgaggagaagctgaagcagctcaactgcgtggagatctccgccctcaatggcaaccgcatcaacgtccccatggtacgaaagaggagcgtttccaactccacgcagaccagcagcagcagcagccagtcggagaccagcagcgcggtcagcacgcccagccctgttacgaggacccggagcctcagtgcgtgcaacaagcgggtgggcatgtacttagagggcttcgatcctttcaatcagtcaacatttaacaacgtggtggagcagaactttaagaaccgcgagagctacccagaggacacggtgttctacatccctgaagatcacaagcctggcactttccccaaagctctcaccaatggcagtttctccccctcggggaataacggctctgtgaactggaggacgggaagcttccacggccctggccacatcagcctcaggagggaaaacagtagcgacagccccaaggaactgaagagacgcaattcttccagctccatgagcagccgcctgagcatctacgacaacgtgccgggctccatcctctactccagttcaggggacctggcggatctggagaacgaggacatcttccccgagctggacgacatcctctaccacgtgaaggggatgcagcggatagtcaatcagtggtcggagaagttttctgatgagggagattcggactcagccctggactcggtctctccctgcccgtcctctccaaaacagatacacctggatgtggacaacgaccgaaccacacccagcgacctggacagcacaggcaactccctgaatgaaccggaagagccctccgagatcccggaaagaagggattctggggttggggcttccctaaccaggtccaacaggcaccgactgagatggcacagtttccagagctcacatcggccaagcctcaactctgtatcactacagattaactgccagtctgtggcccagatgaacctgctgcagaaatactcactcctaaagctaacggccctgctggagaaatacacaccttctaacaagcatggttttagctgggccgtgcccaagttcatgaagaggatcaaggttccagactacaaggaccggagtgtgtttggggtcccactgacggtcaacgtgcagcgcacaggacaaccgttgcctcagagcatccagcaggccatgcgatacctccggaaccattgtttggatcaggttgggctcttcagaaaatcgggggtcaagtcccggattcaggctctgcgccagatgaatgaaggtgccatagactgtgtcaactacgaaggacagtctgcttatgacgtggcagacatgctgaagcagtattttcgagatcttcctgagccactaatgacgaacaaactctcggaaacctttctacagatctaccaatatgtgcccaaggaccagcgcctgcaggccatcaaggctgccatcatgctgctgcctgacgagaaccgggaggttctgcagaccctgctttatttcctgagcgatgtcacagcagccgtaaaagaaaaccagatgaccccaaccaacctggccgtgtgcttagcgccttccctcttccatctcaacaccctgaagagagagaattcctctcccagggtaatgcaaagaaaacaaagtttgggcaaaccagatcagaaagatttgaatgaaaacctagctgccactcaagggctggcccatatgatcgccgagtgcaagaagcttttccaggttcccgaggaaatgagccgatgtcgtaattcctataccgaacaagagctgaagcccctcactctggaagcactcgggcacctgggtaatgatgactcagctgactaccaacacttcctccaggactgtgtggatggcctgtttaaagaagtcaaagagaagtttaaaggctgggtcagctactccacttcggagcaggctgagctgtcctataagaaggtgagcgaaggaccccctctgaggctttggaggtcagtcattgaagtccctgctgtgccagaggaaatcttaaagcgcctacttaaagaacagcacctctgggatgtagacctgttggattcaaaagtgatcgaaattctggacagccaaactgaaatttaccagtatgtccaaaacagtatggcacctcatcctgctcgagactacgttgttttaagaacctggaggactaatttacccaaaggagcctgtgcccttttactaacctctgtggatcacgatcgcgcacctgtggtgggtgtgagggttaatgtgctcttgtccaggtatttgattgaaccctgtgggccaggaaaatccaaactcacctacatgtgcagagttgacttaaggggccacatgccagaatggtacacaaaatcttttggacatttgtgtgcagctgaagttgtaaagatccgggattccttcagtaaccagaacactgaaaccaaagacaccaaatctaggtgatcactgaagcaacgcaaccgcttccaccaccatggtgtttgtttctagaacttttgccagtccttgaagaatgggttctgtgtctaatcctgaaacaaagaaaactacaagctggagtgtaggaattgactatagcaatttgatacatttttaaagctgcttcctgtttgttgagggtctgtattcatagaccttgactggaatatgtaagactgtgcaaaaaaaaaaaaaaaatttatgtgtattcttattcagattgcttctgagaagcaaaactctttaaatacattatggaagataatgaagatacttcattctcttgtgatatcagtgtatgcgtacctgtgtcgctttatttgcagtgtgttgagggactggtgtatccactggaatagttggtactcttggatgtgttttctcaccaagatgagcaaagaaaggtttgcacagaggagtgtgaatgtgtgtttgttgctggctgaatggcaatagatgtctaaggtggattcagtgtctggcacactgagacacctccaagaaggagattgatgcatcaggttcagtttaacctggaatatctgactacccctgaatccacccagaaagggggcccaacacccttgtccatttatgggtattttttttcgaagttattaagcatattccttttccacgaacctcttctgtactttgattgtaataggttggctcttacacccattccaaatgcagtttatttttagacccgattgcaaatagtgatgtagttttaaccagtatggattagttcagggatgaactgctccctctagccttactggctctgatccacagggttttgttttgttttgttttgttttttgtttaagtcgagatataaaaactgaacacgataacacttactcttaaatcaagcatcaacactttttccctgttagaattctttgcatttttgtgtttgtaacagaaacgccttaagacactatgtttgggaatataggaaactatgtgtgtcccaaggaaatccctgtaaatttaactcacctacaaaaggctttttccccgcctttggttgttaacggcattcctgaaagccacatgtgtttattcattgggcttgttcttatcagcaaataggttttctggttttatgactttttgtcttattttatttttcctacatttctttttttttttttttcctttagaatgccctggaaatatatttaagtggtaatgaaaaatagtaatcatagtaaaacgcaacaagaagaaaaccaacccaaaccagtgaagttttttagaacctttagaagggtggtctttattcaggttttactgtaatggtaaggattgactcaagagacagtattagtaaatttattgtgtatggatcaaaagtgaataatgtatgaatgagagctgtaagaaggatttttattttgttataatttagttaccattttcagtgttatttcaaaggttctttgaagaattttggggcagggcatcagattagagttttaaaatttgagtattttggatatcagtgttcctcatgaagatatacatggatattcaattttgatggcttccagatttgtaagattgtatgttgtatataccattctattaagaaacatgtccactgtgctttcaaacatagataaagcatgataaagattattatttaagatatacttgtatttatacctcagatattcttttgggttttgtacctcaaggcttttttcttcttattgtaaatacactttacgtgaatacagtctaagtgaagaaaataaataaaaggaagaggtttataacttgctctatatctgtacagattataatcaataagtgcactattattaaatgtttaaagtaagggaaaagtctgggctgccttccttaatattgcatctcactcccacccttaaaaccacagattgcaaagcatagcattttagcatcaactacaatcaaaagagcgatttgctgaaggaaaaatcggactgcaaatcattccaaggccaaactgcaactgagccacccactcccaaacaggaaaccctggtgaaggttcaggaagcacggagattctctccaacaaaggtccagttaggaaacgacgctgagaggatgacgacaacgtgcaacagcagaaagatgcttgcaagcagagtcagggtcaccagtgaatgccacaaaagttctctttcccactgtttaatttgacaagagaagaatttgaaggatatgaacattttcaagaactctgctgaggtcacttagagcgccatcacaacttatttgtgtgactaattgcctagattgtaagctctttgagggcagggcttgtctcttacacatctttataatcccctgcagcggctttcagtattttgtacttgtaggcacctaataaatttattatttgctatactg

SEQ ID NO: 13160 - DNA, 7445 bp, Homo sapiens
gggcctggttgtggaggccccttttgcaaaacctcagtctgaatttagtagacagaagtcactaggaatgccttgacaggatcctgccttagctaaggctccctccagctgcagagggtgtttttgttagactcacacactgcgtgaaactgctcagaatagagccatgatctcaaccacgaaatgggaacttagattttggagaaactaacggggacggacttctttcctagcctgagtgttgagcagtgtcatgccttggcgtttcagctcctcgttgtctaggtggtgaaatgacagaactcattcgcttctttgattggtgattttgaaataatctttcatcaagttccatctcctttaccctcatatggaatatatctctctgtctgttgttaaactacgatgacatgtctgtagctatcagaaagagaagctgggaagaacatgtgacccactggatgggacagccttttaattctgatgatcgtaacacagcatgtcatcatggactagtagctgacagcttgcaggcaagtatggaaaaagatgcaactctaaatgtggaccgcaaagagaagtgtgtttcactacctgactgctgtcatggatcagagctgagagattttcctgggaggccaatgggtcatctttcaaaggatgtggacgaaaatgacagccatgaaggtgaagatcagtttctttctctggaagccagcacagaaacactagtgcatgtttctgatgaggataacaatgctgatttatgccttacagatgataaacaggttttaaatacccaagggcagaaaacatcaggccaacatatgatccaaggagcaggctccttagaaaaggcactgcccatcatacaaagtaaccaagtttcttctaactcctggggaatagctggtgaaactgaattagcactggtaaaagaaagtggggagagaaaagttactgactctataagtaaaagcctggagctttgcaatgaaataagcttaagtgaaataaaagatgcacccaaagtaaatgcagtggatactttgaacgtgaaagatattgcacctgagaaacaattgcttaactctgctgtaattgctcagcaacgaaggaaacctgacccccctaaagatgaaaatgaaagaagcacctgcaatgtagtacaagatgagttcttggatactccttgcacaaacagaggactgccattattaaaaacagattttggaagctgccttctgcagcctccttcctgccccaatggaatgtcagctgaaaatggcctggagaagagtggtttttcacaacatcaaaacaaaagtccaccaaaggtcaaggcagaagatggcatgcagtgtttacaattaaaggagaccctggccacccaggaacccacagataaccaagtcagacttcgtaagagaaaggaaataagagaagatcgagatagggcgcggctggactccatggtgctgctgattatgaaactggaccagcttgatcaggacatagaaaatgccctcagcaccagctcctctccatcaggcacaccaacaaacctgcggcggcacgttcctgatctggaatcaggatctgaaagtggagcagataccatttcagtaaatcagacacgagtaaatttgtcttctgacactgagtccacggacctcccatcttccactccagtagccaattctggaaccaaacccaagactacggctattcaaggtatttcagagaaggaaaaggctgaaattgaagccaaggaagcttgtgattggctacgggcaactggtttcccccagtatgcacagctttatgaagatttcctgttccccatcgatatttccttggtcaagagagagcatgattttttggacagagatgccattgaggctctatgcaggcgtctaaatactttaaacaaatgtgcggtgatgaagctagaaattagtcctcatcggaaacgaagtgacgattcagacgaggatgagccttgtgccatcagtggcaaatggactttccaaagggacagcaagaggtggtcccggcttgaagagtttgatgtcttttctccaaaacaagacctggtccctgggtccccagacgactcccacccgaaggacggccccagccccggaggcacgctgatggacctcagcgagcgccaggaggtgtcttccgtccgcagcctcagcagcactggcagcctccccagccacgcgccccccagcgaggatgctgccaccccccggactaactccgtcatcagcgtttgctcctccagcaacttggcaggcaatgacgactctttcggcagcctgccctctcccaaggaactgtccagcttcagcttcagcatgaaaggccacgaaaaaactgccaagtccaagacgcgcagtctgctgaaacggatggagagcctgaagctcaagagctcccatcacagcaagcacaaagcgccctcaaagctggggttgatcatcagcgggcccatcttgcaagaggggatggatgaggagaagctgaagcagctcaactgcgtggagatctccgccctcaatggcaaccgcatcaacgtccccatggtacgaaagaggagcgtttccaactccacgcagaccagcagcagcagcagccagtcggagaccagcagcgcggtcagcacgcccagccctgttacgaggacccggagcctcagtgcgtgcaacaagcgggtgggcatgtacttagagggcttcgatcctttcaatcagtcaacatttaacaacgtggtggagcagaactttaagaaccgcgagagctacccagaggacacggtgttctacatccctgaagatcacaagcctggcactttccccaaagctctcaccaatggcagtttctccccctcggggaataacggctctgtgaactggaggacgggaagcttccacggccctggccacatcagcctcaggagggaaaacagtagcgacagccccaaggaactgaagagacgcaattcttccagctccatgagcagccgcctgagcatctacgacaacgtgccgggctccatcctctactccagttcaggggacctggcggatctggagaacgaggacatcttccccgagctggacgacatcctctaccacgtgaaggggatgcagcggatagtcaatcagtggtcggagaagttttctgatgagggagattcggactcagccctggactcggtctctccctgcccgtcctctccaaaacagatacacctggatgtggacaacgaccgaaccacacccagcgacctggacagcacaggcaactccctgaatgaaccggaagagccctccgagatcccggaaagaagggattctggggttggggcttccctaaccaggtccaacaggcaccgactgagatggcacagtttccagagctcacatcggccaagcctcaactctgtatcactacagattaactgccagtctgtggcccagatgaacctgctgcagaaatactcactcctaaagctaacggccctgctggagaaatacacaccttctaacaagcatggttttagctgggccgtgcccaagttcatgaagaggatcaaggttccagactacaaggaccggagtgtgtttggggtcccactgacggtcaacgtgcagcgcacaggacaaccgttgcctcagagcatccagcaggccatgcgatacctccggaaccattgtttggatcaggttgggctcttcagaaaatcgggggtcaagtcccggattcaggctctgcgccagatgaatgaaggtgccatagactgtgtcaactacgaaggacagtctgcttatgacgtggcagacatgctgaagcagtattttcgagatcttcctgagccactaatgacgaacaaactctcggaaacctttctacagatctaccaatatgtgcccaaggaccagcgcctgcaggccatcaaggctgccatcatgctgctgcctgacgagaaccgggaggttctgcagaccctgctttatttcctgagcgatgtcacagcagccgtaaaagaaaaccagatgaccccaaccaacctggccgtgtgcttagcgccttccctcttccatctcaacaccctgaagagagagaattcctctcccagggtaatgcaaagaaaacaaagtttgggcaaaccagatcagaaagatttgaatgaaaacctagctgccactcaagggctggcccatatgatcgccgagtgcaagaagcttttccaggttcccgaggaaatgagccgatgtcgtaattcctataccgaacaagagctgaagcccctcactctggaagcactcgggcacctgggtaatgatgactcagctgactaccaacacttcctccaggactgtgtggatggcctgtttaaagaagtcaaagagaagtttaaaggctgggtcagctactccacttcggagcaggctgagctgtcctataagaaggtgagcgaaggaccccctctgaggctttggaggtcagtcattgaagtccctgctgtgccagaggaaatcttaaagcgcctacttaaagaacagcacctctgggatgtagacctgttggattcaaaagtgatcgaaattctggacagccaaactgaaatttaccagtatgtccaaaacagtatggcacctcatcctgctcgagactacgttgttttaagaacctggaggactaatttacccaaaggagcctgtgcccttttactaacctctgtggatcacgatcgcgcacctgtggtgggtgtgagggttaatgtgctcttgtccaggtatttgattgaaccctgtgggccaggaaaatccaaactcacctacatgtgcagagttgacttaaggggccacatgccagaatggtacacaaaatcttttggacatttgtgtgcagctgaagttgtaaagatccgggattccttcagtaaccagaacactgaaaccaaagacaccaaatctaggtgatcactgaagcaacgcaaccgcttccaccaccatggtgtttgtttctagaacttttgccagtccttgaagaatgggttctgtgtctaatcctgaaacaaagaaaactacaagctggagtgtaggaattgactatagcaatttgatacatttttaaagctgcttcctgtttgttgagggtctgtattcatagaccttgactggaatatgtaagactgtgcaaaaaaaaaaaaaaaatttatgtgtattcttattcagattgcttctgagaagcaaaactctttaaatacattatggaagataatgaagatacttcattctcttgtgatatcagtgtatgcgtacctgtgtcgctttatttgcagtgtgttgagggactggtgtatccactggaatagttggtactcttggatgtgttttctcaccaagatgagcaaagaaaggtttgcacagaggagtgtgaatgtgtgtttgttgctggctgaatggcaatagatgtctaaggtggattcagtgtctggcacactgagacacctccaagaaggagattgatgcatcaggttcagtttaacctggaatatctgactacccctgaatccacccagaaagggggcccaacacccttgtccatttatgggtattttttttcgaagttattaagcatattccttttccacgaacctcttctgtactttgattgtaataggttggctcttacacccattccaaatgcagtttatttttagacccgattgcaaatagtgatgtagttttaaccagtatggattagttcagggatgaactgctccctctagccttactggctctgatccacagggttttgttttgttttgttttgttttttgtttaagtcgagatataaaaactgaacacgataacacttactcttaaatcaagcatcaacactttttccctgttagaattctttgcatttttgtgtttgtaacagaaacgccttaagacactatgtttgggaatataggaaactatgtgtgtcccaaggaaatccctgtaaatttaactcacctacaaaaggctttttccccgcctttggttgttaacggcattcctgaaagccacatgtgtttattcattgggcttgttcttatcagcaaataggttttctggttttatgactttttgtcttattttatttttcctacatttctttttttttttttttcctttagaatgccctggaaatatatttaagtggtaatgaaaaatagtaatcatagtaaaacgcaacaagaagaaaaccaacccaaaccagtgaagttttttagaacctttagaagggtggtctttattcaggttttactgtaatggtaaggattgactcaagagacagtattagtaaatttattgtgtatggatcaaaagtgaataatgtatgaatgagagctgtaagaaggatttttattttgttataatttagttaccattttcagtgttatttcaaaggttctttgaagaattttggggcagggcatcagattagagttttaaaatttgagtattttggatatcagtgttcctcatgaagatatacatggatattcaattttgatggcttccagatttgtaagattgtatgttgtatataccattctattaagaaacatgtccactgtgctttcaaacatagataaagcatgataaagattattatttaagatatacttgtatttatacctcagatattcttttgggttttgtacctcaaggcttttttcttcttattgtaaatacactttacgtgaatacagtctaagtgaagaaaataaataaaaggaagaggtttataacttgctctatatctgtacagattataatcaataagtgcactattattaaatgtttaaagtaagggaaaagtctgggctgccttccttaatattgcatctcactcccacccttaaaaccacagattgcaaagcatagcattttagcatcaactacaatcaaaagagcgatttgctgaaggaaaaatcggactgcaaatcattccaaggccaaactgcaactgagccacccactcccaaacaggaaaccctggtgaaggttcaggaagcacggagattctctccaacaaaggtccagttaggaaacgacgctgagaggatgacgacaacgtgcaacagcagaaagatgcttgcaagcagagtcagggtcaccagtgaatgccacaaaagttctctttcccactgtttaatttgacaagagaagaatttgaaggatatgaacattttcaagaactctgctgaggtcacttagagcgccatcacaacttatttgtgtgactaattgcctagattgtaagctctttgagggcagggcttgtctcttacacatctttataatcccctgcagcggctttcagtattttgtacttgtaggcacctaataaatttattatttgctatactg

SEQ ID NO: 13161 - DNA, 3359 bp, Homo sapiens
ggcggcggctccggggaccggggccttttgtttggagcggctgcgggggggccccggagcggcgaggccggcggccttccccagcttgctcggtcccggccacccctcgcgggggtggggggccgccccctgggccgggcatctcctcaggcgccgccgccccgccctaggccggccccgcccggcctgaggggaggaaccggccgggcctcgccgcgcggcccagccacctccggagtcgccgcctctgctctcagtgccccggatcggaggccgtccatcgcccctcgggccgacgccatgaagatcaaagatgccaagaaaccctctttcccatggtttggcatggacattgggggaactctagtaaagctctcgtactttgaacctattgatatcacagcagaggaagagcaagaagaagttgagagtttaaaaagtattcggaaatatttgacttctaacgtggcatatggatccaccggcattcgggatgtacaccttgaactgaaagatttaacactttttggccgaagagggaacttgcactttatcaggtttccaacccaggacctgcctacttttatccaaatgggaagagataaaaacttctcaacattgcagacggtgctatgtgctacaggaggtggtgcttacaagtttgaaaaagattttcgcacaattggaaacctccacctgcacaaactggatgaacttgactgccttgtaaagggcttgctgtatatagactctgtcagtttcaatggacaagccgagtgctattattttgctaatgcctcagaacctgagcgatgccaaaagatgccttttaacctggatgatccctatccactgcttgtagtgaacattggctcaggagtcagtattttagcagtccattccaaagacaactataaacgagtgactgggacaagccttggagggggtacctttctgggtttatgcagtttattgactggctgtgaaagttttgaagaggctcttgaaatggcatccaaaggtgatagcacacaagctgacaagctggtccgtgatatttatggaggagattatgaaagatttggtttgccaggttgggctgtagcatctagttttgggaatatgatttataaggagaagcgagaatctgttagtaaagaagatctggcaagagctactttagttactatcaccaataacattggttctgtggcacgaatgtgtgctgttaatgagaaaataaacagagttgtctttgttggaaactttttacgtgtcaataccctctcaatgaaacttttggcatatgcactggattactggtcaaaaggtcaactaaaagcattgtttctagaacatgagggttactttggagcagttggtgcacttcttgggctgccaaatttcagctaaagcatcaggtctctctctctgctaataaatgtcatccaagaggaactaaaaccagaggcattattactgcattgtttgtcactgggaaccaaaggataaaagagtagcataagctgctgaatgttgccatattaaaggagagaacttggtaacgtgaagtatttctcattgaaatgctttcccttttgtatatagccagtgttaaatccttaaatgcaatacagcctctgattattgagcttcctcttaaaaagatttttttattttatgtagccaacattgcagtactgtatgctcaaacacaaatcttaaagtatcggaactgtttagcttatgaaaataatcgactctgaatatttgttacaagtctgttttatgtgttttgattactagtgagcagaaaataacataccctgtattcaaaattactgaaatggcaatcaaagatgatcatttttatgtgattttagaaatgttaaggcaatactactaattattgtaggtttttttaacgtatcacccaaagcatgtatgtgatctttccccattagtatctttttctcaaatgccataattaactgaaatactattattaaattttcatgagaattctaaaatgaatcctgggaaatgcacgtttggtgatgttgcactttctgtattttacaggaattagtcaatacatgttgaaatgtttaacattttaagattggaggcttaattactgggagtctgtctaatgaagtcctgggactattgtaatggaatatgatttgagttcactgtgctctttttgtttgtttgttttggtcatatatacattcagaacttttattttaaaacaaccacaataacattaataatagaaaattcatctgtaaatattcacagtctagtcactgaaaaatgggaaaacctctaccatgccttattattaccctttgctgtttgaggagccagaaatagaggtgcagttagaggacggtcactttttccaacaaaacccactccatagccatgtggatttttatccaaaggctcaacaaccagagggaatggtgagacctgataactaaaatactgttattggcaagggtttgaaatgtgtaagaacctaggagggaaaggaagattgagcaacataggaaaaggggaagagaggctgagtgtcaccaaggtccaaactccatttataaaaatactgcaaaaccaggagttgatggtagaaatgcatatgatccatggcaggagtaaatctctccacctcctctaactctctgaaaactctagagttggagcaagtcttccatttgcttcttatccccttaaaagaatgccttccacttcccaacagcccccatcaagggaccccaagaggccaccatgctcttatctcgcactttctttcctattccccttgcctgaatctggagtggggttgagccctctgccttcaaccttaagatttaggaagttctttccccaactgtctaacttggaaaggtagatgagtctgaattttgaagtaacgaatgcaaattccactcagcagaggcaatgttatttatgtacatagggatagtggaatgagttttaatagattctgtccaaaaggggtttgttcctcttatttcctctatgtaggaagttgtgtcttaggcaactttatcagtatcaatggaaaaatgataggcactacaatgaaatggcaggatgccaatatgagatatttcaggaataataagaaatacagtttgtttgtataaaataaactatctcaagaaagttttcaacgacagtgatagtgttcatttgtaagagagagttctagaacttcgatgtccagtgcagtagccactacccatatgtagctgttgagcatttgaaatatggttagtccaaattgagatgtgctctaaaggacaataaaaggttaaatatctcct

SEQ ID NO: 13162 - DNA, 6471 bp, Homo sapiens
ccgagccgggagccgagcgcgctgggcgcggccgtcccgctgccgccgccaagcccggagtgcgccagcggccatggttcccgcggcggcgccgggcgcctgagccccgggacgcaagcgctggaggcgggctgccggctgtgcgggcgctccggagagaccgacagaaggtgagcactgtgggctatgggatggatgaggtggagcaggaccagcatgaggcccgactcaaggagctgtttgacagttttgacacgacgggcacagggtccctggggcaggaggaactcaccgacctttgccacatgttgagcttggaggaggtggccccagtgctgcagcagacattacttcaggacaacctcttgggcagggtacattttgaccaatttaaagaagcattaatactcatcttgtccagaactctgtcaaatgaagaacactttcaagaaccagactgctcactagaagctcagcccaaatatgttagaggtgggaagcgttacggacgaaggtccttgcccgagttccaagagtccgtggaggagtttcctgaagtgacggtgattgagccactggatgaagaagcgcggccttcacacatcccagccggtgactgcagtgagcactggaagacgcaacgcagtgaggagtatgaagcggaaggccagttaaggttttggaacccagatgacttgaatgcttcacagagtggatcttcccctccccaagactggatagaagagaaactgcaagaagtttgtgaagatttggggatcacccgtgatggtcacctgaaccggaagaagctggtctccatctgtgagcagtatggtttacagaatgtggatggagagatgctcgaggaagtattccataatcttgatcctgacggtacaatgagtgtagaagattttttctatggtttgtttaaaaatggaaaatctcttacaccatcagcatctactccatatagacaactaaaaaggcacctttccatgcagtctttcgatgagagtggacgacgtaccacaacctcatcagcaatgacaagtaccattggctttcgggtcttctcctgcctggatgatgggatgggccatgcatctgtggagagaatactggacacctggcaggaagagggcattgagaacagccaggagatcctgaaggccttggatttcagcctcgatggaaacatcaatttgacagaattaacactggcccttgaaaatgaacttttggttaccaagaacagcattcaccaggcggctctggccagctttaaggctgaaatccggcatttgttggaacgagttgatcaggtggtcagagaaaaagagaagctacggtcagatctggacaaggccgagaagctcaagtctttaatggcctcggaggtggatgatcaccatgcggccatagagcggcggaatgagtacaacctcaggaaactggatgaagagtacaaggagcgaatagcagccttaaaaaatgaactccgaaaagagagagagcagatcctgcagcaggcaggcaagcagcgtttagaacttgaacaggaaattgaaaaggcaaaaacagaagagaactatatccgggaccgccttgccctctctttaaaggaaaacagtcgtctggaaaatgagcttctagaaaatgcagagaatgtgttagcagaaaagtttggtgacctcgatcctagcagtgctgagttcttcctgcaagaagagagactgacacagatgagaaatgaatatgagcggcagtgcagggtactacaagaccaagtagatgaactccagtctgagctggaagaatatcgtgcacaaggcagagtgctcaggcttccgttgaagaactcaccgtcagaagaagttgaggctaacagcggtggcattgagcccgaacacgggctcggttctgaagaatgcaatccattgaatatgagcattgaggcagagctggtcattgaacagatgaaagaacaacatcacagggacatatgttgcctcagactggagctcgaagataaagtgcgccattatgaaaagcagctggacgaaaccgtggtcagctgcaagaaggcacaggagaacatgaagcaaaggcatgagaacgaaacgcacaccttagaaaaacaaataagtgaccttaaaaatgaaattgctgaacttcaggggcaagcagcagtgctcaaggaggcacatcatgaggccacttgcaggcatgaggaggagaaaaaacaactgcaagtgaagcttgaggaggaaaagactcacctgcaggagaagctgaggctgcaacatgagatggagctcaaggctagactgacacaggctcaagcaagctttgagcgggagagggaaggccttcagagtagcgcctggacagaagagaaggtgagaggcttgactcaggaactagagcagtttcaccaggagcagctgacaagcctggtggagaaacacactcttgagaaagaggagttaagaaaagagctcttggaaaagcaccaaagggagcttcaggagggaagggaaaaaatggaaacagagtgtaatagaagaacctctcaaatagaagcccagtttcagtctgattgtcagaaagtcactgagaggtgtgaaagcgctctgcaaagcctggaggggcgctaccgccaagagctgaaggacctccaggaacagcagcgtgaggagaaatcccagtgggaatttgagaaggacgagctcacccaggagtgtgcggaagcccaggagctgctgaaagagactcttaagagagagaaaacaacttctctggtcctgacccaggagagagagatgctggagaaaacatacaaagaacatttgaacagcatggtcgtcgagagacagcagctactccaagacctggaagacctaagaaatgtatctgaaacccagcaaagcctgctgtctgaccagatacttgagctgaagagcagtcacaaaagggaactgagggagcgtgaggaggtcctgtgccaggcaggggcttcggagcagctggccagccagcggctggaaagactagaaatggaacatgaccaggaaaggcaggaaatgatgtccaagcttctagccatggagaacattcacaaagcgacctgtgagacagcagatcgagaaagagccgagatgagcacagaaatctccagacttcagagtaaaataaaggaaatgcagcaggcaacatctcctctctcaatgcttcagagtggttgccaggtgataggagaggaggaggtggaaggagatggagccctgtccctgcttcagcaaggggagcagctgttggaagaaaatggggacgtcctcttaagcctgcagagagctcatgaacaggcagtgaaggaaaatgtgaaaatggctactgaaatttctagattgcaacagaggctacaaaagttagagccagggttagtaatgtcttcttgtttggatgagccagctactgagttttttggaaatactgcggaacaaacagagccgtttttacagcaaaaccgaacgaagcaagtagaaggtgtgaccaggcggcatgtcctaagtgacctggaagatgatgaggtccgggacctgggaagtacagggacgagctctgttcagagacaggaagtcaaaatagaggagtctgaagcttcagtagagggtttttctgagcttgaaaacagtgaagagaccaggactgaatcctgggagctgaagaatcagattagtcagcttcaggaacagctaatgatgttatgtgcggactgtgatcgagcttctgaaaagaaacaggacctactttttgatgtttctgtgctaaaaaagaaactgaagatgcttgagagaatccctgaggcttctcccaaatataagctgttgtatgaagatgtgagccgagaaaatgactgccttcaggaagagctgagaatgatggagacacgctacgatgaggcactagaaaataacaaagaactcactgcagaggttttcaggttgcaggatgagctgaagaaaatggaggaagtcactgaaacattcctcagcctggaaaagagttacgatgaggtcaaaatagaaaatgaggagctgaatgttctggttttgagacttcaaggcaagattgagaagcttcaggaaagcgtggtccagcggtgtgactgctgcttatgggaagccagtttagagaacctggaaatcgaacctgatggaaatatactccagctcaatcagacactggaagagtgtgtgcccagggttaggagtgtacatcatgtcatagaggaatgtaagcaagaaaaccagtaccttgaggggaacacacagctcttggaaaaagtaaaagcacatgaaattgcctggttacatggaacaattcagacacatcaagaaaggccaagagtacagaatcaagttatactggaggaaaacactactctcctaggctttcaagacaaacattttcagcatcaggccaccatagcagagttagaactggagaaaacaaagttacaggagctgactaggaagttgaaggagagagtcactattttagttaagcaaaaagatgtactttctcacggagaaaaggaggaagagctgaaggcaatgatgcatgacttgcagatcacgtgcagtgagatgcagcaaaaagttgaacttctgagatatgaatctgaaaagcttcaacaggaaaattctattttgagaaatgaaattactactttaaatgaagaagatagcatttctaacctgaaattagggacattaaatggatctcaggaagaaatgtggcaaaaaacggaaactgtaaaacaagaaaatgctgcagttcagaagatggttgaaaatttaaagaaacagatttcagaattaaaaatcaaaaaccaacaattggatttggaaaatacagaacttagccaaaagaactctcaaaaccaggaaaaactgcaagaacttaatcaacgtctaacagaaatgctatgccagaaggaaaaagagccaggaaacagtgcattggaggaacgggaacaagagaagtttaatctgaaagaagaactggaacgttgtaaagtgcagtcctccactttagtgtcttctctggaggcggagctctctgaagttaaaatacagacccatattgtgcaacaggaaaaccaccttctcaaagatgaactggagaaaatgaaacagctgcacagatgtcccgatctctctgacttccagcaaaaaatctctagtgttctaagctacaacgaaaaactgctgaaagaaaaggaagctctgagtgaggaattaaatagctgtgtcgataagttggcaaaatcaagtcttttagagcatagaattgcgacgatgaagcaggaacagaaatcctgggaacatcagagtgcgagcttaaagtcacagctggtggcttctcaggaaaaggttcagaatttagaagacaccgtgcagaatgtaaacctgcaaatgtcccggatgaaatctgacctacgagtgactcagcaggaaaaggaggctttaaaacaagaagtgatgtctttacataagcaacttcagaatgctggtggcaagagctgggccccagagatagctactcatccatcagggctccataaccagcagaaaaggctgtcctgggacaagttggatcatctgatgaatgaggaacagcagctgctttggcaagagaatgagaggctccagaccatggtacagaacaccaaagccgaactcacgcactcccgggagaaggtccgtcagttggaatccaatcttcttcccaagcaccaaaaacatctaaacccatcaggtaccatgaatcccacagagcaagaaaaattgagcttaaagagagagtgtgatcagtttcagaaagaacaatctcctgctaacaggaaggtcagtcagatgaattcccttgaacaagaattagaaacaattcatttggaaaatgaaggcctgaaaaagaaacaagtaaaactggatgagcagctcatggagatgcagcacctgaggtccactgcgacgcctagcccgtcccctcatgcttgggatttgcagctgctccagcagcaagcctgtccgatggtgcccagggagcagtttctgcagcttcaacgccagctgctgcaggcagaaaggataaaccagcacctgcaggaggaacttgaaaacaggacctccgaaaccaacacaccacagggaaaccaggaacaactggtaactgtcatggaggaacgaatgatagaagttgaacagaaactgaaactagtgaaaaggcttcttcaagagaaagtgaatcagctcaaagaacaagtgagcctacccggtcatctctgttcacccacctcacattccagctttaactccagttttacatccctttattgccattaactcgttaacttatgttgtctaataaaggcaaattctattataaaaaaaaaaaaaaaaa

SEQ ID NO: 13163 - DNA, 6757 bp, Homo sapiens
ccgagccgggagccgagcgcgctgggcgcggccgtcccgctgccgccgccaagcccggagtgcgccagcggccatggttcccgcggcggcgccgggcgcctgagccccgggacgcaagcgctggaggcgggctgccggctgtgcgggcgctccggagagaccgacagaaggtgagcactgtgggctatgggatggatgaggtggagcaggaccagcatgaggcccgactcaaggagctgtttgacagttttgacacgacgggcacagggtccctggggcaggaggaactcaccgacctttgccacatgttgagcttggaggaggtggccccagtgctgcagcagacattacttcaggacaacctcttgggcagggtacattttgaccaatttaaagaagcattaatactcatcttgtccagaactctgtcaaatgaagaacactttcaagaaccagactgctcactagaagctcagcccaaatatgttagaggtgggaagcgttacggacgaaggtccttgcccgagttccaagagtccgtggaggagtttcctgaagtgacggtgattgagccactggatgaagaagcgcggccttcacacatcccagccggtgactgcagtgagcactggaagacgcaacgcagtgaggagtatgaagcggaaggccagttaaggttttggaacccagatgacttgaatgcttcacagagtggatcttcccctccccaagactggatagaagagaaactgcaagaagtttgtgaagatttggggatcacccgtgatggtcacctgaaccggaagaagctggtctccatctgtgagcagtatggtttacagaatgtggatggagagatgctcgaggaagtattccataatcttgatcctgacggtacaatgagtgtagaagattttttctatggtttgtttaaaaatggaaaatctcttacaccatcagcatctactccatatagacaactaaaaaggcacctttccatgcagtctttcgatgagagtggacgacgtaccacaacctcatcagcaatgacaagtaccattggctttcgggtcttctcctgcctggatgatgggatgggccatgcatctgtggagagaatactggacacctggcaggaagagggcattgagaacagccaggagatcctgaaggccttggatttcagcctcgatggaaacatcaatttgacagaattaacactggcccttgaaaatgaacttttggttaccaagaacagcattcaccaggcggctctggccagctttaaggctgaaatccggcatttgttggaacgagttgatcaggtggtcagagaaaaagagaagctacggtcagatctggacaaggccgagaagctcaagtctttaatggcctcggaggtggatgatcaccatgcggccatagagcggcggaatgagtacaacctcaggaaactggatgaagagtacaaggagcgaatagcagccttaaaaaatgaactccgaaaagagagagagcagatcctgcagcaggcaggcaagcagcgtttagaacttgaacaggaaattgaaaaggcaaaaacagaagagaactatatccgggaccgccttgccctctctttaaaggaaaacagtcgtctggaaaatgagcttctagaaaatgcagagaatgtgttagcagaaaagtttggtgacctcgatcctagcagtgctgagttcttcctgcaagaagagagactgacacagatgagaaatgaatatgagcggcagtgcagggtactacaagaccaagtagatgaactccagtctgagctggaagaatatcgtgcacaaggcagagtgctcaggcttccgttgaagaactcaccgtcagaagaagttgaggctaacagcggtggcattgagcccgaacacgggctcggttctgaagaatgcaatccattgaatatgagcattgaggcagagctggtcattgaacagatgaaagaacaacatcacagggacatatgttgcctcagactggagctcgaagataaagtgcgccattatgaaaagcagctggacgaaaccgtggtcagctgcaagaaggcacaggagaacatgaagcaaaggcatgagaacgaaacgcacaccttagaaaaacaaataagtgaccttaaaaatgaaattgctgaacttcaggggcaagcagcagtgctcaaggaggcacatcatgaggccacttgcaggcatgaggaggagaaaaaacaactgcaagtgaagcttgaggaggaaaagactcacctgcaggagaagctgaggctgcaacatgagatggagctcaaggctagactgacacaggctcaagcaagctttgagcgggagagggaaggccttcagagtagcgcctggacagaagagaaggtgagaggcttgactcaggaactagagcagtttcaccaggagcagctgacaagcctggtggagaaacacactcttgagaaagaggagttaagaaaagagctcttggaaaagcaccaaagggagcttcaggagggaagggaaaaaatggaaacagagtgtaatagaagaacctctcaaatagaagcccagtttcagtctgattgtcagaaagtcactgagaggtgtgaaagcgctctgcaaagcctggaggggcgctaccgccaagagctgaaggacctccaggaacagcagcgtgaggagaaatcccagtgggaatttgagaaggacgagctcacccaggagtgtgcggaagcccaggagctgctgaaagagactcttaagagagagaaaacaacttctctggtcctgacccaggagagagagatgctggagaaaacatacaaagaacatttgaacagcatggtcgtcgagagacagcagctactccaagacctggaagacctaagaaatgtatctgaaacccagcaaagcctgctgtctgaccagatacttgagctgaagagcagtcacaaaagggaactgagggagcgtgaggaggtcctgtgccaggcaggggcttcggagcagctggccagccagcggctggaaagactagaaatggaacatgaccaggaaaggcaggaaatgatgtccaagcttctagccatggagaacattcacaaagcgacctgtgagacagcagatcgagaaagagccgagatgagcacagaaatctccagacttcagagtaaaataaaggaaatgcagcaggcaacatctcctctctcaatgcttcagagtggttgccaggtgataggagaggaggaggtggaaggagatggagccctgtccctgcttcagcaaggggagcagctgttggaagaaaatggggacgtcctcttaagcctgcagagagctcatgaacaggcagtgaaggaaaatgtgaaaatggctactgaaatttctagattgcaacagaggctacaaaagttagagccagggttagtaatgtcttcttgtttggatgagccagctactgagttttttggaaatactgcggaacaaacagagccgtttttacagcaaaaccgaacgaagcaagtagaaggtgtgaccaggcggcatgtcctaagtgacctggaagatgatgaggtccgggacctgggaagtacagggacgagctctgttcagagacaggaagtcaaaatagaggagtctgaagcttcagtagagggtttttctgagcttgaaaacagtgaagagaccaggactgaatcctgggagctgaagaatcagattagtcagcttcaggaacagctaatgatgttatgtgcggactgtgatcgagcttctgaaaagaaacaggacctactttttgatgtttctgtgctaaaaaagaaactgaagatgcttgagagaatccctgaggcttctcccaaatataagctgttgtatgaagatgtgagccgagaaaatgactgccttcaggaagagctgagaatgatggagacacgctacgatgaggcactagaaaataacaaagaactcactgcagaggttttcaggttgcaggatgagctgaagaaaatggaggaagtcactgaaacattcctcagcctggaaaagagttacgatgaggtcaaaatagaaaatgaggagctgaatgttctggttttgagacttcaaggcaagattgagaagcttcaggaaagcgtggtccagcggtgtgactgctgcttatgggaagccagtttagagaacctggaaatcgaacctgatggaaatatactccagctcaatcagacactggaagagtgtgtgcccagggttaggagtgtacatcatgtcatagaggaatgtaagcaagaaaaccagtaccttgaggggaacacacagctcttggaaaaagtaaaagcacatgaaattgcctggttacatggaacaattcagacacatcaagaaaggccaagagtacagaatcaagttatactggaggaaaacactactctcctaggctttcaagacaaacattttcagcatcaggccaccatagcagagttagaactggagaaaacaaagttacaggagctgactaggaagttgaaggagagagtcactattttagttaagcaaaaagatgtactttctcacggagaaaaggaggaagagctgaaggcaatgatgcatgacttgcagatcacgtgcagtgagatgcagcaaaaagttgaacttctgagatatgaatctgaaaagcttcaacaggaaaattctattttgagaaatgaaattactactttaaatgaagaagatagcatttctaacctgaaattagggacattaaatggatctcaggaagaaatgtggcaaaaaacggaaactgtaaaacaagaaaatgctgcagttcagaagatggttgaaaatttaaagaaacagatttcagaattaaaaatcaaaaaccaacaattggatttggaaaatacagaacttagccaaaagaactctcaaaaccaggaaaaactgcaagaacttaatcaacgtctaacagaaatgctatgccagaaggaaaaagagccaggaaacagtgcattggaggaacgggaacaagagaagtttaatctgaaagaagaactggaacgttgtaaagtgcagtcctccactttagtgtcttctctggaggcggagctctctgaagttaaaatacagacccatattgtgcaacaggaaaaccaccttctcaaagatgaactggagaaaatgaaacagctgcacagatgtcccgatctctctgacttccagcaaaaaatctctagtgttctaagctacaacgaaaaactgctgaaagaaaaggaagctctgagtgaggaattaaatagctgtgtcgataagttggcaaaatcaagtcttttagagcatagaattgcgacgatgaagcaggaacagaaatcctgggaacatcagagtgcgagcttaaagtcacagctggtggcttctcaggaaaaggttcagaatttagaagacaccgtgcagaatgtaaacctgcaaatgtcccggatgaaatctgacctacgagtgactcagcaggaaaaggaggctttaaaacaagaagtgatgtctttacataagcaacttcagaatgctggtggcaagagctgggccccagagatagctactcatccatcagggctccataaccagcagaaaaggctgtcctgggacaagttggatcatctgatgaatgaggaacagcagctgctttggcaagagaatgagaggctccagaccatggtacagaacaccaaagccgaactcacgcactcccgggagaaggtccgtcagttggaatccaatcttcttcccaagcaccaaaaacatctaaacccatcaggtaccatgaatcccacagagcaagaaaaattgagcttaaagagagagtgtgatcagtttcagaaagaacaatctcctgctaacaggaaggtcagtcagatgaattcccttgaacaagaattagaaacaattcatttggaaaatgaaggcctgaaaaagaaacaagtaaaactggatgagcagctcatggagatgcagcacctgaggtccactgcgacgcctagcccgtcccctcatgcttgggatttgcagctgctccagcagcaagcctgtccgatggtgcccagggagcagtttctgcagcttcaacgccagctgctgcaggcagaaaggataaaccagcacctgcaggaggaacttgaaaacaggacctccgaaaccaacacaccacaggccttgctaccggagcagcgagcagtgcacgcagattcctacagaaggattgggcacctgtgaaaactgggctgctattgatggcatttcttaccatggcagacagatgcacacacccacccatgcacacacaccacacacagagacataagctaagatatgttggaattaagtgctcttttaaattattttattatttttactgttaaacctttgcagtattatgtctcttatttatttatgtagaaatgacagatcttgtgaatcaaattcacaaacatcagcttgttacaaatcattttatttataccctttaaagagtgtggatttaagattcttgaaaggatgtagtctatatattttctcattccatatgttgtaactatttttaaccaaaggtactacttttatatatggaatttgaagaaaaccaggggtatttatactgttttgtataagatgtacaaatctttttgacaggaaatttttgatgaaacaataaaataaattttaagtataaaaaaaaaaaaaaaaaaaaa

SEQ ID NO: 13164 - DNA, 5518 bp, Homo sapiens
gtcgccatcttgccccttcagaggcaccgcaaacaaacccaattcctggtgtcccctagtcttggcggaggagccttttagatgagccccgaaaggccgggcagggaggacaagctctttggggctaccaaacagaagcagcaatgcctgttgtgtggccaacccttctggatctcagcagggatgaatgcaaaagaattcttcgaaaattggaattggaggcatatgctggagttatcagtgcacttcgggcacagggggatctcaccaaggaaaagaaagatcttcttggagaactatcaaaagttcttagcatctcaacagaacgccaccgtgctgaagttcggagagcagtaaacgatgaacggttaacaacaattgcacataatatgtctggacctaatagctcttcagaatggtccattgaaggtcgtcgattggtaccactgatgccccggctcgttccccaaaccgcctttactgtaacagctaatgctgttgctaatgcagctatccagcataatgcatctcttccagtgcctgcagaaacaggaagcaaggaagtggtttgctattcctacacaagtaccacgtcaaccccaacctctacccctgttccaagtggcagcatagcaacggttaagtctccaagacctgccagtcctgcctccaatgtagttgtcttgccaagtggaagtactgtttatgtcaaaagtgtaagctgttcagatgaagatgaaaaacccagaaaacgaaggcgaacaaactcttccagctcctctcctgttgttctaaaggaagttccaaaggccgttgttccagtctcaaagacgatcactgtgcctgtgagtggtagtcccaagatgagcaacatcatgcagagcattgccaactccttaccaccccacatgtctcctgtaaaaataaccttcactaaaccatcaacacagacaacaaacacaacaacacagaaggttattatagtcaccacatcaccaagctcaaccttcgtgcccaacattctctccaaatcccataactatgcagcagtcactaagcttgtaccaacgtcagtcattgcttctacaacccagaagccaccagttgttataactgcttcacagtcctctctggtcagtaatagcagcagtggcagcagcagttctacaccatcacctattcctaatacagttgcagtaacagctgtggtgtcctctacaccatctgtggtcatgtcaacagtagcacaaggtgtatctacatcagcaatcaaaatggcatcaaccagacttccttcccccaaaagcttagtgagtgccccaactcagattcttgcacagttccctaaacaacatcaacagtctcctaagcagcagttatatcaagtgcaacagcagacacagcaacaagtggcccagccttctccagtatctcatcagcaacagcctcagcagtctcctttgccacctggtattaaacctaccatccaaatcaaacaggagtcaggtgttaaaatcatcacacaacaggttcaaccaagtaaaatcttacccaaaccagtgacagcaactctacccaccagtagcaattcccctattatggtggttagcagtaatggtgcaattatgacaactaaactggtaaccactcctactggcacacaagcaacctatacccggccaacagtgagcccatccattggtcggatggctgcaacccctggagctgcaacctatgtgaaaactacgagtggtagcatcattacagtagtacccaaatcattagctaccttggggggcaagataattagcagtaatatagtttctggaacgactaccaaaatcactacaatcccaatgacttccaagcccaacgtgattgttgtacaaaagactacaggaaaaggaacgaccattcaaggcctcccgggcaaaaatgttgtcacaacgttgctaaatgctggaggagaaaagactattcagacagtgccaacaggagcaaagccagctatccttactgctacaagacccatcaccaaaatgattgtaacgcagccaaaaggaataggttctacagttcaaccagcagctaaaatcatcccaacaaaaattgtttatgggcagcaagggaaaacgcaggttcttattaaacccaaaccagtgacttttcaagcgacagttgttagtgaacaaacaagacagctagtaacagaaacattacagcaagcatccagggtagcagaggctggtaattcatctattcaggaaggaaaagaagaaccacagaattatacagatagtagttcctcttctacagagtcctcccagagttcccaagattcccagcctgtagttcatgtaattgcttcccggcgtcaggattggtcagaacatgagattgcaatggagactagccctaccataatttatcaggatgtatccagtgaatcacaatcagctacttcaacaatcaaagctctgttagaactccaacagacaacagtaaaggaaaaattggaatctaaaccaagacaacccactattgacctgagtcaaatggcagtgcctattcagatgacccaggaaaagagacattctcctgagagtccatcaattgctgtggtagagtcagaactagtagctgaatacatcactactgaacgcactgatgaggggacagaggttgcttttccccttctagtcagccatcgctcccagccccaacagccttcccagccccagcggaccctgctccagcatgtggctcagtcacagaccgcaacacagacttcggtggtggtgaagtccatcccagcatcttcccctggagcaatcacccacattatgcagcaggcattaagcagtcacactgcttttaccaaacacagcgaggaacttggaactgaggagggcgaggttgaagagatggacactttagaccctcagacaggtctgttttaccgatctgccctgactcagtcacagtcagctaaacagcagaaacttagccagcccccgctggaacagactcagctgcaagtgaaaactctgcagtgcttccagactaaacagaagcagaccatccacctgcaggcagaccagctccagcacaaactcccgcaaatgccccagctttccatcaggcatcaaaaactcacccctctccagcaagaacaagcacagcccaagccagatgtacagcacacacagcatcccatggtggccaaagacaggcagcttcctaccttaatggcacagcccccgcaaactgtagtacaggtgcttgcagtgaaaaccacgcagcagctccctaaactgcagcaggctccgaaccaaccaaaaatctacgtgcaaccccaaaccccccagagccaaatgtcgctcccagcttcttcagagaaacagacggcaagccaggtggagcagccaattataacccaaggatcctctgttacaaagataacttttgaggggcgccagcctcccacagttacaaagataactggtggcagttctgtgcctaagctgacatcaccagttacaagcatatctcccattcaggcctctgagaagacagcagtgtctgacattttgaaaatgtctttgatggaagctcagattgatacaaatgtagaacatatgatagtggatcccccaaagaaggctcttgccactagcatgctcactggtgaagcaggatcattaccctccacccacatggtggtggcagggatggcgaattccactccccagcaacagaaatgtagagagtcctgttcgagtccatccactgttggctcttccctaacgacaaggaaaattgatccaccagcagtgcctgcgacaggccagttcatgcgtattcagaatgtaggccaaaagaaagctgaagagagtccagcagaaattatcatccaggctattcctcagtatgctattccttgtcactccagctccaatgtggtggtggagcccagtgggcttcttgagctaaacaacttcactagtcaacagctggatgatgaggagacagcaatggagcaggacatagacagtagcacggaggatggaactgaacccagcccttctcagagctctgctgaacggtcctagtgtttggacacaatagtgcactttaaaacctgcttggttaccaagtgtccagggaaacccttgtattttgatgactaaaaagagcactttgcccgtacttaggctgtggaccctaaaacagcagtgtttcaacaagatgttgctgcaggagcagctttttaaaacaagataaaactcacaggggaatgtacttttttaaaaaaaaatgaaaaagaaaaaaaaagctgcacatttacagtgacttaagacctggtcttctttctctgttggatcatggccggtgaaacagttttgtcttgcagtggaaagagacttcctgtgaatgtttctcaactggtttctactgagcaaaataccatctaaaaggagaatgtgaatagttgtattttgaaatgatgtgtcaggaaaagttttttaaaaacttgtatgtttttgcaaatccctggaagtgttgaattggttaaaattttacattttctcagttcataattagtttataaacacctagaataatactggcattaaagaatccttgttggatggtagaaatcagatccctaaccagtgggaggtactttttgggtggcttgtgcattcttatcagttgtgtgctaatttattgtattgttcctttgtgctctaagcagcacacttgccttctatttatttaagtgtaaacatttcaaagcaggccgtactccttctgacaaatttcttgtaaaccaggattgcctacgctttccactgtcgtcgtctccccactttccctcttcctttaagaaaacttactaaaaaatgtttcattgcgaagcagaggaaaagaaacgttttcagacctaaaggaaatgtttggtcatgttaagaaaacaaattattcattcatatgatgctttcttaacgttgaaattgcacattcacattggactgagactttgaaaataacttttacatacttttgtttaagcccctttgaaatgtataaaaagttcatttacagttctaaatgtaatgtttttaagccttctatctttttaggacacagtttgtttaagcaatatgttttggtcttgtgatcactgtctgtcacaagtagagtgaaaggggtaagggggtgggagggtaagagttttgacaagttgtggcaaaggaaactatacttttcatttttaaaaatgtaaatagaaaagtttttaacggttttatatagatttcactataaataagcattttaagactgacaaatgttgaactgtacatacatttatcagcataactgcccagtttttttggtgctgaagtactgtaagtagaattcatcaacggtctcctaatttttgcatctacatctggggggaaaaagctgtgatactatagttaataaattcccactagagtgacaaaaaaaa

SEQ ID NO: 13165 - DNA, 2545 bp, Homo sapiens
ctttttgatcgtttcccatgtgttgtcagatagctccatagaattcagtttctgagaaccagccagaagcatgcagtgacattgcacaatctgcctctgaagctggagatactagctgcagagctcaggggagctgctccacatcaccgacatgaagggaacaggcatcatggactgtgcgcccaaggcactcctggccagggcactttatgacaactgccctgactgctctgacgagctggctttcagcagaggggacatcctgaccattctggagcaacacgtgccagaaagcgagggttggtggaagtgtttgctccatgggaggcaaggcctggcccctgccaaccgcctccaaatcctcacggaggtcgctgcagacaggccgtgccccccattcctgagaggcctggaagaagctcctgccagctcagaggagacctatcaggtgcccactctaccccgccctcccactccaggccccgtttatgagcagatgaggagttgggcggaggggccccagccccctactgcccaagtctatgaattccccgaccctcccaccagtgccagaatcatctgtgaaaagactctcagctttccaaaacaggccatcctcacgcttcccagacctgtccgggcctcactgccgactctgccttcccaggtgtatgacgtgcctacccagcaccggggccccgtggtcctgaaggagccagagaagcagcagttatatgacataccagccagccccaagaaggcaggactccatcccccagacagccaagcaagtgggcagggtgttcccctgatatcagtgactaccttaagaagaggcggttacagcacattaccaaatcctcagaaatcggaatggatttatgacactccagtgtctccaggaaaggccagcgtcagaaacacgcctctcaccagctttgcggaagaatcaaggccccacgctctccccagttccagctccactttctacaatcctccaagtggcagatccaggtccctcactccacaactgaataacaatgtgcccatgcagaaaaaactcagccttccagaaattccttcttatggctttcttgtacccagaggcacatttcctttggatgaagatgtcagctacaaggttccttcaagctttctgattccccgagtggaacagcagaacaccaagcccaatatttatgacatccctaaagcaacgtcgagtgtttctcaggctgggaaggagctggagaaagccaaggaggtgtcagagaattccgcgggccataattcctcatggttctccagacggacaacttccccatctcctgaaccggacagattatcaggttccagttctgacagcagagctagcatcgtttcctcgtgctccaccacatccaccgacgactcctccagctcttcctcggaggagtcagcaaaggagctctccttggacctggatgtggccaaggagacagtgatggctctgcagcacaaggtggtcagctctgtcgctggcctgatgctctttgtcagcaggaagtggagattccgagactatctggaggccaacattgatgcaatccacaggtccactgatcacatagaagaatctgtaagagaatttctggattttgcccgaggagtccatgggactgcctgtaacctcactgacagtaaccttcagaacagaattcgggaccagatgcagaccatctccaactcctaccgcatcctgcttgaaacaaaggaaagcttggataatcgcaattggcctctggaagttcttgtgactgacagtgtccagaacagcccagatgaccttgagaggtttgtcatggtggcacggatgcttccagaagacatcaagaggtttgcctccattgtcattgccaatggaaggctcctttttaagcggaactgtgaaaaggaagagactgtgcagttgaccccaaatgcagaatttaagtgtgaaaaatacatccagcctccccaaagagaaactgaatcacaccaaaagagtaccccttccactaagcaaagggaagatgaacactcttctgaactattaaagaaaaatagggcaaatatctgtggacagaatcctggccctcttatacctcagccttcgagtcaacagactcctgagaggaaaccccgcttatctgaacactgccggctgtactttggggcgctcttcaaagccatcagcgcatttcacggcagcctcagcagcagccagcccgcggagatcatcactcagagcaagctggtcatcatggtgggacagaagctggtggacacgctgtgcatggagacccaggagagggacgtgcgcaatgagatcctccgcggcagcagtcacctctgcagcctgctcaaggacgtagcgctggccactaagaatgccgtgctcacataccccagccctgccgcgctggggcacctccaggcggaggctgagaagctggagcaacacacgcggcagttcagagggacactgggatgaggactgtctacctcccttcctcctctgctcacc

SEQ ID NO: 13166 - DNA, 4416 bp, Homo sapiens
atgaagactccctgtattcccagtcctaagcaagggagcaaaggcaggggacagagccctgctgctcaggtgaggggccccacgtggaacgcgccggcgcgggaggggcggcctggcgcaggtcatttgggacatctgcgggttggcgcatgcgcgcgaggtgcgcaggctcgcgcctttttcccttttctaagctttctgtgttacccccggttccgctgtcttttctgtctacagtttgcgatccccgcgtccaggatggagcagctgaacgaactggagctgctgatggagaagagtttttgggaggaggcggagctgccggcggagctatttcagaagaaagtggtagcttcctttccaagaacagttctgagcacaggaatggataaccggtacctggtgttggcagtcaatactgtacagaacaaagagggaaactgtgaaaagcgcctggtcatcactgcttcacagtcactagaaaataaagaactatgcatccttaggaatgactggtgttctgttccagtagagccaggagatatcattcatttggagggagactgcacatctgacacttggataatagataaagattttggatatttgattctgtatccagacatgctgatttctggcaccagcatagccagtagtattcgatgtatgagaagagctgtcctgagtgaaacttttaggagctctgatccagccacacgccaaatgctaattggtacggttctccatgaggtgtttcaaaaagccataaataatagctttgccccagaaaagctacaagaacttgcttttcaaacaattcaagaaataagacatttgaaggaaatgtaccgcttaaatctaagtcaagatgaaataaaacaagaagtagaggactatcttccttcgttttgtaaatgggcaggagatttcatgcataaaaacacttcgactgacttccctcagatgcagctctctctgccaagtgataatagtaaggataattcaacatgtaacattgaagtcgtgaaaccaatggatattgaagaaagcatttggtcccctaggtttggattgaaaggcaaaatagatgttacagttggtgtgaaaatacatcgagggtataaaacaaaatacaagataatgccgctggaacttaaaactggcaaagaatcaaattctattgaacaccgtagtcaggttgttctgtacactctactaagccaagagagaagagctgatccagaggctggcttgcttctctacctcaagactggtcagatgtaccctgtgcctgccaaccatctagataaaagagaattattaaagctaagaaaccagatggcattctcattgtttcaccgtattagcaaatctgctactagacagaagacacagcttgcttctttgccacaaataattgaggaagagaaaacttgtaaatattgttcacaaattggcaattgtgctctttatagcagagcagttgaacaacagatggattgtagttcagtcccaattgtgatgctgcccaaaatagaagaagaaacccagcatctgaagcaaacacacttagaatatttcagcctttggtgtctaatgttaaccctggagtcacaatcgaaggataataaaaagaatcaccaaaatatctggctaatgcctgcttcggaaatggagaagagtggcagttgcattggaaacctgattagaatggaacatgtaaagatagtttgtgatgggcaatatttacataatttccaatgtaaacatggtgccatacctgtcacaaatctaatggcaggtgacagagttattgtaagtggagaagaaaggtcactgtttgctttgtctagaggatatgtgaaggagattaacatgacaacagtaacttgtttattagacagaaacttgtcggtccttccagaatcaactttgttcagattagaccaagaagaaaaaaattgtgatatagataccccattaggaaatctttccaaattgatggaaaacacgtttgtcagcaaaaaacttcgagatttaattattgactttcgtgaacctcagtttatatcctaccttagttctgttcttccacatgatgcaaaggatacagttgcctgcattctaaagggtttgaataagcctcagaggcaagcgatgaaaaaggtacttctttcaaaagactacacactcatcgtgggtatgcctgggacaggaaaaacaactacgatatgtactctcgtaagaattctctacgcctgtggttttagcgttttgttgaccagctatacacactctgctgttgacaatattcttttgaagttagccaagtttaaaataggatttttgcgtttgggtcagattcagaaggttcatccagctatccagcaatttacagagcaagaaatttgcagatcaaagtccattaaatccttagctcttctagaagaactctacaatagtcaacttatagttgcaacaacatgtatgggaataaaccatccaatattttcccgtaaaatttttgatttttgtattgtggatgaagcctctcaaattagccaaccaatttgtctgggccccctttttttttcacggagatttgtgttagtgggggaccatcagcagcttcctcccctggtgctaaaccgtgaagcaagagctcttggcatgagtgaaagcttattcaagaggctggagcagaataagagtgctgttgtacagttaaccgtgcagtacagaatgaacagtaaaattatgtccttaagtaataagctgacctatgagggcaagctggagtgtggatcagacaaagtggccaatgcagtgataaacctacgtcactttaaagatgtgaagctggaactggaattttatgctgactattctgataatccttggttgatgggagtatttgaacccaacaatcctgtttgtttccttaatacagacaaggttccagcgccagaacaagttgaaaaaggtggtgtgagcaatgtaacagaagccaaactcatagttttcctaacctccatttttgttaaggctggatgcagtccctctgatattggtattattgcaccgtacaggcagcaattaaagatcatcaatgatttattggcacgttctattgggatggtcgaagttaatacagtagacaaataccaaggaagggacaaaagtattgtcctagtatcttttgttagaagtaataaggatggaactgttggtgaactcttgaaagattggcgacgtcttaatgttgctataaccagagccaaacataaactgattcttctggggtgtgtgccctcactaaattgctatcctcctttggagaagctgcttaatcatttaaactcagaaaaattaatcattgatcttccatcaagagaacatgaaagtctttgccacatattgggtgactttcaaagagaataaaacactatttcccttgccttttcatactagggcagtatctcctctagctagtgcccatacagaaaattctatcaccatacaaaatttaatgcagtatttatgttttaaagcacaggtgtaccgaaaactgtgaaaagtctgaatttatgggttctatgcatgcatttttgcctaacctagagaaagagtttgataaatttttaccagctttgaagatggattaacttttgactttgagctttaaacttttaagtcagacatttcaggactaatttgattttgtagatatcattgtaagaactttatttgaaagactgaataaagggatttgatttgttttcatcatttaagcacagtcttgtgatgatgagaacataagtgtgattcttttctgtattttgaggtccctaatccaaagcccattttgctaggattttttctgctatcagatgtgttttcactctaaacctagtcttttatgacatgaattgattacttcctgttaattttctatcctcccttactatcctccttttttgttttcagtattcagtatttcagtattctagagtagattttgatataaaagaaaataattcttacatcatcttttgcaacaaattttgttttctgaattgataataaatttaaaaagttgattcctattttcacatatgttcatatgcccctatgtttgggggtatcactcagttttcccttttttgtgtaaagatgttttgtaaaacaaaattgtctcaaagtgattatattatatatataaaaagtaacagattttaacaaaggttaaaagattcttggggtaacagattcttctggggcttggaaatcttccatttctcttgagggttttttttaatgagtgttaaatatgttaaaatttttatttctacctcatgtgtttttttaaattattacttgaagttttttatttaataaattttttctactaatgga

SEQ ID NO: 13167 - DNA, 1561 bp, Homo sapiens
gcggcgcggagggcgcgggcccgggagccagggagcgagcggggcgcccggcagcgcggagtcagcgccgcgggggccgcacccgactcgcgcctggacactcgcggggcgccgacctggcagggggccaaaccagtgctcctgccacctctctggctgccccctagagcctgcccatcccagcctgaccaatgtccacagccagggagcagccaatcttcagcacacgggcgcacgtgttccaaattgacccagccaccaagcgaaactggatcccagcgggcaagcacgcactcactgtctcctatttctacgatgccacccgcaatgtgtaccgcatcatcagcatcggaggcgccaaggccatcatcaacagcactgtcactcccaacatgaccttcaccaaaacttcccagaagttcgggcagtgggccgacagtcgcgccaacacagtctacggcttgggctttgcctctgaacagcatctgacacagtttgccgagaagttccaggaagtgaaggaagcagccaggctggccagggagaaatctcaggatggcggggagctcaccagtccagccctggggctcgcctcccaccaggtgcccccgagccctctcgtcagtgccaacggccccggcgaggaaaaactgttccgcagccagagcgctgatgcccccggccccacagagcgcgagcggctaaagaagatgttgtctgagggctccgtgggcgaggtacagtgggaggccgagtttttcgcactgcaggacagcaacaacaagctggcaggcgccctgcgagaggccaacgccgccgcagcccagtggaggcagcagctggaggctcagcgtgcagaggccgagcggctgcggcagcgggtggctgagctggaggctcaggcagcttcagaggtgacccccaccggtgagaaggaggggctgggccagggccagtcgctggaacagctggaagctctggtgcaaaccaaggaccaggagattcagaccctgaagagtcagactggggggccccgcgaggccctggaggctgccgagcgtgaggagactcagcagaaggtgcaggacctggagacccgcaatgcggagttggagcaccagctgcgggcgatggagcgcagcctggaggaggcacgggcagagcgggagcgggcgcgggctgaggtgggccgggcagcgcagctgctggacgtcaggctgtttgagctgagtgagctgcgtgagggcctggcccgcctggctgaggctgcgccctgagccggggctggttttctatgaacgattccggcctgggatgcgggccaggctgcaggcggcatagttgggcccattcgtcctggaaagggactggggggtcccaacttagccctgggtgggccgggccgggctgggctggggtgggccccagtcggctctggttgttggcagctttggggctgtttttgagcttctcattgtgtagaatttctagatcccccgattacatttctaagcgtgaaaaaaaaaaaaaaaaaaaaaaaaaaaaaaaaaaaaaaaaaaaa

SEQ ID NO: 13168 - DNA, 1751 bp, Homo sapiens
cagcgcagcgcaccgcgggaagatggcgttggaggtcggcgatatggaagatgggcagctttccgactcggattccgacatgacggtcgcacccagcgacaggccgctgcaattgccaaaagtgctaggtggcgacagtgctatgagggccttccagaacacggcaactgcatgtgcaccagtatcacattatcgagctgttgaaagtgtggattcaagtgaagaaagtttttctgattcagatgatgatagctgtctttggaaacgcaaacgacagaaatgttttaaccctcctcccaaaccagagccttttcagtttggccagagcagtcagaaaccacctgttgctggaggaaagaagattaacaacatatggggtgctgtgctgcaggaacagaatcaagatgcagtggccactgaacttggtatcttgggaatggagggcactattgacagaagcagacaatccgagacctacaattatttgcttgccaagaaacttaggaaggaatctcaagagcatacaaaagatctagacaaggaactagatgaatatatgcatggtggcaaaaaaatgggatcaaaggaagaggaaaatgggcaaggtcatctcaaaaggaaacgacctgtcaaagacaggctagggaacagaccagaaatgaactataaaggtcgatacgagatcacagcggaagattctcaagagaaagtggctgatgaaatttcattcaggttacaggaaccaaagaaagacctgatagcccgagtagtgaggattattggtaacaaaaaggcaattgaacttctgatggaaaccgctgaagttgaacaaaatggtggtctctttataatgaatggtagtcgaagaagaacaccaggtggagtttttctgaatctcttgaaaaacactcctagtatcagcgaggaacaaattaaggacattttctacattgaaaaccaaaaggaatatgaaaataaaaaagctgctaggaagaggagaacacaagtgttggggaaaaagatgaaacaagctattaaaagtctaaattttcaagaagatgatgatacatcacgagaaacttttgcaagtgacacgaatgaggccttggcctctcttgatgagtcacaggaaggacatgcagaagccaagttggaggcagaggaagccattgaagttgatcattctcatgatttggacatcttttaagtacattttcaacagtttgaggactaagcctttctaaaataacattgtaataaaccatttttactgagattgcaacgttttgcactgataaacatgagaatctggaggaaagacaattgttttcttgtttaaaatatgtgtggaaaggaatgcaattgatagaacatttaaagatatatctgacaaaatacttaagagtatatagcacaggatttaatttctcaatctgttgcatgtgctaattatgagtattactagttgataatcagttttgtctaggtcataacataccatttgtaagtttgtttgctttttcaggtttatctttgcagtgaattatgctttgctttaaaacattccgctaaaatcataatgggacatataaattattaagctgttagaaatgcattcaaatttgttttttctgtgttctaagaactcaggcaattttaaggataaaaactaacattggccaggcacggtggctcacgcctgtaatcccaacactttaggagaccaaggcgggcagatcacttgaggtcag

SEQ ID NO: 13169 - DNA, 2433 bp, Homo sapiens
tgcctctgacaacccaacagtgtggagcagacccacagagagggagacccagagaggtgtgcagtggcatggaagggccagcggggtatctgcggcgggccagtgtggcccaactgacccaggagctgggcactgccttcttccagcagcagcagctgccagctgctatggcagacaccttcctggaacacctctgcctactggacattgactccgagcccgtggctgctcgcagtaccagcatcattgccaccatcgggccagcatctcgctccgtggagcgcctcaaggagatgatcaaggccgggatgaacattgcgcgactcaacttctcccacggctcccacgagtaccatgctgagtccatcgccaacgtccgggaggcggtggagagctttgcaggttccccactcagctaccggcccgtggccatcgccctggacaccaagggaccggagatccgcactgggatcctgcaggggggtccagagtcggaagtggagctggtgaagggctcccaggtgctggtgactgtggaccccgcgttccggacgcgggggaacgcgaacaccgtgtgggtggactaccccaatattgtccgggtcgtgccggtggggggccgcatctacattgacgacgggctcatctccctagtggtccagaaaatcggcccagagggactggtgacccaagtggagaacggcggcgtcctgggcagccggaagggcgtgaacttgccaggggcccaggtggacttgcccgggctgtccgagcaggacgtccgagacctgcgcttcggggtggagcatggggtggacatcgtctttgcctcctttgtgcggaaagccagcgacgtggctgccgtcagggctgctctgggtccggaaggacacggcatcaagatcatcagcaaaattgagaaccacgaaggcgtgaagaggtttgatgaaatcctggaggtgagcgacggcatcatggtggcacggggggacctaggcatcgagatcccagcagagaaggttttcctggctcagaagatgatgattgggcgctgcaacttggcgggcaagcctgttgtctgtgccacacagatgctggagagcatgattaccaagccccggccaacgagggcagagacaagcgatgtcgccaatgctgtgctggatggggctgactgcatcatgctgtcaggggagactgccaagggcaacttccctgtggaagcggtgaagatgcagcatgcgattgcccgggaggcagaggccgcagtgtaccaccggcagctgtttgaggagctacgtcgggcagcgccactaagccgtgatcccactgaggtcaccgccattggtgctgtggaggctgccttcaagtgctgtgctgctgccatcattgtgctgaccacaactggccgctcagcccagcttctgtctcggtaccgacctcgggcagcagtcattgctgtcacccgctctgcccaggctgcccgccaggtccacttatgccgaggagtcttccccttgctttaccgtgaacctccagaagccatctgggcagatgatgtagatcgccgggtgcaatttggcattgaaagtggaaagctccgtggcttcctccgtgttggagacctggtgattgtggtgacaggctggcgacctggctccggctacaccaacatcatgcgggtgctaagcatatcctgagacgcccctccctcctctggcccagcctacccttgtaccccatcccttcctccccagtctacgttctccagcccacacccctccaaagccccacctttaagtcctctcttctctattcctgaccctccctacctgaggcctatctgagactataactgtcatctagccccttcgaggttgccccttccccatctccatttcacacaggtcctgaaagtctgtgtccaattatgcactggccacccaacagcaccaattgtacattccctgcatccaatctgctcagcaggccctaagatgccttgagtctttaatcccagtttggctggttaattccataaccccaggcatcccatcccttggggtgggggagaggggagacagggcaatcttgtccacagtctcccattctcatatgtagccctcatgataatctgggcatctcgtgccagggcaggctaccccttcatggtgactaacagttacatgaaagtccacgcttttgggaaaactgggtgggatggatgctggggagaagtgagggctgggcagctgattttgtcactgtcttcacaacctccgtgctgggcttgtagaccactgtcctggctgctctcatgcctgcctgataccctgcttggtcaaatccccggctgcttccttctgcacccagaaattccttcccactcatgttgttcccacacacaaaccaagagccaaaaatgagtgtgtc

SEQ ID NO: 13170 - DNA, 2483 bp, Homo sapiens
gcagccccaggcccacactgaaagcatgtcgatccaggagaacatatcatccctgcagcttcggtcatgggtctctaagtcccaaagagacttagcaaagtccatcctgattggggctccaggagggccagcggggtatctgcggcgggccagtgtggcccaactgacccaggagctgggcactgccttcttccagcagcagcagctgccagctgctatggcagacaccttcctggaacacctctgcctactggacattgactccgagcccgtggctgctcgcagtaccagcatcattgccaccatcgggccagcatctcgctccgtggagcgcctcaaggagatgatcaaggccgggatgaacattgcgcgactcaacttctcccacggctcccacgagtaccatgctgagtccatcgccaacgtccgggaggcggtggagagctttgcaggttccccactcagctaccggcccgtggccatcgccctggacaccaagggaccggagatccgcactgggatcctgcaggggggtccagagtcggaagtggagctggtgaagggctcccaggtgctggtgactgtggaccccgcgttccggacgcgggggaacgcgaacaccgtgtgggtggactaccccaatattgtccgggtcgtgccggtggggggccgcatctacattgacgacgggctcatctccctagtggtccagaaaatcggcccagagggactggtgacccaagtggagaacggcggcgtcctgggcagccggaagggcgtgaacttgccaggggcccaggtggacttgcccgggctgtccgagcaggacgtccgagacctgcgcttcggggtggagcatggggtggacatcgtctttgcctcctttgtgcggaaagccagcgacgtggctgccgtcagggctgctctgggtccggaaggacacggcatcaagatcatcagcaaaattgagaaccacgaaggcgtgaagaggtttgatgaaatcctggaggtgagcgacggcatcatggtggcacggggggacctaggcatcgagatcccagcagagaaggttttcctggctcagaagatgatgattgggcgctgcaacttggcgggcaagcctgttgtctgtgccacacagatgctggagagcatgattaccaagccccggccaacgagggcagagacaagcgatgtcgccaatgctgtgctggatggggctgactgcatcatgctgtcaggggagactgccaagggcaacttccctgtggaagcggtgaagatgcagcatgcgattgcccgggaggcagaggccgcagtgtaccaccggcagctgtttgaggagctacgtcgggcagcgccactaagccgtgatcccactgaggtcaccgccattggtgctgtggaggctgccttcaagtgctgtgctgctgccatcattgtgctgaccacaactggccgctcagcccagcttctgtctcggtaccgacctcgggcagcagtcattgctgtcacccgctctgcccaggctgcccgccaggtccacttatgccgaggagtcttccccttgctttaccgtgaacctccagaagccatctgggcagatgatgtagatcgccgggtgcaatttggcattgaaagtggaaagctccgtggcttcctccgtgttggagacctggtgattgtggtgacaggctggcgacctggctccggctacaccaacatcatgcgggtgctaagcatatcctgagacgcccctccctcctctggcccagcctacccttgtaccccatcccttcctccccagtctacgttctccagcccacacccctccaaagccccacctttaagtcctctcttctctattcctgaccctccctacctgaggcctatctgagactataactgtcatctagccccttcgaggttgccccttccccatctccatttcacacaggtcctgaaagtctgtgtccaattatgcactggccacccaacagcaccaattgtacattccctgcatccaatctgctcagcaggccctaagatgccttgagtctttaatcccagtttggctggttaattccataaccccaggcatcccatcccttggggtgggggagaggggagacagggcaatcttgtccacagtctcccattctcatatgtagccctcatgataatctgggcatctcgtgccagggcaggctaccccttcatggtgactaacagttacatgaaagtccacgcttttgggaaaactgggtgggatggatgctggggagaagtgagggctgggcagctgattttgtcactgtcttcacaacctccgtgctgggcttgtagaccactgtcctggctgctctcatgcctgcctgataccctgcttggtcaaatccccggctgcttccttctgcacccagaaattccttcccactcatgttgttcccacacacaaaccaagagccaaaaatgagtgtgtc

SEQ ID NO: 13171 - DNA, 4629 bp, Homo sapiens
agtgttgtgaagggagcagaagaggagaaacctaatctccgaacccaacaacacctagcaacagtagaaaaaacttttaaacaaaagtctgggtgggagatatacaacaacttccaatttctgctgatcgggatttcagggagaagaagctgctttccctcctctctactctgtttcctgcatgacttcagctattggctggtcctgggaaagaaagtgggaaaagctttttcctctgtattcttttgggctggatagtttttgagaactcgaatctgtcttgggctgtgagacaagccactgggttcttcaaaggataaactacctacatagaggacatacctttggttaaaggagctgccgtcaggtgggaatgagatctcgaaaccaaggtggtgaaagtgcatctgatgggcatatctcctgtcccaagccctccatcatcggcaatgctggtgaaaaaagtctctcagaagatgcaaaaaagaagaagaaatcaaataggaaggaggatgatgtcatggcctcaggaactgtcaaacgacacctaaaaacatctggagaatgtgaacgaaaaactaagaaatccctggagttatccaaagaagacctcatccaactactcagtataatggaaggggagttgcaggccagagaagatgtgatccacatgctgaagacagagaaaaccaagcctgaggttctggaggctcattacgggtctgcggagccagagaaagtgctgcgggtcctgcaccgagatgccattcttgcccaggagaaatccataggagaagatgtctatgagaaaccgatttcagagctggacagacttgaggaaaaacagaaagaaacctaccggcgcatgctagagcagctgttgctggccgagaagtgtcataggcgcaccgtatacgagttagagaacgagaagcataaacacactgactacatgaacaagagcgacgacttcaccaacctgctggagcaggagcgggagaggttaaaaaagctccttgaacaagaaaaggcttatcaagcccgcaaagaaaaggaaaatgctaaacgactcaataaactaagagatgagcttgttaaactcaaatcctttgcactcatgctggtggatgaaagacaaatgcacattgaacaacttggcctgcaaagccagaaagtacaggatcttactcagaagctgagggaagaagaagagaagctcaaagccattacttccaaatccaaagaagacagacagaaattgctcaagttagaagtggactttgaacacaaggcttcgaggttttctcaagagcatgaagagatgaacgctaaactggctaatcaagagtctcacaataggcaacttagactcaagctggttggcttaacccaaagaatcgaggagctagaagagaccaacaaaaatctgcagaaggcagaggaagaacttcaagaattaagagataaaattgccaaaggagaatgtggaaactctagcctcatggcagaagtggaaaatcttcgaaagcgtgtgcttgaaatggaaggtaaagatgaggagatcactaaaactgaatcccagtgtagggaattgaggaagaagctgcaagaggaagaacaccatagtaaggagctcagacttgaagttgagaagctacagaagagaatgtctgaactagagaaattggaagaagcatttagcaagagtaaatctgagtgcacccagctacatttaaatctggagaaagaaaagaacttaaccaaagacctgctaaatgaattggaggtggtcaagagtcgagttaaagaattggaatgttctgaaagtagattggaaaaggctgaattaagcctaaaagatgatcttaccaagttgaagtcatttaccgtgatgctggttgatgaaaggaaaaatatgatggaaaaaataaaacaagaagagagaaaagtggatggactcaataaaaattttaaggtggaacaaggaaaagttatggatgtaactgaaaaactaattgaagaaagtaagaaacttttaaaactaaaatctgaaatggaggaaaaagtatacaacttgacaagagaaagagatgagttgataggcaaattgaaaagtgaagaagaaaaatcctctgaattaagctgcagtgttgacttactaaagaagagacttgatggtatagaggaagtggaaagagaaataacaagaggaaggtcacgaaaagggtctgagctcacctgcccggaagataataagattaaggaactaacacttgaaattgagagactgaagaaacgtctccaacaattggaagtggtcgaaggggatttgatgaagacagaagatgagtatgatcagctggaacagaaatttagaactgagcaggataaggctaacttcctctctcaacaactagaggagatcaagcaccaaattgccaagaataaagcaatagagaagggtgaggttgtgagccaggaagctgaactgagacacagatttcggttggaagaagctaaaagtcgagacttaaaagccgaagtacaagctcttaaagagaagattcacgaattaatgaacaaagaagatcagctttctcagctccaggtagattattctgtacttcaacaaagatttatggaagaagaaaataagaacaaaaacatggggcaggaggttctcaatctgaccaaagagttggagctttccaagcgctacagcagagctcttaggcccagtgtgaatggaagaagaatggtggatgttcctgtgacgtcaactggagtccaaactgatgcagtcagcggtgaagcagcagaggaagaaacgccagctgtattcatacggaaatccttccaggaagaaaatcatattatgagtaatcttcggcaggtgggattgaagaaacccgtggaaagatcttctgttctagacaggtatcctccagcagcaaatgagctcactatgagaaagtcttggattccatggatgagaaagagggaaaacggcccctccatcactcaggagaaagggccccgaacaaattccagtccagggcacccaggagaggtagtcctttcaccaaagcagggccagcccctgcatattcgagtgacaccagaccacgagaacagcactgcgactttggagataacaagcccgacatctgaagaatttttttctagtaccactgtcattcctaccttagggaatcagaaaccaagaataaccattattccatcaccaaacgttatgcctcaaaaacaaaaaagtggagatactactcttggcccagaacgagccatgtccccagtcacaattactacattttccagagagaagactccagaaagtggaagaggcgcatttgcagacaggcccacatcccctattcagataatgacggtgtctacatcagcagcaccagctgagattgcagtttctcccgaatcccaggaaatgcccatgggacggacaatcctcaaagtcaccccagaaaaacagactgttccaactccagtacggaaatacaactccaatgccaatatcataaccacagaggacaataaaattcacattcacttagggtctcagtttaaacggtcccctgggacttcaggtgaaggagtcagtccagttattactgtccgaccagtaaacgtgacagccgaaaaggaggtttccaccggcactgtccttcgctctcccaggaatcacctctcctcacggcctggtgcaagcaaagtgacgagcactatcaccataacaccggtcacaacgtcatctgctcgaggaacccagtcagtgtcaggacaagacgggtcatcccagcggcctacacccacccgcattcctatgtcaaaaggtatgaaagcaggaaagccagtagtggcagccccaggagcaggaaatctgaccaaattcgagcctcgagctgagactcagtctatgaaaatagagctgaagaaatctgcagccagcagcaccacctctctcggaggggggaagggctgagggcagtggctaagggggtatgttgtgcagatgctactgctgccgtgaaagtgaaccttcatctgtttgtgccagttctttacatgtactaatttaagttttaaatattgtgtttataaaataaccaactaataaccatttgtctttcccattttgtgcatttgttttgatgctggggaacaaaattagcaaaactattgcttgctgcctagaagccagggcgtggtttctagttccagttttgcttctagcaagtggacccatcaatagacccatctgagcctgtttcctcatcagttagatgtggggactcaatcacacgctcttcaagtccggctcccatatttcctaattgcaagccaaatttaatgtaccttgttccacaataattttttattaaaaaaatcctattacaaaataagacatactttaactattgtcatttgcctctttcacatcatgaatttgctttatgtgctggaaaaaacatcacatagctatcacagggcctggacctctaaaattttgcaaaaacaaaaggttctaagatgatttcaggaaataatgtgaacatgtaataaaatggaaatgaaatatggaatcctaaaaaaaaa

SEQ ID NO: 13172 - DNA, 7598 bp, Homo sapiens
gtaggccggcgccagctccactctgtccctcctcgccgggtctgtgcgtctttgcgtctgtctgtctgactgatggtcctcacacgcggttccctgtgactgggcgcgaccccggcaagcgcggcttggagggcggacggggcgcggcgatacagctgcccgctcgcatctttggccctgcgctcagctcctcacccggcgtgggaagttaaagtaaaaccgaaagggaagaaggcgcggtggcaggagctgacagagtgatgggaaacgcgtgagccaggccgagagtttcaggtttcttgctgtatggatcactgattgaataatagatggctttacctcgtctcacaggagccttgcgttccttttcaaatgtcaccaagcaagataattataatgaagaagtggctgacttaaagataaagcgatctaaacttcatgaacaagttttagatttgggcctgacatggaagaagataataaaatttttgaatgaaaaactggagaagagtaaaatgcaaagtataaatgaagacttaaaagatatattacatgctgcaaagcagatagttggaactgataatgggagagaagcaattgaaagtggggctgcatttctcttcatgacatttcacttgaaggactctgttggtcacaaggaaacaaaggctatcaaacagatgtttggcccctttccttcatcatctgccactgcagcttgtaatgctactaatcgaattatttctcattttagtcaagatgatcttactgctcttgtgcagatgacagaaaaagaacatggcgatagggttttttttggtaaaaatttagcattttcatttgacatgcatgatttggaccactttgacgaactgccaataaatggtgaaactcagaaaactataagcctagattataagaagtttctgaatgaacatctccaggaggcttgcaccccagaactcaagcctgtggaaaaaacaaatggctcctttttgtggtgtgaagttgaaaagtacctaaattcaactttgaaggaaatgactgaagtgccaagagtagaagatctttgctgtactttatatgatatgcttgcttctattaaaagtggtgatgaacttcaggatgagctatttgaactgctgggacctgaaggacttgaacttattgagaaactcctccagaacagaattacaattgtggatagatttcttaattcttcaaatgatcataggtttcaggctcttcaagacaattgtaaaaaaattttaggagaaaatgctaaacccaattatggttgtcaagtcactattcagtctgaacaagaaaagcagttaatgaaacaatatcgacgtgaagaaaaaagaattgccagacgagaaaaaaaggctggagaagatttagaagtttcagaaggacttatgtgctttgatcctaaggaattgcggatacaaagagaacaggcacttctgaatgctagaagtgttccaattctgagcaggcagagagatgcagacgttgaaaaaatacattatccccatgtgtatgattcccaggctgaagccatgaaaacatcagcatttattgctggtgcaaagatgattttgccagaaggaatccaaagagagaataacaagctttatgaagaagtaaggattccctacagcgaaccaatgccactcagctttgaggaaaagccagtttatatccaagacttagatgagatcggacagctggcttttaaaggaatgaagagactcaatagaatccagtcaatagtgtttgagactgcctacaacaccaatgagaacatgctgatttgtgcccctacaggagctggaaaaaccaacattgcaatgctgacagtcttgcatgaaattcgccaacattttcaacaaggtgttatcaaaaagaatgaatttaagattgtatatgttgctccaatgaaagccttggcagctgaaatgacagattacttcagcagacgtctagagccactaggcatcattgtgaaagaattgactggtgacatgcagttgtccaaaagtgaaattttacgaactcagatgcttgtgaccacaccagaaaaatgggatgtagtgacaagaaagagtgttggggatgtagctctttcccagattgtaaggctccttattcttgatgaagttcatttgctgcatgaagatagaggaccagtattagaaagcatagttgcccgtactttacggcaggtggaatccacacagagtatgataaggattctcggactgtctgcaactttacctaactacctcgatgttgccacatttttacatgttaatccatacattggacttttcttctttgatggccgttttcgaccagtacctcttggacagacatttttggggattaaatgtgcaaataagatgcagcagttgaataacatggatgaagtatgttatgaaaatgttttgaagcaagtaaaggctggacaccaggtgatggtgtttgtacatgctcgaaatgccactgtaagaacagctatgtctctaatagaaagagcaaaaaattgtggccatattcccttcttttttcctacccaaggacatgactatgtacttgcagaaaaacaggtacaaaggtcgagaaataagcaagtacgagaattattcccagatggttttagtattcatcatgcaggaatgcttcggcaggacagaaatttagttgaaaacttgttttctaatgggcatatcaaagtcctagtgtgtacagctacgttagcctggggtgtcaatcttcccgcccatgctgttattattaagggaacacaaatatatgctgcaaaaagaggctcctttgttgaccttggaattttagatgtcatgcagatatttggtcgagctggacgaccacaatttgacaaatttggggaaggaataattataacaacgcatgataaactcagccattacctcactttgctcactcaacgaaacccaattgagagtcagtttctggaaagccttgcagataacctaaatgcagagattgctctgggaacagttactaatgtggaagaagcagtgaagtggataagttacacttatctttatgtacggatgagagcaaatccattagcatatggcatcagtcacaaggcttatcagattgacccaacattaagaaagcatcgagaacagttggtcattgaagttggacgaaaactagacaaagctcagatgattcgttttgaggagcgaactggatatttttcctcaactgatttgggtagaactgccagccattactatattaaatacaacaccattgagacctttaatgaactctttgatgctcacaaaacagaaggtgatatctttgccatagtctccaaagctgaagaatttgatcaaattaaggtcagagaagaggaaatagaggagttagataccttattaagcaatttttgtgaactctccactcctggaggtgtagagaatagttatgggaaaataaacatcttacttcaaacttatatcagccgaggagaaatggacagtttctcccttatatcagattctgcatatgttgcacagaatgcagctagaattgtccgtgctctttttgaaattgctctgaggaaacgttggcctaccatgacctacaggctcctgaatcttagtaaagtcattgacaagaggctttggggttgggctagccctttgagacaattttcaatcctaccaccacacatcctaacaagattagaagaaaaaaagcttactgtggataagctgaaagacatgaggaaagatgaaataggtcacattttacatcatgtgaatattggactgaaggtcaaacaatgtgttcatcagattccttctgttatgatggaagcatccattcagcctatcacaaggactgtcctccgagtgacactcagcatctatgctgatttcacttggaatgatcaggtacatgggacagtaggagaaccttggtggatttgggtagaagatcctacaaatgatcatatttatcattcagagtattttctagctctaaaaaaacaagtcattagtaaagaagcccaactactggtatttacaatccctatttttgagcctttgccttcccaatactacatccgagcagtgtctgatagatggttgggtgctgaggcagtatgtattatcaactttcaacatctaattctaccagagagacatcctcctcatacagaattactggatcttcagcctttaccaatcacagctttgggatgtaaagcatatgaagccctgtacaacttcagccactttaaccctgtacagacacaaatatttcatacattgtatcacacggattgtaatgtcctacttggagcacctactggatcgggaaagactgttgcagctgaattagccattttcagagtcttcaacaaataccctacttcaaaggcggtatatattgcacccctaaaagccctagtacgtgaaagaatggatgattggaaagttagaatagaagaaaaacttggtaaaaaagttattgaactaacaggggatgtgactcctgatatgaaatccattgccaaggctgaccttatcgtcactacgccagagaagtgggatggagtcagcagaagctggcaaaataggaactatgttcagcaagtcactattctcatcatagatgagatccatctgcttggggaggaaagaggccctgttctagaggtcattgtatctcgaacaaattttatctcatcacacacagaaaagcctgttagaatagttggactatctactgcattagctaatgccagagaccttgctgattggctcaatattaagcagatgggcttgtttaacttccgaccatcagtacgcccagttccactggaagttcacattcaaggctttccaggtcaacattactgtcctcgtatggctagtatgaacaagcctgcatttcaggcaattagaagccattctccagccaaacctgttttgatatttgtctcatcaagacgtcaaactcgtcttactgctttggaattgatcgccttcctggctactgaagaagatccaaagcagtggttaaacatggatgaaagagagatggagaacatcattgcaacagtaagagattccaacctcaagctgacccttgctttcgggataggaatgcatcatgctggactacatgagagggaccgaaaaacagtagaggaactatttgtaaactgtaaagttcaggttcttattgctacaagcacattagcctggggtgtaaactttccagctcatttagtaattattaagggaacagaatactatgatggaaaaacaagacgttatgtggattttcccattacagatgtcctccagatgatggggcgtgctgggaggccgcagttcgatgaccaaggcaaagctgtaattctagttcatgacataaagaaagacttttataaaaaatttctttatgaacctttcccagtagaatcaagtttattaggagtgctctctgaccacttaaatgcagagattgctggtggtacaattacatctaagcaagatgcattggattatatcacctggacttactttttccgacgtcttatcatgaatcccagctattacaatttgggtgatgtgagccatgattctgtgaacaagtttctgtcccatctgattgagaagtccctgattgaattggaactttcctactgtattgaaattggagaggataatcgcagcattgaacctctaacttatggccgaattgcctcctattactatttgaagcatcaaacagttaaaatgttcaaggaccgcttgaagcctgaatgcagtactgaagaactgctttcaattctaagtgatgcagaagaatatacagatttgccagtgagacacaatgaagatcatatgaatagtgaactggcaaaatgtcttcccattgaatcaaatcctcattcatttgacagccctcacaccaaagcacatctcctgctacaggcacatctcagccgagccatgctaccctgcccagattatgacactgataccaaaacagtcttggaccaagctctcagagtatgtcaggcaatgctggacgtggctgcaaaccagggctggctggtgactgtcctgaatatcaccaacctgattcagatggtgatccagggtcggtggttaaaggactcttctcttcttacactaccaaacatagaaaaccatcatcttcaccttttcaagaaatggaagccgattatgaagggcccacatgctaggggtcggacctccatcgagtcccttcctgaactgatccatgcctgtggagggaaagaccatgtatttagctccatggtagaaagtgagctacatgctgcaaaaacgaaacaggcatggaatttcttatctcacttgccagtgataaatgttggcataagtgttaaaggctcgtgggatgacttagttgaaggacataatgaactctctgtctcaactctgactgcagacaaacgagatgacaacaaatggatcaaattgcatgctgaccaagagtatgtgcttcaagtgagcttgcagagagtccactttgggttccacaagggaaagccagagagctgtgcagttactcctcgatttcccaaatcaaaagacgaaggatggtttttgatattaggagaagtggataagagagaacttattgctttgaaaagagtaggatatattcgaaatcatcatgttgcttccctttctttttatacccctgaaatacctggaaggtatatctacacattatatttcatgagtgactgctaccttggcctggaccagcagtatgacatctatctcaacgttacacaagcgagtctttctgcacaggtcaacaccaaggtctctgattccctgactgacctggcattaaagtaacttgacctgaacaatccatttgaaaggagtggctaagaattctctctgttcagtcatctagacaaatcgaattacttgatgtttgccttgaaagaatcaacttctaacctcaaccatccaggaaattgacagtggctgcagtattgactccagtgacataaagttaaccacagtggccttttaacaaatgttgccttttataatgttatctttatgagtttcttgatatgtaagatgaaaaagcatttagaataatcttttaatttgtgtatatttgggatgatatttaggagctatcaatcaaattttacatctcacaatgtactgtttacatggatattggctgctttttttaaggaaaaccacattgagatgtgacaagtgttaggacttgtcacagatttctaactctgccgcataaactataaatctgtaaggtggtacacagcgtgtcttgttagcaaaatttatactttgatatgatcacatgtagaagtagcttcaagaatttcttgtagtcataaatgtttaataatatatgatgtaaaattatattatggagcctaatgatgataacaaagaaaacaatatactgatcttagaaaatgtagacatggttaactgggaaataaaatatagagtggcacttcaagaaaaaaa

SEQ ID NO: 13173 - DNA, 3839 bp, Homo sapiens
caggtctcgacttcactgctctgtgtcctctgctccaggaggcccagcctgtgtggccctgtgacctgcaggtattggaagagccacagctaagatgccaggaacccctggaagcctagaaatgggactgttgacatttagggatgtggccatagaattctctccggaggagtggcaatgtctggacactgcacagcagaatttatataggaatgtgatgttagagaactacagaaacctggccttcctgggtattgctctctctaagccagacctgattacttatctggagcaaggaaaagagccctggaatatgaagcaacatgagatggtggatgaacccacaggtatatgtcctcattttcctcaagacttttggccagagcagagcatggaagattcttttcaaaaagtattactgagaaaatatgaaaaatgtggacatgagaatttacagttaagaaaaggttgtaaaagtgtggatgagtgtaaggtgcacaaagaaggttataataaacttaaccagtgtctcacaactgcccagagcaaagtatttcaatgtgggaaatatttgaaagtcttctataaatttttaaattcaaacagacatacgataagacataccggaaagaaatgcttcaaatgtaaaaaatgtgtcaagtcattttgcatccgtttacacaaaacccaacataaatgcgtttatattacagagaagtcctgtaaatgtaaagaatgtgaaaaaacctttcattggtcctcaacccttactaatcataaggaaattcatactgaagataaaccctacaaatgtgaagaatgtggcaaagcttttaagcagctctcaacccttactacacataaaataatctgtgctaaagagaaaatctacaagtgtgaagaatgtggcaaagcatttctatggtcctcaaccctaactagacataagaggatacacactggagagaaaccctacaaatgtgaagaatgtggcaaagcttttagccattcttcaacccttgctaaacataagagaattcatactggagagaaaccctacaaatgtgaagaatgtggcaaagcttttagccattcttcagcccttgctaaacataagagaattcatactggagagaaaccctacaaatgtaaagaatgtggcaaagcttttagcaattcctcaacccttgctaatcataagataactcatactgaagagaaaccctacaaatgtaaagaatgtgacaaaacttttaagcgactctcaacccttactaaacataaaataatacatgctggagagaaactctacaaatgtgaagaatgtggcaaagcttttaatcgatcttcaaatcttactatacataagtttattcatactggagagaaaccttacaagtgtgaagaatgtggcaaagcatttaactggtcctcaagccttactaaacataaaagatttcatactagagagaaacccttcaaatgtaaagaatgtggcaaaggatttatatggtcttcaaccctaactagacataagaggatacacactggagagaagccctacaaatgtgaagaatgtggcaaagcttttaggcaatcctcaacccttactaaacataagataattcatactggagagaaaccctacaaatttgaagaatgtggcaaagcttttagacaatccttaacccttaataaacataagataattcatagtagagagaaaccctacaaatgtaaagaatgtggcaaagcttttaagcaattctcaacccttactacacataaaataattcatgctggaaagaaactctacaaatgtgaagaatgtggcaaagcttttaatcattcctcaagtctttctacacataagataattcatactggagagaagtcttacaagtgtgaagaatgtggcaaagcatttctatggtcctcaaccctaagaagacataagaggatacacactggagagaaaccctacaaatgtgaagaatgtggcaaagcttttagccattcttcagcccttgctaaacataagagaattcatactggagagaaaccctacaaatgtaaagaatgtggcaaagcttttagcaattcctcaacccttgctaatcataagataactcatactgaagagaaaccctacaaatgtaaagaatgtgacaaaacttttaagcgactctcaacccttactaaacataaaataatacatgctggagagaaactctacaaatgtgaagaatgtggcaaagcttttaatcgatcttcaaatcttactatacataagtttattcatactggagagaaaccttacaagtgtgaagaatgtggcaaagcatttaactggtcctcaagccttactaaacataaaagaattcatactagagagaaacccttcaaatgtaaagaatgtggcaaagcatttatatggtcttcaaccctaactagacataagaggatacacactggagagaagccctacaaatgtgaagaatgtggcaaagcttttagccgttcctcaacccttactaagcataagacaattcatactggagagaaaccctacaaatgtaaagaatgtggcaaagcttttaagcactcctcagcccttgctaaacataaaataatacatgctggagagaaactctacaaatgtgaggaatgtggcaaagcttttaatcaatcttcaaatcttacgacacataagataattcatactaaagagaaaccttccaagagtgaagaatgtgacaaagcatttatctggtcctcaacccttactgaacataagagaattcataccagagagaaaccctacaaatgtgaagaatgtggcaaagcatttagccagccttcacaccttactacacataagaggatgcacactggagagaaaccctacaaatgtgaagaatgtggcaaagcttttagccaatcctcaacccttactacacataagataattcatactggagagaaaccctacaaatgtgaagaatgtggcaaagcttttaggaaatcttcaactcttactgaacataagataattcatactggagagaaaccctacaaatgtgaagaatgtggcaaagcatttagccaatcctcaaccctaactagacatacgaggatgcacactggagagaaaccatacaaatgtgaagaatgtgggaaagcttttaatcgatcctcaaagcttactacacataagataattcatactggagagaaaccttacaagtgtgaagaatgtggcaaagcatttatatcatcctcaaccctaaatggacataagagaattcatactagagagaaaccctacaaatgtgaagaatgtggcaaagcatttagccaatcttcaaccctaactagacataagaggttgcacaccggagagaaaccctacaaatgtggagaatgtggcaaagcctttaaagagtcctcagctcttactaaacataagataattcacactggagagaaaccctacaaatgtgaaaaatgttgcaaagcctttaaccagtcttcaatccttactaaccataagaaaattcatactatcacacctgtaatcccactactttgggaggccgaggcgggcggatcacgaggtcaggagatggagaccatcctggctaacacagtgaaaccccttctctactaaaaaatacaaaaaactagccgggcgtggtggcgggcgcctgtagtcccagctatgcgagaggctgaggcaggagaatggcgtgaacccgggaggcggagcttgcagtgagccgagatcacgccactgcactcaagcctgggcgacagagcgagactccgtctcaaaaaaa

SEQ ID NO: 13174 - DNA, 4772 bp, Homo sapiens
atggtctttcagttgaagtgtggttcagggccagtgtatattagtggacagcacttagtatctgtggaggaagatgcagagtcagaagatgaagaagaggaggatgtgaaactcttaatgacgtcacgggcgcggctccgctccttggccaatcacgcggccggatcccggggaaacccggggcggtggcggcggcctgggcgcgtgcgcgaggtctccgcgtggctatataaacatggctggcgtggccgcgcggcggggccgtgccaatcgcgcgtagggggctgtgggcactcgggcccaggctcgcgcggacgagaggaaggtccgggacgcgcgtgtcctgccgtgcagcgggcgcccgtcactgacttcgctgctgcggcccccgcgcctctccccagcgatgctgtggaacccgaaccgcaccggagtcggctgccgcgcgccaagcctcccctcacctctgctcccggaaccgcagcgccaaagctgccgctgagcccctgggggatgcccgccggcctcaccgaacccgccggcgccgctcccccggctgctgtgagcgcctcggggaccgtgaccatggccccggccggggcgctgccggtgcgggtggagagcactccggtggccctgggcgccgtgactaaggctcctgtcagcgtctgcgtggagcccacggcgtcccagcccctgcggtcccccgtggggaccctggtgaccaaagtggctccggtcagcgcccctcctaaagtcagcagcggccctaggctgcctgctcctcagatagtcgccgtgaaagcccccaacaccacgacaatccagtttcctgctaatttgcagcttcctccaggaaccgttttgattaaaagtaacagtggtccgttgatgttggtatctcctcagcaaactgtaacaagagccgagaccacaagtaacataacctcaaggccagcagtaccagcgaatcctcaaacagtcaaaatctgtacagtgccgaactctagctcacaattaatcaagaaagtggcagtgacacctgttaaaaaattggcacaaataggaactactgtggtaaccactgttccgaagccttcctcagtacaatctgtggctgtgccaaccagtgtcgtcacagttactcctggaaagccattgaatactgtaactaccctgaagccttcaagtttgggagcatcatccactccttcaaatgagcccaatcttaaagcagagaactcagcagctgttcagattaatctttctccgacaatgctagaaaatgtgaagaaatgcaagaacttccttgcaatgttaataaaactagcatgtagtggatcacagtccccagaaatggggcaaaatgtgaagaagctggtggaacaacttttggatgcaaaaatcgaagcagaagaatttactaggaaactgtatgttgaactcaagtcttcacctcagcctcacctggttccttttcttaagaaaagcgtggttgccttacgacaacttctgcctaactcccagagcttcatccagcaatgtgttcagcagacttctagtgacatggtcattgctacctgtactacaacagtaacaacttctcctgtggtgacaactacagtgtcctcaagccagtctgaaaagtcaattattgtttctggagcaacagcacccagaactgtgtcagtgcaaactttgaacccacttgctggtccagtgggagcaaaagctggagttgtgacacttcattctgtgggcccaactgctgcaacaggaggaacaacagctggaactggtttgcttcagacttcaaaaccacttgtgacatctgtggcaaacacagtgaccacggtctcactgcaacctgaaaagccagttgtctctggaacagcagtaacactgtcccttccagcagtaacttttggagaaacttcaggtgcagctatttgtcttccatctgtgaaacctgttgtttcttctgctgggaccacatctgacaagcctgttattgggactccagttcaaatcaaacttgcccagccgggccctgtcctttcacaaccagctgggattccacaggcagttcaagtcaagcaactagtagttcagcagccttcaggaggcaatgaaaaacaagtgaccacaatttcacattcctcaacattgaccattcagaaatgtggacagaagacgatgccagtgaacaccataatacctactagtcagtttcctccagcttccattctaaagcaaattactctgcctggaaataaaattctgtcacttcaagcatctcctactcagaaaaatagaataaaagagaatgtaacatcatgcttccgagatgaggatgacatcaatgatgtgacttctatggcaggggtcaaccttaatgaagaaaatgcctgcatcttagcaacaaactctgaattggttggcacactcattcagtcatgtaaagatgaaccatttctttttattggagctctacaaaagagaattttagacattggtaaaaagcatgacattacagaacttaactctgatgctgtgaacttgatctcccaagcaacacaggaacgactacgaggccttctagaaaaactgactgcaattgctcagcatcgaatgactacttacaaggcaagtgaaaattacatcctgtgtagtgataccaggtcacagctcaaatttcttgaaaagctggatcaattggagaagcagagaaaggatttggaagaaagagaaatgttacttaaggcagccaagagtcgttctaataaagaagatccagaacagctgagattaaagcagaaagccaaagagttacagcaattggaacttgcacagatacagcatagagacgctaatctcacagctcttgcagctattggaccaaggaagaagagaccactagaatctggaattgagggcttaaaagacaaccttcttgcttctgggacatccagcctgacagccaccaaacagttgcatcgtccaagaatcacgagaatctgcctcagggacttgatattttgtatggaacaggaacgggagatgaagtattctcgagctctatacctggcccttctgaagtgaccactccactcttccatccagatccttgctatttactgccaaagaagacacaaagcattgttgcactgtcctgaaatttcaatttctggaaaataatcaccaacatgaaagagcattgtttacagttagaaactttattaactcttacctatccatctcatgggactcttacagactcagattcatctttgtcttctgaaaatcagttatgaaatacactttgcacagaattaggcatctgcctatctgtgcattaaattaaagcaagttaaggccctatttgttactacctgcctcatttgccaaattgtagcaggtgaggtgtccttccctaatacagcatgcattgagatgcaggagaaaggaagaggcataagaaaatacaagaatgactatttcattctatattgaacctgtcccaaagtggtaggttttctgggctggaatcagaagttgcttagctaactatgacagtcaccctctgtacgtgacaggccactgtggtgactttggtcggctgagttccagtgttgtcaaaacaagacaaatggggatagattgtgcctggggttgctaattctctgcttcatatcaccatatgccgtttctggtaccaagtgaggggacatgcttgtcagggaaaccttaaaattgaatctactgatatatcttgttgaaaaaatggaaaaggtgcaaagtattagaaggaacgttagggcgttgctttcaaactgatgaggggaatgtgaaaatggtatcataaaacaggaaatgtgcttcatatgcccaagaggggaagaggtggaatcggaactccaaaacaactggtacatgttttgttgatgggcaaaaaaaatcacagcacaaccagaaaggagaatgtaccagatgttttcaaattagagtatttcaaaaggaaaatgttattttttgttttgtattgttttaaatcccaaggatagtttttatagttccttctgtcataatatattttagttatcctaatttttaagcatgttggcacatttaaaaaatcctaattgatgatgagaaatttttaacaataggactttatgttggattctgtacttaaaaggtactgtcaatatctcactcttggggatatgagctctaaatatgagaagcaagttatatgtgttcacctgaggaagaagctgacggacaaagcaaaccctctttaaaaaaaaaaaaaagaaaattccacgtgtgtggaatacagccggtgaaaaataatcactgtagttagaatcacatacagaaaaaaaatgattgaatcctccaagaaggtatttcaaaaatgggaaatgctatacttataagaattgaaggaaaaaaaaaaaaacacctcacgtatgttattcttcatcctgttcttcccattgggactgttatggccatattctacagtatagtaaattttaaattggccacatttttttttgtttcagcaagttatgtaaaatgctataaattatgtgtatgttaaaggagtactttaagaagagatctttatccaaagttgtttttgtatatttaaatgcttacctttattttttgtaaagtgcagcatactcatttgtgtataatcttactgatcagatgtttaaaattattccaaatacttcattaaaataattattttattataa

SEQ ID NO: 13175 - DNA, 7644 bp, Homo sapiens
agagccaagcggcgggctggcggcgggctccgacgtctgcgccaggacctggctggctgagcccggcgcagcagcagcagccagggcagcgcggcccctactccctgtcaggtcgtagaggcgagcagggaccagctggtcgccggcccctcgggcaagatggggaaccgggagatggaggagctgatcccgctggtgaaccgtctgcaggacgcgttttcggcgctgggacagagctgcctgctggagctgccgcagatcgccgtggtgggcggccagagcgccggcaagagctcggtgctcgagaacttcgtgggcagggactttctccctcgagggtcgggcattgtaacaagacgacctcttgtgctgcagcttgttacttctaaagcagaatatgccgagtttctacattgcaaaggaaagaaatttacagattttgatgaagttcgccttgagattgaagcagaaacagatcgcgtgactggaatgaataaaggcatttcctccatacccattaatttacgagtctattccccacacgtgttaaatctaacccttattgatctacctggaataactaaagtgcctgtgggagatcagccaccagatatcgagtatcagatcagagaaatgattatgcagttcatcacgagggagaactgtctgattttagctgttactccagccaacactgatcttgcaaactcagatgcgctgaagctagctaaagaagttgatcctcaaggtctgagaaccattggagttatcaccaaactggaccttatggatgaaggaacggatgccagggatgttctagagaacaaactgttgcctcttcgcaggggttacgtgggggtggtaaacagaagccagaaggacatagatgggaagaaggacataaaggcagccatgctggcagagaggaagtttttcctttcccacccggcttacagacatatcgctgaccgaatgggaaccccacacctgcagaaggtccttaatcagcaacttaccaaccacattcgggataccctaccaaacttcaggaacaaactacagggacagttgctctccatagaacatgaagtagaagcctacaaaaatttcaaaccagaagacccaacaaggaagaccaaagcattgctgcagatggttcagcaatttgctgtggactttgagaagagaattgaagggtcaggggatcaagtagataccctggaactctcaggtggtgctaaaatcaatcgtatttttcatgaacgctttccttttgagatagtaaagatggagttcaatgagaaagaattgcgaagagaaataagctatgcaatcaaaaacatacatggtatcaggacagggttgtttactccagacatggcatttgaagcgatagtcaagaaacagattgtaaagttgaaagggccttccttgaagagtgtggatctggtaatacaagaattaatcaacactgtgaagaagtgtaccaaaaaactggcaaacttccccagactctgcgaggaaacggaaaggattgttgctaaccacattcgtgagcgagaagggaagacaaaggaccaggtattgctattgattgacattcaagtctcttacatcaacaccaaccatgaagacttcattggcttcgcaaatgctcagcagaggagcagtcaggttcacaagaaaaccacagttggaaatcaggtgattcgcaaggggtggctcaccatcagcaacattggcatcatgaaaggcggctcgaagggatactggttcgtccttactgcggaaagcttgtcctggtataaagatgatgaggaaaaagaaaagaagtacatgcttcccttggacaacctgaaagttcgggatgtggaaaagagctttatgtctagcaagcacatctttgcactctttaatacagagcaaaggaatgtatacaaagactatcgcttccttgagctggcatgtgattcccaggaggatgtcgacagctggaaggcatctctactaagagctggggtctatcctgacaaatctgtagggaacaacaaagctgaaaatgatgagaatggacaagcagaaaacttttccatggacccacaattggagaggcaagtggagaccattcgcaacctcgtagactcctacatgtccattatcaacaaatgtatccgagatctaattccaaaaacaataatgcaccttatgatcaataacgttaaagatttcataaattccgagctcctagcacagttgtattcttcagaggaccaaaataccctgatggaggaatctgctgagcaggctcagcgccgggatgagatgcttcgaatgtatcaagcactgaaagaagcccttgggataattggggacatcagcacagccaccgtgtccactccggcaccccctccagtggatgactcctggatacagcactctcgcaggtcacctcctccaagccccacaacccaaaggaggccaacactaagtgctcccctcgcaaggcccacatccggccgaggaccagctcctgccattccctctcctggcccccactctggggctcctccagtcccattccgtccaggcccattacctcctttccccagcagcagtgactccttcggagcccctccacaagttccatctaggcctacgagggccccgcccagtgtcccaagccggagaccacccccatcaccaactcgtcccactataatccgcccactagaatcctccctgttagactaaacgaagtgtctggcatggcaattaatcactaatgaattatgcgaaagcaacatatttgataaccgttgcagtaaatcatgagtagtcgcatgtgtggacatcagtaggcaagtaaccagttttactaatgcattcatcgctcatcttcattgctcatggtatgtcaaacctttggggtttgactcagaaactgctaaccttttagaggctttatatgttgtactgaccaaggtaggtttgtatagcagccctatactttggggatcatttgcctaccatggcatatatttgaaattgctttggacaagttttctaggctatctaccaggtagctcattaaacgtaattcttcagatatgagatagtgggcttagacctaagccatacatatttcttttcccacattctgtttaggatgacagtaattctgttgtctaccattaatgctactacctactccataattgcctatttagctcctcttttcttcctttttatttcataagactgctaggaagtgattttttaaaattaggactccttaagaataaacttttccagaagcacgaggtagtttgcaaaggaaaagtctgcactgtttgctctaaagagcttctcctcattccaatgtgttttgcttcatgctagaagcatatgcaacagtgaataaaagcttctttttttgttaatcagtcaataaatttggctaattagtttcagagttcaaggaagaagcaaaatatcacatctctagaagtgttgggaaaaatataatttctttctttacttatattcacctcatggtaggttatattgaaggctgacatggagaatgtttacttttctatttggcatagctaactacactttgatactaactccagttttactattattattttggttggaaaaaaaattcactctttacgtgctaatttgtaatcttgttttgtaagaatttatcctacccttgaaacaggctcagtgtaactgtatatccattctaggctttcttaataaatcttgaggctatgggataatcacatttaaagaatggttcctgaaatgaagtcagtagaaatggcatgggataagagcagagctcacacttttacagttgcagtatttcaaagtccctatccaggtcactccagaaaagggtattgaaacgttgaaatctaaagcaaatttgcaatttcttaagatttctaaaatttaccagaacagtttagcctgggggttaatagttaagtcttgaggctaagttttggactaccaaggaccagatgattcacatgtaggaaacagccagaagccaactggaattttgtgtgctaactgttcccagacagcagagcaagtattcactgagtaggggtgtcccatgacactatttcatattctacagaagtaaatcaggtttcaccaactgaaatgtctccctttgaaagtagcaaacatgatttgtatgttaacttaactttaatttcctgtgtagtttacacccagagcagatactcataaagtataaagtaaaaacttttaaccattattaaacagagaacttgccatgttgagtgccattgtattgaacttattctaaaggcttatgctaacccatttataattggtaaaaatcagaaaatacaagatttacataaaggtcatttcaacttttaaggttaccagtgattgtataaaaacatcacaatcctaaatcctctcgtatctcaccccaaaccccaaactgggggaaaaaaagttaactctttgtgaatggaaccaatgtgcaagatacatactgcatttttaaaatagtgtctcagctaaatggaaaactgttaagcaaacatccatagtaaaacaaataatcttcagtgagatctttttataaaacttcttgtttttaggattccctttgcttcttcctttgaattctctaaaataggcagctaacggattatatacttcagggtttggctttgtgctaaatgtggttttgtgttttgctgtatttcaaaattttccttctgttaaaggaaaatattgtgaataaccactggtgtgttcttagatcagcacaaaccatgtcaaaaaaaattggagatttttttccaattttccttccactgatcttaggcagtaataaacaatggcatttgtcatctttggcacttgcttttagattatagtcccacagttgcactgccccaattgtctacctttgtgggtacatttttgttctttactcctaagttatttctcatagaacccagcctactctagaatttcagcagtgacattggagaatatttttaatttgctgcagtactatgtcatattattagtatgaatctcatttcccaaagggtttgtattctgctaaaaggagatgccaatgttgaatgaagtctgaaactctagtatgtgcatagtttgacgtgcagcatgcacaccaggccttaagatgggaatgtagcttaatgattttctgtttcccataccatttctaatcttttgtgtaattttctcttaactgattgctctgatattgtaaacacaatagatgtagctctatcatgtctagcataatttaaaaaatcagtgtttttaggatttgggaaaataaactgtaaatgtttatttgataggtaaatatagttttattgtcacatgctaaatattgcatgcatattgactaattggaataaccatttactcaattatggacagcttattgaaatagtattgatttagaaaaagtatattgcatttctaaaaaacatctaccaaggttactcgtctgaatattgcttttagccgtgttttataacatagacgagcagtagggtctgtttattagcaaatttcctatttgttccaatacaaactcactttattctaaagtatattaatgaaaccagttcctgtgatgtaactgtaagccttctcgacttagacttaaaaagtggtcacatagattaattttgtgactttttagtatagactgtagccataattctcaaatatgaaatgggacctaataccagtatgtgataaatgttgatgttttctgtgtacaaacacattttctatgcatgtgtctctgtgtatatggcatatacctagtaagtatgtttctgtaagtatgtgtattttatgtccatttgagtaggtaggtaggttttaaaaatactagttaaaatgccacaagcatgagtgtgattgtatgtgcactgtgtgtatatatataaatatatgtatatgtatggttgtaaatatctatgtatacatgtacttagtatgtgtggtatcaggatattttttaaactgtgataatacaacagatagctttgaatgatctgccataacatgtggtaacaatagttcatttctcataacatatatgaggtatacaaaattttctaactccagattgtagtcattttgagaggtacaaagctcataattaccatgacaacatggtaatgtccatagacatttgtatctgaatccacaagaagatctgaatctaagaaggaattacctttgacaatatttttcggtaagaagtaaaacctctggagacctatctttaagatctctaattggaattataaattatttttggattgctgagctgaatcttaaaaagccaagttgatatacatagtcatttttcctctatggtagaagtaaaaaaaaaaaaaaaggacatagcaacattaaagtagtggatttttctgagtaaatttgctgaaaatataagagagaagctatctaataccttggaggtaggtcatccactttttcaggtaaacatttttcatttggcaaatggcataattatttgaaagtgacaggaatctcctcagaatgaagaataaagcctaataggtctctaactgttgaactcatgaaagaagatagtgtatgagacttaagccatgagttttgtatcatttcaattagaagactactagctgtgagctcagagtttaatgtaaatgaatctagatgattttgaagaaatgattattcgttcaccagatcactcattgtacattctaaaaagctcaaatgagtcttctagatactcttactcatcctgtctggttgctatgtttaaaattatgtggtgctgtgtaggtgaaactttaagaatatttttgaagcatatgtaatatatgcactgctatttgtgtgtgtgtgtgtgtgtctttgtatatatgtaagaatgtgtgtatgtgtgagagcaagagagaggaaactcaaagaggagtgtttgtcttaagacctgttcatactggtatattggtgagacttctcacttctggttggaggtttcacatatggctcaactcaagtcattaatctctttttaatttttactcttgaattccttaaacttcgctcattatgaaatgttttaaaattatgacaaaaattactctgtctaaccacttgccttgtctgctaccagtttgttaaaaattattccccccaaccagtaattccaccagtactacttgatttgtgttatatttcctatgtacatgtacagcctttgttttgcttgcttgtctatttttactttcccttttttgggtcaaatttttcttttgctttgtttgaagaaggaatatacagaagtaaaatcttgtcttctctgctgattctttaattaatatgagccggatactttccactgtcttcttggcactttcaggatttcttaatgctgatatatggactcttagaatggaatttttgaagaaaaatctcaaagcctgtatcgttcttgaaggtcacatgtacctattgtgaaaatgtgaagctgtatttctgaagctgaaataaattataacatttgaaggaaaaaaaaaaaaaaaa

SEQ ID NO: 13176 - DNA, 1814 bp, Homo sapiens
agtgcctggcaacctagaccagtcagggacgcggcaggaaatggaagagcctccgcaagaggctctggctgaacccttgaaacatgaaagcccagccgctccctcaagtgctggccacactaagggccaggaagaagacgaccagaagaaccaggccgaaaggaaggcagataaccacactgctcacagaatagctgaccagactgccctaagagtgcctagccaggctgaatccagcatatttagccaagctaccaacggagtagctgaacaaaatgggcatagtacacctggtcaggctggccgcagagcatccaaccctgctgatgtttctgaccttagagcagatgatcaggttaatcaaacaccgtctgaacagactaaaggcaaggcatctagccaagctaataatgtacagcatgaacagagtgatggtcaggtgtctggcctgacggaggaaagaactgctgaacagactgaacgaagattacctacccaggctgagagaagaacttctgggcagattgatggtagactggctatgccatctgaccagagaggttccagacagaccgaccacagaatggcaggccagtctgagagaagagcttccgagcagatggaccgcagaatgtctggcgaggctgagcgaagaacttctgagcagattacacacagattatccaaactatctgagagaagaccttctgtgcagattgacagtgggtcatccgtcccatctgaccaaagtccttctgtacagattgacagtggatcgtccgtaccatctgaccaaagaccttccgtacagattgaccgcagaatgtcagggaaagttaggagaagaagttctgagaagactgactacagattggctggcctggctgacccaggaacttctgagcagactgacctcagattgtatggcctcgttgaccacaaaacatctgtaaagactcaccaccaagtgtacggccaagccactgaactagctgaacaccaggctattgaccaagctcatagtaatgctgatcaacctccagttgacaatgctcactacactgaatctgaccagactgaccacttagcagacagacaagctaatcataaagaccagctgtcttactatgaaacacgtggccagtctgaagacagaatatttccccagttaggcaacagcaaagaggacaaagaggctgactacagagtacaaccctgcaaatttgaggatagccaagtagacctcaattccaagccttcagttgaaatggaaactcagaatgcaaccactatcccaccctacaacccagttgatgccagattcaccagtaacttccaagcaaaagaccaagctcttttcccaagactcccctccatcttatccaaattgaactataccagcagtcaagaaaaaactcaagccatagtaaccaaatctgatgaattttcagaaattgaccaaggaaagggttatcatatacgcaatcaaacttatagaaggttcccttctatagtttatgaagatccttaccaagtttcactccaatacatggaaaaacaccacattctgcaaatattccagcagattactgaaaacttagtctatgaaaagccagaggaccccctgaattttatgctgtgccaggtatagaattggagaaaaagaacaacctttttattctctttattgtaaaatacagcacacatacagcaaagtgtatagaacaaagtacgtacaactctgaattcttatgaagtaaacatacctgtaactaccattcaagtttttaaaaaataaataaaacataaccagc

SEQ ID NO: 13177 - DNA, 2997 bp, Homo sapiens
caagaggtgcagagcaagcgcatgcgtcgtgacggcccggcttaggcgactctgggcgggtctgggccgctccagtgttttggggcacagaagctgtgggaggagctggaggcttcaccgtggtaaccacagcgccgctgctgccccgccttgcaggcctcaggactgtcatcgcctctgggtgtgagggtactttggccaccgtccccggaaataaccgcgcctgcctctcaagataccccatcctctccacgccgctgccgctgccgccatgcaaggggaggacgccagatacctcaaaaggaaagttaaaggagggaatatagatgtacatccatcagaaaaagcactcattgttcactatgaagtggaagctaccattcttggagaaatgggggaccccatgttgggagaacgaaaagaatgtcaaaaaatcattcgacttaagagtctcaatgccaacacagatataacttccctggcaaggaaggtggttgaagaatgtaaactcattcatccttcaaaactaaatgaggtagaacagctgttgtactatctacagaaccgccgtgattcattgtcaggaaaagagaaaaaagaaaaatcaagcaagcctaaagatccacctccttttgaaggaatggagattgatgaagttgctaacattaatgacatggatgaatatattgagttattatatgaagatattcctgacaaagttcggggttctgctttgatcctgcagcttgctcgaaatcctgataacttggaagaactactattgaatgaaactgcccttggtgcattagcaagggtcctgagagaagactggaagcaaagtgtcgagttagctacaaacataatttacatctttttttgtttctccagcttttctcaatttcatggacttattactcactataaaattggagctctgtgtatgaatattattgatcatgagttaaaaagacatgagctttggcaagaagaactctcaaagaagaagaaagctgttgatgaagaccctgaaaaccaaaccttgagaaaggattatgaaaaaacctttaaaaagtaccaggggcttgtggtaaaacaggaacagctattacgagttgctctttatttgcttctgaatcttgctgaggatactcgtaccgaactgaaaatgaggaacaagaacatagttcacatgttggtgaaagcccttgatcgggacaattttgagctgctaattttagttgtgtcattcttgaagaaactcagcatttttatggagaataaaaatgatatggtggaaatggatattgttgaaaaactggtgaaaatgataccttgtgagcatgaagacctgctgaatatcaccctccgacttttactaaacctatcctttgacacaggactgaggaataagatggtacaagttggactgcttcccaagctcactgcactcctaggcaatgacaactacaaacaaatagcaatgtgtgttctttaccacataagcatggatgaccgctttaaatcaatgtttgcatacactgactgtataccacagttaatgaagatgctgtttgaatgttcagatgaacgaattgacttggaactcatttctttctgcattaatcttgctgctaacaaaagaaatgtacagcttatctgtgaaggaaatgggctgaagatgctcatgaagagggctctgaagtttaaggatccattgctgatgaaaatgattagaaacatttctcagcatgatggaccaactaaaaatctgtttattgattatgttggggaccttgcagcccagatctctaatgatgaagaagaggagtttgtgattgaatgtttgggaactcttgcaaacttgaccattccagacttagactgggaattggttcttaaagaatataagttggttccatacctcaaggataaactaaaaccaggtgctgcagaagatgatcttgttttagaagtggttataatgattggaactgtatccatggatgactcttgtgctgcattgctagccaaatctggcataatccctgcactcattgaattgctaaatgctcaacaagaagatgatgaatttgtgtgtcagataatttatgtcttctaccagatggttttccaccaagccacaagagacgtcataatcaaggaaacacaggctccagcatatctcatagacctaatgcatgataagaataatgaaatccgaaaggtctgtgataatacattagatattatagcggaatatgatgaagaatgggctaagaaaattcagagtgaaaagtttcgctggcataactctcagtggctggagatggtagagagtcgtcagatggatgagagtgagcagtacttgtatggtgatgatcgaattgagccatacattcatgaaggagatattctcgaaagacctgaccttttctacaactcagatggattaattgcctctgaaggagccataagtcccgatttcttcaatgattaccaccttcaaaatggagatgttgttgggcagcattcatttcctggcagccttggaatggatggctttggccaaccagttggcattcttggacgccctgccacagcatatggattccgccctgatgaaccttactactatggctatggatcttgataaagtatctgtttccatgtgtaatctcagcttagaagaaatctgtgtgggttgggttaattttggatctttgcctaataatgcatgttgatgttattgtgggtctgtgtttgtttttatttttatatgttgttagctgcagattaaccccagcccctctgtcttctgttaagtacagttgatactgacattgttcactcatcaaaccacatcttgatgctaagtaacatttcccatgagcctcaaaactgaatgctgaaaagctactagactggaaaacaaacactgcattatgtatgttaagtgactaatttaatttcaattaaaaagcgtaaagtgaaaatgaa

SEQ ID NO: 13178 - DNA, 8153 bp, Homo sapiens
cgccagcgagaagagagctccacgctcagcctcagaagaaagacgttcaacgacttactggggagagaaagaaaaggaacgggagctgagagctgatcacctgcctttccagaccggagacgggcggcaagtttgaagtcgacacccagaggccagtttgtcccccttcccgcgcgcgggcggcccgagcctcggcggcggcggtagcggcggcggcgacgctgacacctcccaccatggacagcttcgacttagccctgctccaggaatgggacctcgagtcactgtgtgtctatgaaccagatagaaatgcattacggaggaaagaacgagaaagaagaaatcaagaaactcaacaggatgatggcacgtttaattctagttactctctcttcagtgagccctacaagactaacaagggggatgaactctccaaccggatccagaacactttaggcaattatgatgaaatgaaagactttttaactgatagatccaatcagagtcatctcgttggagttcccaaacctggggttcctcagactcctgtgaacaagatcgatgaacattttgttgcagattcaagagcccagaaccagccctcgtctatctgtagcactacaacttccacaccagcagctgtccccgtgcagcagagtaagagaggcactatgggctggcagaaggctgggcacccaccctctgacggccaacagagagcaacacaacagggctctctcaggaccttgcttggagatggtgttggcagacagcagcctcgggccaaacaagtgtgcaatgtggaggtgggccttcagacccaggagaggccacctgccatggcggccaagcacagcagcagcggacactgtgttcagaactttcctccatccctagcttcaaaacccagcctggtccagcagaaaccgaccgcgtatgtgaggccaatggacggccaagatcaggcccctgatgagtctcctaagctgaagtcgtcttcggaaaccagcgtgcactgcacatcatacaggggagtccctgccagcaagccggagcctgccagagccaaggccaagctctccaagttcagcatccccaagcagggggaggagagtagatctggagaaaccaacagctgtgttgaagaaataatccgggagatgacctggcttccaccactttctgctattcaagcacctggcaaagtggaaccaaccaaatttccatttccaaataaggactctcagcttgtatcctctggacacaataatccaaagaaaggtgatgcagagccagagagtccagacaatggcacatcgaatacatcaatgctggaagatgaccttaagctaagcagtgatgaagaggagaatgaacagcaggcagctcagagaacggctctccgcgctctctctgacagcgccgtggtccagcagcccaactgcagaacctcggtgccttccagcaagggcagcagcagcagcagcagcagcggcagcagcagctcctccagcgactcagagagcagctccggatctgactcggagaccgagagcagctccagcgagagtgagggcagcaagcccccccacttctccagccccgaggctgaaccggcatcctctaacaagtggcagctggataaatggctaaacaaagttaatccccacaagcctcctattctgatccaaaatgaaagccacgggtcagagagcaatcagtactacaacccggtgaaagaggacgtccaggactgtgggaaagtccccgacgtttgccagcccagcctgagagagaaggagatcaagagcacttgcaaggaggagcaaaggccaaggacagccaacaaggcccctgggagtaaaggcgtgaagcagaagtccccgcccgcggccgtggccgtggcggtgagcgcagccgccccgccacccgcagtgccctgtgcgcccgcggagaacgcgcccgcgcctgcccggaggtccgcgggcaagaagcccaccaggcgcaccgagaggacctcagccggggacggcgccaactgccaccggcccgaggagcccgcggccgcggacgcgctggggacgagcgtggtggtccccccggagcccaccaaaaccaggccctgtggcaacaacagagcgagccaccgcaaggagctgcgctcctccgtgacctgcgagaagcgccgcacgcgggggctaagcaggatcgtccccaaatccaaggagttcattgagacagagtcgtcatcttcatcctcctcctcggactccgacctggagtccgagcaggaggagtaccctctgtccaaagcacagaccgtggctgcctctgcctcctccgggaatgatcagaggctgaaggaggccgctgccaacgggggcagtggtcctagggcccctgtaggctccatcaacgccaggaccaccagtgacatcgccaaggagctggaggagcagttctacacactggtcccctttggccggaacgaacttctctcccctctaaaggacagtgatgagatcaggtctctctgggtcaaaatcgacctgaccctcctgtccaggatcccagaacacctgccccaggagccaggggtattgagcgcccctgccaccaaggactctgagagcgcaccgcccagccacacctcggacacacctgcagaaaaggctttgccaaaatccaagaggaaacgcaagtgtgacaacgaagacgactacagggagatcaagaagtcccagggagagaaagacagctcttcaagactggccacctccaccagtaatactttgtctgcaaaccactgcaacatgaacatcaacagtgtggcaataccaataaataaaaatgaaaaaatgcttcggtcgcccatctcacccctctctgatgcatctaaacacaaatacaccagcgaggacttaacttcttccagccgacctaatggcaacagtttgtttacttcagcctcttccagcaaaaagcctaaggccgacagccagctgcagcctcacggcggagacctcacgaaagcagctcacaacaattctgaaaacattcccctccacaagtcacggccgcagacgaagccgtggtctccaggctccaacggccacagggactgcaagaggcagaaacttgtcttcgatgatatgcctcgcagtgccgattattttatgcaagaagctaaacgaatgaagcataaagcagatgcaatggtggaaaagtttggaaaggctttgaactatgctgaagcagcattgtcgtttatcgagtgtggaaatgcaatggaacaaggccccatggaatccaaatctccttatacgatgtattcagaaacagtagagctcatcaggtatgctatgagactaaaaacccactcaggccccaatgccacaccagaagacaaacaactggctgcattatgttaccgatgcctggccctcctgtactggcggatgtttcgactcaaaagggaccacgctgtaaagtattcaaaagcactaatcgactatttcaagaactcatctaaagccgcccaagccccatctccgtggggggccagtggaaagagcactggaaccccatcccccatgtctcccaacccctctcccgccagctccgtggggtctcagggcagcctctccaacgccagcgccctgtccccgtcgaccatcgtcagcatcccacagcgcatccaccagatggcggccaaccacgtcagcatcaccaacagcatcctgcacagctacgactactgggagatggccgacaacctggccaaggaaaaccgagaattcttcaacgacctggatctgctcatggggccggtcaccctgcacagcagcatggagcacctggtccagtactcccaacagggcctgcactggctgcggaacagcgcccacctgtcatagggacctcaccctggggccagagtgggctctggtctccacagatggctcaacgtttttggacactgtgctactgaaactcccagccacagcatttatcagactgcggtgaacatttcctcagcattgaacaatgatcttttgcagggcatgtgtgtttgtatgtgtgggtatataagaagccgcctgtgtatgtgtgtaagatacacagctcttcagaacacaccttctttgtctagtttccataatcccaggctagacaaagtgatcagaggtttctgactagaggaagtacacacacacacacacacacacacacacaccgtacactcacacacaatcacagacacacactttctattccattccagtgctaaaccgtgacttcttagaaaattcaaccaaaatctcatgggttagttaaccaggtgcaatacagcacaccaaaagcttgactgccagtgaagatggacctgctcttatactgttgattactttcagtattaatatactattccccaattattttttgattggtatgtattaatgggtaattgaataatgaaaataagccaggtatttttgtgccggaagtttactagattgcatgttaccaaataccctgctcttcctctaattcccttcccccatctgactctattatcaactaaatgcattccaggcaaacagatggacactcacagcccttcccagccccacctccaagtagtatgcaaatggcactgagatttagcaaaaacgcggcgtctttgaaagttaacagacactaaggtagcagtgcctgtgtgttggagctcagttaggagttgaagttttctgcacctgtgataacaagcccaccagccacatgcatttcttcttcctgccactgtgactcggtggctgtagagccacatggcatttgtcagccaatctgtttcaagtcttttctttccaccaatagctttcttacagattttcttggctaaatgaggccattacctagattgtcccttcagtaggagcctgaatccttcgcttaccaggctgagagctatttgccatgataatgctgattctctcactcctcatgcagaatgtgcacctgcagccctttgatgcgttttgatttgggggcgatttttcaggctttgattagcaggctgcttgcaatgcagaagatcacagttcctttctggggcagcagcaaccagagcctcttcctgtgtcctgtgtgtctggtatgtttacaccttgctctgagtttttctcttgttttctttttttaattaagtttacattttagtttctttgacatcttgtttacagtttttgtctgatgttttttcttttgtagtgtcttatgccctagatttagtcatcttgttaaatatatttggatatgaaatcttgacgaaaagaaaataactcctgaaaaagagggtctatcttgccacacgttaaaaacaaaaataatgtccttgtggcctcttacttgataaagttgcaccaggacggtctgagaaaggcaggcggtgtaatatgtggtgcaatccattttttcaaggtgatgacggcacaaaatacttagactagatgctgatccataaacattcactgatattcttacaggttggtttgcagtgttaacatttttgttagcctgatctgtaggtgggaagtaagatcatcataattccttagctctgagcactgattcaaaattgtataaatgactgaacaacttagatgatttgaaattaattgaaaataagaagggcttgtggaatttgcatttggctttggccttcaagcatttggaaatattaagagaatttccattttacatgtctccaactggggtgcttcttacaaccctttcactttttttttgagacgagtttcgctctgttgcccaggctggagtgcagtggcacgatctcggctcactgcatcctctgcctcctgggttcaagtgattgtcccgcctcagcctcccaagtagctgggattacaggtgtgcactaccatgcccagctaatttttgtgtttttagtagagactgggtttcaccatgttggccaggctcgtctcaaactcctgacctcaggtgatctacccgcctccacctcccaaagtgttgtgattacaggcgtgagccaccacacccagccctttcactaatttttggcagagttcacaatcccatcctatgtcagaaacttgaacctaacttaagaaattttgagtcatttttttggaggactgaggctttgttctacctactcttgaagaatcctgatgaaatattcaaacacataaagggatggccctggaggtctatcctgcatacctggagagcttctctggtcctgcccaccttgaaagttgcagactttgttgtaacatctatgtgatgagcttccctgtgaagccccatttgacaggtgggccagcagtgttttatcagcactctgatggcccacatttcccaggaaaacttcttgaaacttaccgttgtgggcagtggtcagagcgtgtagttcttatgactgtcttgtttcatctgtggagcacgtgtggagcacgttggtacagcagtttctgtggggtttggcatgggtgattttggttagtaaccatcctccaattgttgcttgtgaaagtcattcataacttgttccttttacttagttttgttgttactgctgttgttgttggtttggttggttttgagaccgggtctggctctgtagcccaagctggaatgcggtggcgcgatcatggctccctgcagcctcaaactcctgggctcaagcaatcctcctgcctcagcctcccaagcagctgggaagataggcacgtgccaccacacccggctaattttttctttattttttttgtagagatgggggtctcactatgttgcccaggctggtctcaaactcctgggctcaagcgatcctttggcctcggcctcccaaagtgcatgagccaccatgcctggcctgtttagttttgtttcaagttgaaatacctttcttgtgttttctaattagaaaagtaatatctactcattgtaaaaactcaaacagtgcagaaatgtagaaagtagaaagtgtaagtccctggttgtcccttctgcctgagacaaccactgctcacagtttgatgtatatccttccagagactctcaaatttaagcaaataatttttattaccatgtctttttatttgaagacgtacatttgcctccaaagttcaacacaagttcaactgaccatatccttccatgacctgaatagatgctatcctttatcacgatgttcaattgcctttgaaagagagtagtccaggtatattcctgatcaaaatttggcatttttgatgatactactctacacagatcagactcatgtgcagaatcgtgcctggagagagaggtttggttaagacagagatttctggaaacattcaaattgcaaatggaaacttgaaacccacaatctaatgaggaatgtactggaaaaataatctgaagagttgacaaattgtgtactagattgaacacatggaatgcaatgcaatgagactttctgcactaaaacttatcctcatatgtacaacaatgatgtgtgtattatataacagtgatgtgtacatttctgacaccccatacataatatacacagtttgtataaatgcatacatttaaaaatatatatgtacaatacagctaacataaaactgtagtacgcctgaaggatattactagtgcctaatattgagtatgagtcactgcgtgttcgcatcaacttggaagtgcagtaattgttataaaattaatcagtgcagccaacattatttatgaatcacatctttgaaactgtgcagtagcatatacatatatatttttaaataacatttttcacagttttccagagttactgttgaaatctgcatcaccaaaaaaaaaaaaaagcaagatttttttaacaatgtagacactcttcagacccagtaatctgcgtgtgatttcctatttgtagattcccaagagactttagcagtcaccagccttaatgcatgtacaggatattattgtgacttaatttatctgcagtttttaatccatgtgaaattggaatttataaacggacttggattaaacatgtctgcctttctaaggttgcaaatgttacattaaatgatttatgttgtaaaaaaaaaaaaaaaaaa

SEQ ID NO: 13179 - DNA, 2448 bp, Homo sapiens
aaaagaaagggtgagcgcggctggaagcgcgcatgcgctgtggctaatgccgtaggctccttcagggctgagccatcccgcgtgtcttgcgctcggtggaaatgcccagccgagggacgcgaccagaggacagctctgtgctgatccccaccgacaattcgaccccacacaaggaggatctaagcagcaagattaaagaacaaaaaattgtggtggatgaactttctaaccttaagaagaataggaaagtatataggcaacaacagaacagcaatatattctttcttgcagaccgaacagaaatgctgtctgagagcaagaatatattggatgaactgaaaaaagaataccaagaaatagaaaacttagacaagaccaaaatcaagaaatagtcaacctgatttcacataacaatgtgtggcatttgttgttctgtaaacttttctgctgagcatttcagtcaagatttaaaagaggacttactatataatcttaaacagcggggacccaatagtagtaaacaattgttaaagtctgatgttaactaccagtgtttattttctgctcacgtcctacacttgaggggtgttttgactacccagcctgtggaagatgaaagaggcaatgtgtttctatggaatggagaaatttttagtggaataaaggttgaagctgaagagaatgacactcaaattttgtttaattatctttcctcctgtaagaatgaatctgagattttgtcactcttctcagaagtacaaggtccctggtcatttatatattatcaagcatctagtcattatttatggtttggtagggatttttttggtcgccgtagcttgctttggcattttagtaatttgggcaagagtttctgcctctcttcagttggcacccaaacatctggattggcaaatcagtggcaagaagttccagcatctggacttttcagaattgatcttaagtctactgtcatttccagatgcattattttacaactgtatccttggaaatatatttctagggagaatattattgaagaaaatgttaatagcctgagtcaaatttcagcagacttaccagcatttgtatcagtggtagcaaatgaagccaaactgtatcttgaaaaacctgttgttcctttaaatatgatgttgccacaagctgcattggagactcattgcagtaatatttccaatgtgccacctacaagagagatacttcaagtctttcttactgatgtacacatgaaggaagtaattcagcagttcattgatgtcctgagtgtagcagtcaagaaacgtgtcttgtgtttacctagggatgaaaacctgacagcaaatgaagttttgaaaacgtgtgataggaaagcaaatgttgcaatcctgttttctgggggcattgattccatggttattgcaacccttgctgaccgtcatattcctttagatgaaccaattgatcttcttaatgtagctttcatagctgaagaaaagaccatgccaactacctttaacagagaagggaataaacagaaaaataaatgtgaaataccttcagaagaattctctaaagatgttgctgctgctgctgctgacagtcctaataaacatgtcagtgtaccagatcgaatcacaggaagggcgggactaaaggaactacaagctgttagcccttcccgaatttggaattttgttgaaattaatgtttctatggaagaactgcagaaattaagaagaactcgaatatgtcacttaattcggccattggatacagttttggatgatagcattggctgtgcagtctggtttgcttctagaggaattggttggttagtggcccaggaaggagtgaaatcctatcagagcaatgcaaaggtagttctcactggaattggtgcagatgagcaacttgcaggttattctcgtcatcgtgtccgctttcagtcgcatgggctggaaggattgaataaggaaataatgatggaactgggtcgaatttcttctagaaatcttggtcgtgatgacagagttattggtgatcatggaaaagaagcaagatttcctttcctggatgaaaatgttgtctcctttctaaattctctgccgatttgggaaaaagcaaacttgactttaccccgaggaattggtgaaaaattacttttacgccttgcagctgtggaacttggtcttacagcctctgctcttctgcccaaacgggccatgcagtttggatcaagaattgcaaaaatggaaaaaattaatgaaaaggcatctgataaatgtggacggctccaaatcatgtccttagaaaatctttctattgaaaaggagactaaattgtaatgtgattcacaatgtaacaatataaaaataagtttttatataattatataaaagtaaggtactctgctgctttactattgtataatatagtagttttaaagtt

SEQ ID NO: 13180 - DNA, 5508 bp, Homo sapiens
gttagcggcgtctcggttgccatggagaccaggagctccaaaacgcggaggtctttagcgtcccggaccaacgagtgccaggggacaatgtgggcgccaacttcgccaccagccgggtccagcagccccagccagcccacctggaagtcctccttgtattcctccctcgcctactctgaggccttccactacagcttcgcagcccggccccgccgcctcacgcagcttgcgctggcgcagcgtcccgagcctcagctgcttcgtctgcgcccctcctcgctgcgcacccaagatatctcgcacttgctcaccggcgtcttccgcaacttgtactcagccgaggtcatcggcgacgaagtgagcgcaagcttgatcaaggcccgcggcagcgagaatgagcgccacgaggagttcgtggaccagctgcagcagattcgggagctctataagcagcggctggatgagtttgaaatgttggagagacatatcactcaggcccaagcacgggctattgcggaaaatgagcgggtcatgagccaggctggagtacaggacctcgagagccttgtcaggttgcctccagtgaagagtgtctccagatggtgtatagacagcgagttgctacggaaacatcatttgatctccccagaagattactacaccgatacagtgccgtttcactctgcacctaaaggcatctccctacctggatgttcaaaactgacatttagctgtgagaagcgttccgtccagaagaaagagctgaacaagaagcttgaagattcatgcaggaagaagcttgctgagttcgaagatgagttagaccacactgtggacagcctgacatggaatttaactcctaaggccaaagaaaggaccagagaacctctcaagaaagcaagtcaaccaaggaataaaaactggatgaaccacttacgtgtgccacagagagagctagacagacttctgcttgccagaatggagagtcggaaccacttcctaaaaaatccccgtttttttcctcctaacactcgatatggaggcaagtctcttgtttttcctccaaagaagccagcaccgataggagaattccagagtacagagccagaacagagttgtgctgatactccagtgtttctagctaagccaccaattgggtttttcacagattatgaaattggtccagtttatgagatggtaattgcgctgcagaacaccaccacgaccagccgctacctgcgagtcctcccgccttccacgccatacttcgctctgggactggggatgttcccaggaaaaggtggaatggtggctcctggaatgacctgccagtacattgtccagttttttcccgactgccttggggattttgatgattttattttagtggagacccagtcagcccacacacttctgatccccctgcaggcccggaggccgccccccgtgctgacattgtcaccggtgttggactgtggttactgcctcattgggggagtcaagatgaccagattcatctgcaaaaatgtgggtttcagtgttggcaggttctgcattatgcccaaaacaagctggccaccactaagtttcaaggccattgcaaccgtcggctttgttgaacaacctccttttggaatcctgccttcggtgtttgagctggccccgggacatgctatattagtggaggtcttgttttccccaaagagcctaggaaaggcagagcagaccttcatcatcatgtgcgacaactgccagataaaggagctggtgaccataggaattgggcagctgattgctttggatctgatctatatttctggtgaaaaaagccagccagaccctggagagctcacagacttaacagcccagcacttcatacgatttgagcctgaaaaccttcggtccacggctaggaagcagctgattattagaaatgctacgcacgtggagctggccttctactggcagatcatgaagcccaacctgcagcccctcatgcctggagaaaccttcagcatggacagcatcaagtgctaccccgacaaggagactgccttctccatcatgcccagaaagggggttctaagcccccacacagaccacgagttcatcctgagcttttctcctcatgagctgagggattttcacagtgtgctccagatggtgctagaggaagtcccagagcctgtaagttcagaagcggagagcctggggcactcctcctactctgtggatgatgtgattgtcctggaaatcgaggtgaaaggctcagtagaacctttccaggttctcttagagccatatgccctcatcatcccaggggagaactacattgggataaatgtgaagaaggcttttaagatgtggaacaacagcaagtcacccatcagatacctgtgggggaagatcagcgactgccacatcattgaagtggagcccggcacaggggtcatagagcccagtgaggtcggggattttgagttgaactttactgggggtgtccctggccccacaagccaggacctgctgtgtgaaatcgaagactcgccctcgccagtggtgttacacattgaggctgtctttaaggggcctgccctcatcatcaacgtctcagcccttcagtttggtctgctccgcctggggcagaaagccacaaactccatccagatccggaacgtcagccagctcccagccacatggcgcatgaaggagagcccagtctccctccaggaaaggcctgaggatgtgtctcccttcgacattgagccttcgagtggccagcttcactctctgggggagtgcagggtggacatcaccttggaggccctgcactgccagcatctggagaccgtcctggagctggaggtggaaaatggtgcctggagctaccttcctgtgtatgctgaggtacagaagccccatgtgtacctacagagcagccaggtggaggttagaaatctctacctgggtgtgcccacgaagacaaccatcacacttatcaatggcacgctcctgcctacccagttccactggggcaagctcctcggacaccaagcagaattctgcatggtgacagtctcccccaaacatggcctgctgggcccaagtgaggagtgccagctcaagttggagttgactgctcatacccaggaagagctgacccatctggccctcccttgtcacgtgtcaggcatgaagaagccactggttctaggcatttctgggaagccccagggactgcaagtggccattaccatctctaaggagagctctgattgcagcacagagcagtggccaggccacccaaaggagctccgcctggactttggctcagcggtgccactgaggacccgtgtgactcgccagctcattctcaccaatcgctccccaatacggacccgtttctccctcaagtttgagtatttcgggagcccccaaaacagcctgagcaaaaagaccagccttcccaacatgcctcctgccctgctaaagacagtgcggatgcaagagcacctggccaagcgagagcagctggattttatggagagcatgctatcccacgggaaaggagctgctttcttccctcacttttcccagggcatgctggggccctaccagcagctgtgcattgacatcacaggctgtgccaacatgtggggcgagtactgggacaacctcatctgcacggtgggagacctgctgccggaagtcatcccagtgcacatggcagcggtgggctgccccatcagctccctgaggaccacctcctacactattgaccaggcccagaaggaaccagccatgaggttcggcacccaggtctccggaggagacacagttacccgaacccttcgcctgaataactccagcccctgtgacatccgcctggattgggagacctatgttccagaagacaaggaagaccggctggtggagctgctggtgttttatgggccacctttcccgctgcgggaccaagccgggaatgagcttgtgtgccctgatacccctgagggtggctgcctcctctggtccccaggcccctccagttcatcggaattcagccatgaaactgactcatcagttgagggcagctccagtgccagcaatagggtggcacagaagctcatctcagtcatcctgcaggcacatgagggggtgccctccggccacctgtactgtatcagccccaagcaggtggtggtccctgctgggggcagcagtaccatctacatctccttcacccctatggtgctcagccctgagatcctgcacaaggtggagtgtactggctacgccctgggtttcatgagcttggacagcaaggtggaaagggagattccagggaagaggcatcgcctgcaggactttgcggtgggacccctgaaactggacctgcatagctacgtgaggcctgcacagctaagtgtggagctggactacggcggcagtatggaattccagtgccaggccagtgacctcattcccgagcagccctgctctggggtgctgagtgagctggtgaccacccaccacctgaagctgaccaacactacagagatcccacactacttccggcttatggtctccaggcccttctccgtttctcaagatggggcgagccaggaccacagagctcctggccctggccagaagcaggagtgtgaggaggagacagcctcagcggacaagcagctggtgctccaagcacaggagaacatgctggtgaacgtgtccttctcactctccctggagctgctctcctatcagaagctcccagctgaccagacactgcctggggtggacattcagcagagtgcgagtggagagagagagatggtgtttactcagaacctgctcctggagtacaccaaccagaccactcaggtggtgcccctgcgggctgtggtggccgtgcctgagctgcagctctccaccagctgggtggactttgggacctgctttgtgagccagcagcgagtccgggaggtctacctgatgaacctgagcgggtgccgaagctactggactatgctgatgggagtagtgagctgtacgagtccacgatggtggtggaaggtgtgctcggtgagaagtcctgcaccctgcggctccggggccaaggctcctatgatgagagatacatgttgcctcaccagccctgaggctccgccccagccctcagccccaggccccagctggagaaaaaacattgcccagggattaggagcagctcttcagcacaaagacacagacttggggacctggggacctctgggcagctcctggaatggaagaacccccttccacaatggtctcagcctaggccctcatgatatgtcctcagagctaacataaaggacaggccacaccacagcagagaccaccacattgagatcactactcagtgcatagcgaagaccagtatggcaaaattagtcttggaaaaaaaccacagccactaagataaattcatgcacttttactatgaaaaaaaaaaaaaaaaaa

SEQ ID NO: 13181 - DNA, 1639 bp, Homo sapiens
atcatctatatgttaaatatccgtgccgatctgtcttgaaggagaaatatatcgcttgttttgttttttatagtatacaaaaggagtgaaaagccaagaggacgaagtctttttctttttcttctgtgggagaacttaatgctgcatttatcgttaacctaacaccccaacataaagacaaaaggaagaaaaggaggaaggaaggaaaaggtgattcgcgaagagagtgatcatgtcagggcggcccagaaccacctcctttgcggagagctgcaagccggtgcagcagccttcagcttttggcagcatgaaagttagcagagacaaggacggcagcaaggtgacaacagtggtggcaactcctgggcagggtccagacaggccacaagaagtcagctatacagacactaaagtgattggaaatggatcatttggtgtggtatatcaagccaaactttgtgattcaggagaactggtcgccatcaagaaagtattgcaggacaagagatttaagaatcgagagctccagatcatgagaaagctagatcactgtaacatagtccgattgcgttatttcttctactccagtggtgagaagaaagatgaggtctatcttaatctggtgctggactatgttccggaaacagtatacagagttgccagacactatagtcgagccaaacagacgctccctgtgatttatgtcaagttgtatatgtatcagctgttccgaagtttagcctatatccattcctttggaatctgccatcgggatattaaaccgcagaacctcttgttggatcctgatactgctgtattaaaactctgtgactttggaagtgcaaagcagctggtccgaggagaacccaatgtttcgtatatctgttctcggtactatagggcaccagagttgatctttggagccactgattatacctctagtatagatgtatggtctgctggctgtgtgttggctgagctgttactaggacaaccaatatttccaggggatagtggtgtggatcagttggtagaaataatcaaggtcctgggaactccaacaagggagcaaatcagagaaatgaacccaaactacacagaatttaaattccctcaaattaaggcacatccttggactaaggattcgtcaggaacaggacatttcacctcaggagtgcgggtcttccgaccccgaactccaccggaggcaattgcactgtgtagccgtctgctggagtatacaccaactgcccgactaacaccactggaagcttgtgcacattcattttttgatgaattacgggacccaaatgtcaaactaccaaatgggcgagacacacctgcactcttcaacttcaccactcaagaactgtcaagtaatccacctctggctaccatccttattcctcctcatgctcggattcaagcagctgcttcaacccccacaaatgccacagcagcgtcagatgctaatactggagaccgtggacagaccaataatgctgcttctgcatcagcttccaactccacctgaacagtcccgagcagccagctgcacaggaaaaaccaccagttacttgagtgtcactcagcaacactggtcacgtttggaaagaatattaaaaaaaaaaaaaaaaaa

SEQ ID NO: 13182 - DNA, 5550 bp, Homo sapiens
ctccgccagcccgtgccaccgctgctaatgagagcagtcattaagtaaatgagacgtcgcctttagctggcttaggagttcgcacactaaggggagaagatatttaattgaaacccgcacgcaggcttccccacatgtgaccgctgtacgggaggcagctgccttccctctcctcccccagtccaccctgcaccccccatgtaaatttcatgattgctttccgtgatgtcattttgaaagaggacagacaatagctgtggggaaagaaaatgagttccgaggtgagctgttaaatcagaggtggacacacggaggcaaggccagcagctgcaggacctcaagacacctgggcagacactgcaagatgagcttagaaaatgaagacaagcgagctcgcacccgatccaaggccctgcgaggacccccagagaccacagctgcagacctcagctgccccaccccaggatgcacaggctcagggcacgtccggggcaagtactccaggcaccgaagtttacagagctgccccctggccaagaagaggaagctggagggcgctgaggctgagcacctggtgtccaagaggaagtcacaccccctgaagctggctctggacgagggctatggtgtggacagcgacggcagtgaggacactgaggtgaaggacgcctctgtttcggatgaatcggaaggaactctggagggggccgaggctgagacgtcaggacaggacgagattcatcgccccgagacagctgaaggaaggagccccgtcaagtcccattttggatccaaccccatcggcagcgccactgcctcctccaagggcagctacagcagctaccagggaatcatcgcaacttctctcctgaacttgggtcaaattgctgaagagaccctggtggaagaggacttgggccaggcggccaagccaggtcctggcattgtgcacctgcttcaggaggctgcagagggagctgccagcgaggagggtgaaaagggcctcttcatccagccagaggatgccgaggaggtcgtcgaagtcaccaccgagcgctcccaggacctgtgtccccagtccctggaggatgcagccagtgaggagtccagcaagcagaaaggcatcctgagtcacgaagaggaggacgaggaggaggaggaggaggaagaggaggaggaggaggatgaagaagaggaagaggaagaggaggaggaagaggaagaggaggaggaggaagaggaagaggaggaggaagaggaagaggaagaggaggaggaggaggcagctcctgatgtgatctttcaggaagacacctctcacacctctgcccagaaggcccctgagctccggggcccagaatcacccagtcccaagcctgagtactctgttattgtggaggtccgctcggatgatgacaaggacgaggacacccactcccggaagtcaacagtcactgacgagtcggagatgcaggacatgatgacccggggaaacctgggcctcctggagcaggccatcgccctgaaggctgaacaggtgcgcacagtctgcgagccgggctgcccgcctgccgagcagagccagctgggcctgggagagccagggaaggcagcaaagcccctggacactgtgcggaagagttactacagtaaagatccttcaagagctgagaagcgtgagatcaagtgtccaacaccaggctgtgatggcactggccacgttaccgggttgtaccctcaccaccgcagcctttctggctgtccccacaaggataggatccccccagagatcttagccatgcatgagaacgtgctgaagtgccccactcctggctgcacaggccagggtcacgtgaacagcaaccgcaacacgcacagaagtttgtctgggtgtcccattgctgccgccgaaaaattagccaaatcccatgagaagcagcagccgcagacaggagatccttccaagagtagctccaattccgatcggatcctcaggcccatgtgcttcgtgaagcagctcgaggtccctccatatgggagctaccggcccaacgtggcccccgccacacccagggccaacttggccaaggagctggagaagttctccaaggtcacctttgactacgcaagtttcgatgctcaggtttttggcaaacgcatgcttgccccaaagattcagaccagcgaaacctcacctaaagcctttcaatgctttgactactcgcaggacgccgaggctgcacacatggctgccactgccatcctgaacctctccacgcgctgctgggagatgcctgagaacctcagcacgaagccacaggacctccccagcaagtctgtggatatcgaggtagacgaaaatggaaccctggacttgagcatgcacaaacaccgcaaacgagaaaatgctttccccagcagcagcagctgcagcagcagccccggtgtgaagtctcccgacgcctcccagcgccacagcagcaccagcgcccccagcagctccatgacctctccccagtccagccaggcctcccgccaggacgagtgggaccggcccctggactacaccaagcctagccgcctgagagaggaggaacctgaggagtcagagccagcagcccattcttttgcttcttctgaagcagatgaccaggaagtgtcggaagagaattttgaggagcggaagtatccgggggaagtcaccctgaccaactttaagctgaagtttctctccaaggacataaagaaggagctgctcacctgtcccacccctggctgtgacggcagcggccacatcaccgggaactacgcctcccaccgcagcctctctggttgccctcttgctgacaagagcctcagaaacctcatggctgcccactctgctgacctcaagtgccccacgcccggctgtgacggctctggccacatcacagggaactacgcttcacaccggagcttgtccggctgccctcgtgcaaagaaaagtggagtcaaggtggcacccaccaaggacgacaaggaggaccccgagctgatgaagtgcccagttccaggctgtgtggggctcggtcacatcagcgggaaatacgcctctcacaggagcgcatccggctgcccactggccgcccgcaggcagaaggaagggtccctcaatggctcgtcattctcctggaagtccctgaagaatgaaggaccgacctgccccaccccgggctgtgacggctctggccacgccaatgggagtttcctcacccaccggagtttgtcaggctgtcccagagcaacctttgctggaaagaagggaaaactgtcaggggatgaggtcctcagtccaaagttcaagactagcgacgtgttggagaatgatgaggagatcaagcagctgaaccaggagatccgagacctgaacgagtccaactcggagatggaggctgccatggtgcagctgcagtcccagatctcctccatggagaagaacctgaagaacatcgaggaggagaacaagctcattgaggagcagaatgaagccctgtttctggagctgtccggcctgagccaggccctcatccaaagtctcgccaatatccgccttccgcacatggagccaatatgcgaacagaatttcgatgcctatgtgagcaccctcaccgacatgtactccaaccaggacccggagaacaaggacctcctggagagcatcaagcaggctgtgaggggcatccaggtctaggccgtgtggtacccagaagtgtcccagcccaccacaccgtttacctccctcgccctgccccgcaccgtggggatgcccaactcacagtgacttcccgtttggggcccggtgtggccgcgggcgggtttatccaaagggatggctggaaattggccgctcccacgaggctccctccaggcttggggccgtggtggccctatctgtgtgcataggggcactgaagaattacaaagtgatttatttttgttttctgaaagaaatctgaagagcagctcaaagtctccagtggaagctcatggacaaggttctcagggaagttttggagtttgcaaccacagtattcctttgtctgtcgaggctgggagggtagccgtgagcgtggtgggtgggtggtgtgagtggcatcttggcctggaggacacgcctggggcagcgtgtctgtgctcagtgagggccgatgaagaaagtgcgttttctgttttcatttaattcagttttgtgttaagggtggaacaaagctctgttctagagggaaagttaggaataggcctcccagaggatactccagacagttgacaagcatcgcagcccctgtcaggtcaaggaattttaacctgggagactcctgaaaatcagcctaatgtctgggggcagctggcgctgaggctgtgcagatgtgtatggccttgggtcacagctccctactggggctgcagcctttagaccctgggtctgggatccacgtctagggaccactctggcttctgtgcatccacccaggcccccgacccatcactgccacattctccgggtcatggccgagcttgacctctgcatccatggtgacggaggtggcaatgacatcatcaaggtcagagggtaaattcctaacaggagaccacaaaggtttcacttcttttagatccatccaatatgcgaaaaaagggtacattttaatttaatgtgttaaaaacacaatgtccctaccgtgtaaatagaatccaagtcaattgtgactgcaattccaagttagtatttaaaaatagagaaattgcacttcctggaaaaaattaaaaagtagttagtttaattattctgtaaattatttaattttgtcaagatgtaagtatttatattcacagcctcttatgttaacgtttgctatttatttaacatttttatttattaattttatactatttcaactagaccccacaccagggcaccctaagaggggaaaaaagtgaattcaaagcaaaaataactatttgactataatataggccacaaaaaatcttgatataactcctagttataattttgatgcaaccaagttattttttatatattttgttatttattcttttaataatggaatttttttaaaaagtattttgtaactgaggaattttgataatttggggattttgttttcccttggtctaatggagagaaagacattttggttttctttttccattttgggttccttttgtttcaggcacggataacagcaaatggaattctgtatttattattatttaagtgtagcgcagatgtgtgtgcttgggcgtgtttctcgtgtcgcgtttgcgtgtcggctcttgcggtggagtcctgttgctgtgagggagtgctggccgcaggcagcctcgagtcaccgccaggctcacaggctgtgccacccgtccctccgacagctccaatactgtgaccctccttcctcaggaagcgcgttgaacccacagcactccgtggtgtgtttgcagggtgatttcctaataaaagtccactctgactgtgaaaaaaaaaaaaaaaaa

SEQ ID NO: 13183 - DNA, 4987 bp, Homo sapiens
ttctctggggaggcagtaaggggccgtggagctggcctcggcctcggcatcgggagaggctggacttcctgtctctctgtgctgaatggctgcgatggcgcccgctctcactgacgcagcagctgaagcacaccatatccggttcaaactggctcccccatcctctaccttgtcccctggcagtgccgaaaataacggcaacgccaacatccttattgctgccaacggaaccaaaagaaaagccattgctgcagaggatcccagcctagatttccgaaataatcctaccaaggaagacttgggaaagctgcaaccactggtggcatcttatctctgctctgatgtaacatctgttccctcaaaggagtctttgaagttgcaaggggtcttcagcaagcagacagtccttaaatctcatcctctcttatctcagtcctatgaactccgagctgagctgttggggagacagccagttttggagttttccttagaaaatcttagaaccatgaatacgagtggtcagacagctctgccacaagcacctgtaaatgggttggctaagaaattgactaaaagttcaacacattctgatcatgacaattccacttccctcaatgggggaaaacgggctctcacttcatctgctcttcatgggggtgaaatgggaggatctgaatctggggacttgaaggggggtatgaccaattgcactcttccacatagaagccttgatgtagaacacacaactttgtatagcaataatagcactgcaaacaaatcctctgtcaattccatggaacagccggcacttcaaggaagcagtagattatcacctggtacagactccagctctaacttggggggtgtcaaattggagggtaaaaagtctcccctgtcttccattcttttcagtgctttagattctgacacaaggataacagctttactgcggcgacaggctgacattgagagccgtgcccgcagattacaaaagcgcttacaggttgtgcaagccaagcaggttgagaggcatatacaacatcagctgggtggatttttggagaagactttgagcaaactgccaaacttggaatccttgagaccacggagccagttgatgctgactcgaaaggctgaagctgccttgagaaaagctgccagtgagaccaccacttcagagggacttagcaactttctgaaaagcaattcaatttcagaagaattggagagatttacagctagtggcatagccaacttgaggtgcagtgaacaggcatttgattcagatgtcactgacagtagttcaggaggggagtctgatattgaagaggaagaactgaccagagctgatcccgagcagcgtcatgtacccctgagacgcaggtcagaatggaaatgggctgcagaccgggcagctattgtcagccgctggaactggcttcaggctcatgtttctgacttggaatatcgaattcgtcagcaaacagacatttacaaacagatacgtgctaataaggggttgatagttcttggggaggtacctcccccagagcatacaacagacttatttcttccacttagttctgaggtgaagacagatcatgggactgataaattgattgagtctgtttctcagccattggaaaaccatggtgcccctattattggtcatatttcagagtcactgtctaccaaatcatgtggagcactcagacctgtcaatggagttattaacactcttcagcctgtcttggcagaccacattccaggtgacagctctgatgctgaggaacaattacataagaagcaacgactgaatctcgtctcttcatcatctgatggcacctgtgtggcagcccggacacgtcctgtactgagctgtaagaagcggaggcttgttcgacccaacagcatcgttcctctttccaagaaggttcaccggaacagcacaatccgccctggctgtgatgtgaatccctcctgcgcactgtgtggttcaggcagcatcaacaccatgcctcccgaaattcactatgaagcccctctgttggaacgtctttcccagttggactcttgtgttcatcctgttctagcatttccagatgatgttcccacaagcctgcatttccagagcatgctgaaatctcagtggcagaacaagccttttgacaaaatcaaacctcccaaaaagttatcgcttaagcacagagcacccatgccgggcagtctgccagattcagctcgtaaggacaggcacaaattggtcagctccttcctaacaacagccaagctgtcccatcaccaaacccggcctgacaggacccacaggcagcacttagacgatgtgggggccgtgcccatggtggagcgagtgacagcgccaaaagcagagcgcttgctcaacccaccaccacccgtgcatgacccaaaccacagcaaaatgagattgcgagaccattcatctgagagaagtgaagtgttgaagcatcacacagacatgagcagttcgagctacttggcagccacccaccatcctccacacagtcccttggtgcgacagctctccacctcctcagattcccctgcacccgccagctctagctcacaggttacagccagcacatcgcagcagccagtaaggaggagaaggggagagagctcatttgatattaacaacattgtcatcccaatgtctgttgctgcaacaactcgcgtagagaaactgcaatacaaggaaatccttacgcccagctggcgggaggttgatcttcagtctctgaaggggagtcctgatgaggagaatgaagagattgaggacctatccgacgcagccttcgccgccctgcatgccaaatgtgaggagatggagagggcacggtggctgtggaccacgagtgtgccaccccagcggcggggcagcaggtcctacaggtcatcagacggccggacaaccccccagctgggcagtgccaacccctccaccccccagcctgcctcccctgatgtcagcagtagccactctttgtcagaatactcccatggtcagtcccctaggagccccattagcccggaactgcactcagcacccctcacccctgtggctcgggacactccgcgacacttagccagtgaggatacccgttgttccacaccagagctggggctggatgaacagtctgtccagccctgggagcggcggaccttccccctggcgcacagtccccaggcggagtgtgaggaccagctggatgcacaggagcgagcagcccgctgcactcgacgcacctcaggcagcaagactggccgggagacagaggcagcgcccacctcgcctcccattgtccccctcaagagtcggcatctggtggcagcagccacagctcagcgcccgactcacagatgagcgggagacagccatctaaacagactcactaactattggcattaaagcttcagaaatctctgcgtttgatattcaaacatcatatgccggaaattttcacagtttttagtgaacttaaggaatttagatcctactttggtatttttttttcttgttttaatttttgttttgtttttgtttccatgttttcttgtcacacacctgagcacttcctcccgttggcaaacagaagttcaggatgagaccctgctggcctggtcctggcacatcctctgcactgttgaatcactggacttactgatcttagatgaccaccccctccctcacacctgtgggcagggcagaacagcctggcgggctacagtttagcatggccttcttgagctagggtggaatggggcagggtgctctggactcttaccccctcccctcccatctgtggcttggctctgctgtggccctcctggctgggtccccttggtttttcgtgctggaacatccccaccagagcctctctgccataactgccagctgctctccccgagtgctcagctggcagaacacctttcctttctcacccagaacttaagagactgattttttgtttcatctgcatttggtcttctctgttttgactctttcactgcagtaacctggctgtggctgctcaggttcccctcctcatgccccttggtacccttccctgtctgctctcccatgccatgtacacacccacaacccgtccttccacttggaatatttttaccacctatcctgatctttgaaggtagggttaggactacttaacctctattcccactcccctgcaaactgggggttgtgggaagtgagcagccatctccctgtgtgattttttttttttttccctctgattcactttgccatgtttccttcacatccagatccctgtcggtgttagttccactcttggtctttcacgctccccttgcctgtggaacattgtctggtcctagctgtggttcccattgttcccccttcacccttctctgttaaccttgtgcctgtctcctgtatgatcacatcaccaaaaagggggaggggggagaagactctttttttttggccattttgtaatcgtataaaaatagtagacaactgcttaatggttggggttttttcacaattttcaacattagtgatttttttttctgtttgcaagttaaagggtttgtcattgtttctttaaaaaaaaatacaataatgcaccatatccctatgcataaagtgcttcttctatttataaggttgaaaattctgaataacccttttagcattgaaaaaaaaaacaaaaacaaaaaatggaaaaaaaaaaccttgtattttgtaaatattttcttttcctgctttggagctgtgtaatggcagcgaaacatgtagctgtctttgttctatagaaatgcttttcttcagagaagctgatctttgttaatgtcttgattctgttcgcaaagcacagactagtgcttaaaaaaaaaaaagaaggaaaaattgaaaaaaataaaaaaaaaagttacagaaagaaaaaaaaaaaaaaaaaaaaaa

SEQ ID NO: 13184 - DNA, 4281 bp, Homo sapiens
ggctcctttattgagaatcaatgtcttctcctaggtaattgatcaccctagacccagggacacccaattcatcgtaatcatcatgaataatcaaaaagtggtagctgtgctactgcaagagtgcaagcaagtgctggatcagctcttgttggaagcgccagatgtgtcggaagaggacaagagcgaggaccagcgctgcagagctttactccccagcgagttaaggaccctgatccaggaggcaaaggaaatgaagtggcccttcgtgcctgaaaagtggcagtacaaacaagccgtgggcccagaggacaaaacaaacctgaaggatgtgattggcgccgggttgcagcagttactggcgtccctgagggcctccatcctcgctcgggactgtgcggctgcggcggctattgtgttcttggtggaccggttcctgtatgggctcgacgtctctggaaaacttctgcaggtcgccaaaggtctccacaagttgcagccagccacgccaattgccccgcaggtggttattcgccaagcccgaatctccgtgaactcaggaaaacttttaaaagcagagtatattctgagcagtctaataagcaacaatggagcaacgggtacctggctgtacagaaatgaaagtgacaaggtcctggtgcagtcggtctgtatacagatcagagggcagattctgcaaaagctgggtatgtggtacgaagcagcagagttaatatgggcctccattgtaggatatttggcacttcctcagccggataaaaagggcctctccacgtcgctaggtatactggcagacatctttgtttccatgagcaagaacgattatgaaaagtttaaaaacaatccacaaattaatttgagcctgctgaaggagtttgaccaccatttgctgtccgctgcagaagcctgcaagctggcagctgccttcagtgcctatacgccgctcttcgtgctcacagctgtgaatatccgtggcacgtgtttattgtcctacagtagttcaaatgactgtcctccagaattgaaaaacttacatctgtgtgaagccaaagaggcctttgagattggcctcctcaccaagagagatgatgagcctgttactggaaaacaggagcttcacagctttgtcaaagctgctttcggtctcaccacagtgcacagaaggctccatggggagacagggacggtccatgcagcaagtcagctctgtaaggaagcaatggggaagctgtacaatttcagcacttcctccagaagtcaggacagagaagctctgtctcaagaagttatgtctgtgattgcccaggtgaaggaacatttacaagttcaaagcttctcaaatgtagatgacagatcttatgttcccgagagtttcgagtgcaggttggataaacttatcttgcatgggcaaggggatttccaaaaaatccttgacacctattcacagcaccatacttcggtgtgtgaagtatttgaaagtgattgtggaaacaacaaaaatgaacagaaagatgcaaaaacaggagtctgcatcactgctctaaaaacagaaataaaaaacatagatactgtgagtactactcaagaaaagccacattgtcaaagagacacaggaatatcttcctccctaatgggtaagaatgttcagagggaactcagaaggggaggaaggagaaactggacccattctgatgcatttcgagtctccttggatcaagatgtggagactgagactgagccatcggactacagcaatgatgagggagctgttttcaacaagtctctgagtggcagccagacttccagtgcttggagcaacttatcagggtttagttcctctgcaagctgggaggaagtgaattatcacgttgacgacaggtcagccagaaaagagcctggcaaagaacatctggtggacactcagtgttccactgccttgtctgaggagctagagaatgacagggaaggcagagctatgcattcattgcgttcacagcttcatgatctctctcttcaggaacccaacaatgacaatttggagccttctcaaaatcagccacagcaacagatgcccttgacacccttctcgcctcataataccccaggcattttcttggcccctggtgcagggcttctagaaggagctccagaaggtatccaggaagtcagaaatatgggacccagaaatacttctgctcactccagaccctcatatcgttctgcttcttggtcttctgattctggtaggcccaagaatataggcacacatccttcagtccaaaaagaagaagcctttgaaataattgttgagtttccagaaaccaactgcgatgtcaaagacaggcaggggaaagagcagggagaagaaattagtgaaagaggcgcaggccctacatttaaagctagtccctcctgggttgacccagaaggagaaacagcagaaagcactgaagatgcacccttagactttcacagggtcctgcacaattctctgggaaacatttccatgctgccatgtagctccttcacccctaattggcctgttcaaaatcctgactccagaaaaagtggtggcccagtcgcagagcagggcatcgaccctgatgcctccacagtggatgaggaggggcaactgctcgacagcacggatgttccctgcacaaatgggcacggctctcatagactgtgcattctgagacagccgcctggtcagagggcggagacccccaattcctctgtaagcggtaacatcctcttccctgtcctcagcgaggactgcactaccacagaggaaggaaatcagcctggaaacatgctaaactgcagccagaactccagctcatcctcagtgtggtggctgaaatcacctgcattttccagtggttcttctgagggggacagcccttggtcctatctgaattccagtgggagttcttgggtttcattgccgggaaagatgaggaaagagatccttgaggctcgcaccttgcaacctgatgactttgaaaagctgttggcaggagtgaggcatgattggctgtttcagagactagagaatacgggggtttttaagcccagtcaactccaccgagcacatagtgctcttttgttaaaatattcaaaaaaatctgaactgtggacggcccaggaaactattgtctatttgggggactacttgactgtgaagaaaaaaggcagacaaagaaatgctttttgggttcatcatcttcatcaagaagaaattctggggaggtatgttgggaaagactataaggagcagaaggggctctggcaccacttcactgatgtggagcggcagatgaccgcacagcactatgtgacagaatttaacaagagactctatgaacaaaacattcccacccagatattctacatcccatccacaatactactgattttagaggacaagacaataaagggatgtatcagtgtggagccttacatactgggagaatttgtaaaattgtcaaataacacgaaagtggtgaaaacagaatacaaagccacagaatatggcttggcctatggccatttttcttatgagttttctaatcatagagatgttgtggtcgatttacaaggttgggtaaccggtaatggaaaaggactcatctacctcacagatccccagattcactccgttgatcagaaagttttcactaccaattttggaaagagaggaattttttacttctttaataaccagcatgtggaatgtaatgaaatctgccatcgtctttctttgactagaccttcaatggagaaaccatgcacatagaatacggcacagtctggtcctttggggcttgggcagggccgtgacacaggttctggccaatgatttgcaagaggaattgatcagtatcactttaagtcctgcatttaattggcagcacaagatcctgcagagcctctttccctctgccacagttatcaagaatgggtcaggagaccgctgcttctgggcataagtcctgcaaggaaagcaacatggaaaacagccccaactcacccatgagggatgaaaagcactcttgagaaaggcatgtgttgtttaagccattgagattttagagctttttgtcactatctgtcaagactgatactactggggcttttcctattgatttgggagttctttacatattaaaaaaatgtgagcctttgtgatacgaattcaatttgttttcctgtcttttgacatttgactttgcataaaagtttatctgtgcataattttaa

SEQ ID NO: 13185 - DNA, 2535 bp, Homo sapiens
ctgggggcggggcaggggcaggtgtagcctctgtgcctcgttgtcccctggcgctacccggacatctctcagggtgccggcaccatgaagatctggacttcggagcacgtctttgaccacccgtgggaaactgttacaacagctgcaatgcagaaatacccaaaccctatgaacccaagtgtggttggagttgatgtgttggacagacatatagatccctctggaaagttgcacagccacagacttctcagcacagagtggggactgccttccattgtgaagtctcttattggtgcagcaagaacgaaaacatatgtgcaagaacattctgtagttgatcctgtagagaaaacaatggaacttaaatctactaatatttcatttacaaacatggtttcagtagatgagagacttatatacaaaccacatcctcaggatccagaaaaaactgttttgacacaagaagccataattaccgtgaaaggagttagcctcagcagttaccttgaaggactgatggcaagtacgatatcctcaaatgctagtaaaggccgagaagcaatggaatgggtaatacataaattaaatgctgagattgaagaactgacagcctcagcaagaggaaccataaggactccaatggcagcagcagcgttttgcagagaagtgatcgtgacagttggtagacaacatcgggtactccaggtctctccaaactgactatatatttatttgttattttaaaaatacaactatattttgggtagttttttttttttttttttttgataagttggtgtaaggctatgtgacttgatcaaaacagatgcagggcctctaaataaaagggatcatctgaaattaatgttgtttgaaattactatctgattttgagggttccagtatttctgtgaaaattcaacaagaactccttggaaactggtattgatattcagtctccttaaggtagatttttcaagcttttcatacattggaactccacctgactttggaccaaccccagaacagagcagagccacctcctatagacgcccattgccctgctgctgtacacttcagcagcttgcacaagggagctcacttaaaaggagaaattgtgtagttttaaaatatattttgtgtaaaataccttactatgctataaaccaccattaaaaaccagtgttttgatttggtacttaaatatttttggagtgaaaattatcactaaagtaacatgactccaacaaaagtatggtttcattataaaagagtactgtattgatttgcccaagttttgtaacttagtaaaggtattaacttccttggatttgtactttgtgatttagtatgctgtatcgtgggctggttatgttaactgaaaaaaataaagtcattacctgagttttgcagtgctctaacttaaacagaagaacagctgttcacatcttttagcattttacatttgcctaacttaaaaattgccatgtgtcaaaatcatggttttgtaattgctaaggcatgatatgtcaggttatttgaatataattactttttgaagtaattgtgaccacaaaacatcttttttacatgaaggagctgtgtatcatttgaaattactcaaatgatgtcttgctctgaggcataaatcccaggtacttagtgtttttaataatatggtgccactgcaggatttgggggcggtggggaagaacaagcataatggtagggggaggcttggcctgaaactaaccactgagtgaattgcactgcaggttttacttaacgggaattccttatttgggatgtcaagagggcagctgcaaactgaaaaacaatccagtaaatgtactttgttttatgtattgtagcaggcaattaactactaaataatagctttgacatttgcaattgttgcatagagactatttttgctagaagatgattagctcttgcctttattttacagtgcttagtgtgataaacttctagtcatgtttcctatccaagagaccagttaatatatgtacataaaccacagaaatagtataacacactatttttaaattatcgttttcctacttaaattttgtttagcttaagacttcttaggacatttgtaaaagcaggttaaatttaataaggtttctgatttttttttgtaaccggagatagtttttacaagtgaaataacatttcagctaaataaaacatcgctaaataattgatatttgatgaaaatctgctttgtataatttctgtaaattatccttgttctgaaaaaggtgtaatgccctaatatttttaaatccttatcctttgattttttaaaaactgacctattgataaaactataaattttcattttccagtgcagttagttacctttttaaacataaatgcacaacaagcaaatgaatttaagagaactaaactggaataagtgttcataaatgaaacccttggactatttaataaagttgaaatgtgaattaaggaaaacttttgttaataaaaactttcttttaaaaaaaa

SEQ ID NO: 13186 - DNA, 8368 bp, Homo sapiens
gcgatccgggcgccaccccgcggtcatcggtcaccggtcgctctcaggaacagcagcgcaacctctgctccctgcctcgcctcccgcgcgcctaggtgcctgcgactttaattaaagggccgtcccctcgccgaggctgcagcaccgcccccccggcttctcgcgcctcaaaatgagtagctcccactctcgggcgggccagagcgcagcaggcgcggctccgggcggcggcgtcgacacgcgggacgccgagatgccggccaccgagaaggacctggcggaggacgcgccgtggaagaagatccagcagaacactttcacgcgctggtgcaacgagcacctgaagtgcgtgagcaagcgcatcgccaacctgcagacggacctgagcgacgggctgcggcttatcgcgctgttggaggtgctcagccagaagaagatgcaccgcaagcacaaccagcggcccactttccgccaaatgcagcttgagaacgtgtcggtggcgctcgagttcctggaccgcgagagcatcaaactggtgtccatcgacagcaaggccatcgtggacgggaacctgaagctgatcctgggcctcatctggaccctgatcctgcactactccatctccatgcccatgtgggacgaggaggaggatgaggaggccaagaagcagacccccaagcagaggctcctgggctggatccagaacaagctgccgcagctgcccatcaccaacttcagccgggactggcagagcggccgggccctgggcgccctggtggacagctgtgccccgggcctgtgtcctgactgggactcttgggacgccagcaagcccgttaccaatgcgcgagaggccatgcagcaggcggatgactggctgggcatcccccaggtgatcacccccgaggagattgtggaccccaacgtggacgagcactctgtcatgacctacctgtcccagttccccaaggccaagctgaagccaggggctcccttgcgccccaaactgaacccgaagaaagcccgtgcctacgggccaggcatcgagcccacaggcaacatggtgaagaagcgggcagagttcactgtggagaccagaagtgctggccagggagaggtgctggtgtacgtggaggacccggccggacaccaggaggaggcaaaagtgaccgccaataacgacaagaaccgcaccttctccgtctggtacgtccccgaggtgacggggactcataaggttactgtgctctttgctggccagcacatcgccaagagccccttcgaggtgtacgtggataagtcacagggtgacgccagcaaagtgacagcccaaggtcccggcctggagcccagtggcaacatcgccaacaagaccacctactttgagatctttacggcaggagctggcacgggcgaggtcgaggttgtgatccaggaccccatgggacagaagggcacggtagagcctcagctggaggcccggggcgacagcacataccgctgcagctaccagcccaccatggagggcgtccacaccgtgcacgtcacgtttgccggcgtgcccatccctcgcagcccctacactgtcactgttggccaagcctgtaacccgagtgcctgccgggcggttggccggggcctccagcccaagggtgtgcgggtgaaggagacagctgacttcaaggtgtacacaaagggcgctggcagtggggagctgaaggtcaccgtgaagggccccaagggagaggagcgcgtgaagcagaaggacctgggggatggcgtgtatggcttcgagtattaccccatggtccctggaacctatatcgtcaccatcacgtggggtggtcagaacatcgggcgcagtcccttcgaagtgaaggtgggcaccgagtgtggcaatcagaaggtacgggcctggggccctgggctggagggcggcgtcgttggcaagtcagcagactttgtggtggaggctatcggggacgacgtgggcacgctgggcttctcggtggaagggccatcgcaggctaagatcgaatgtgacgacaagggcgacggctcctgtgatgtgcgctactggccgcaggaggctggcgagtatgccgttcacgtgctgtgcaacagcgaagacatccgcctcagccccttcatggctgacatccgtgacgcgccccaggacttccacccagacagggtgaaggcacgtgggcctggattggagaagacaggtgtggccgtcaacaagccagcagagttcacagtggatgccaagcacggtggcaaggccccacttcgggtccaagtccaggacaatgaaggctgccctgtggaggcgttggtcaaggacaacggcaatggcacttacagctgctcctacgtgcccaggaagccggtgaagcacacagccatggtgtcctggggaggcgtcagcatccccaacagccccttcagggtgaatgtgggagctggcagccaccccaacaaggtcaaagtatacggccccggagtagccaagacagggctcaaggcccacgagcccacctacttcactgtggactgcgccgaggctggccagggggacgtcagcatcggcatcaagtgtgcccctggagtggtaggccccgccgaagctgacatcgacttcgacatcatccgcaatgacaatgacaccttcacggtcaagtacacgccccggggggctggcagctacaccattatggtcctctttgctgaccaggccacgcccaccagccccatccgagtcaaggtggagccctctcatgacgccagtaaggtgaaggccgagggccctggcctcagtcgcactggtgtcgagcttggcaagcccacccacttcacagtaaatgccaaagctgctggcaaaggcaagctggacgtccagttctcaggactcaccaagggggatgcagtgcgagatgtggacatcatcgaccaccatgacaacacctacacagtcaagtacacgcctgtccagcagggtccagtaggcgtcaatgtcacttatggaggggatcccatccctaagagccctttctcagtggcagtatctccaagcctggacctcagcaagatcaaggtgtctggcctgggagagaaggtggacgttggcaaagaccaggagttcacagtcaaatcaaagggtgctggtggtcaaggcaaagtggcatccaagattgtgggcccctcgggtgcagcggtgccctgcaaggtggagccaggcctgggggctgacaacagtgtggtgcgcttcctgccccgtgaggaagggccctatgaggtggaggtgacctatgacggcgtgcccgtgcctggcagcccctttcctctggaagctgtggcccccaccaagcctagcaaggtgaaggcgtttgggccggggctgcagggaggcagtgcgggctcccccgcccgcttcaccatcgacaccaagggcgccggcacaggtggcctgggcctgacggtggagggcccctgtgaggcgcagctcgagtgcttggacaatggggatggcacatgttccgtgtcctacgtgcccaccgagcccggggactacaacatcaacatcctcttcgctgacacccacatccctggctccccattcaaggcccacgtggttccctgctttgacgcatccaaagtcaagtgctcaggccccgggctggagcgggccaccgctggggaggtgggccaattccaagtggactgctcgagcgcgggcagcgcggagctgaccattgagatctgctcggaggcggggcttccggccgaggtgtacatccaggaccacggtgatggcacgcacaccattacctacattcccctctgccccggggcctacaccgtcaccatcaagtacggcggccagcccgtgcccaacttccccagcaagctgcaggtggaacctgcggtggacacttccggtgtccagtgctatgggcctggtattgagggccagggtgtcttccgtgaggccaccactgagttcagtgtggacgcccgggctctgacacagaccggagggccgcacgtcaaggcccgtgtggccaacccctcaggcaacctgacggagacctacgttcaggaccgtggcgatggcatgtacaaagtggagtacacgccttacgaggagggactgcactccgtggacgtgacctatgacggcagtcccgtgcccagcagccccttccaggtgcccgtgaccgagggctgcgacccctcccgggtgcgtgtccacgggccaggcatccaaagtggcaccaccaacaagcccaacaagttcactgtggagaccaggggagctggcacgggcggcctgggcctggctgtagagggcccctccgaggccaagatgtcctgcatggataacaaggacggcagctgctcggtcgagtacatcccttatgaggctggcacctacagcctcaacgtcacctatggtggccatcaagtgccaggcagtcctttcaaggtccctgtgcatgatgtgacagatgcgtccaaggtcaagtgctctgggcccggcctgagcccaggcatggttcgtgccaacctccctcagtccttccaggtggacacaagcaaggctggtgtggccccattgcaggtcaaagtgcaagggcccaaaggcctggtggagccagtggacgtggtagacaacgctgatggcacccagaccgtcaattatgtgcccagccgagaagggccctacagcatctcagtactgtatggagatgaagaggtaccccggagccccttcaaggtcaaggtgctgcctactcatgatgccagcaaggtgaaggccagtggccccgggctcaacaccactggcgtgcctgccagcctgcccgtggagttcaccatcgatgcaaaggacgccggggagggcctgctggctgtccagatcacggatcccgaaggcaagccgaagaagacacacatccaagacaaccatgacggcacgtatacagtggcctacgtgccagacgtgacaggtcgctacaccatcctcatcaagtacggtggtgacgagatccccttctccccgtaccgcgtgcgtgccgtgcccaccggggacgccagcaagtgcactgtcacagtgtcaatcggaggtcacgggctaggtgctggcatcggccccaccattcagattggggaggagacggtgatcactgtggacactaaggcggcaggcaaaggcaaagtgacgtgcaccgtgtgcacgcctgatggctcagaggtggatgtggacgtggtggagaatgaggacggcactttcgacatcttctacacggccccccagccgggcaaatacgtcatctgtgtgcgctttggtggcgagcacgtgcccaacagccccttccaagtgacggctctggctggggaccagccctcggtgcagccccctctacggtctcagcagctggccccacagtacacctacgcccagggcggccagcagacttgggccccggagaggcccctggtgggtgtcaatgggctggatgtgaccagcctgaggccctttgaccttgtcatccccttcaccatcaagaagggcgagatcacaggggaggttcggatgccctcaggcaaggtggcgcagcccaccatcactgacaacaaagacggcaccgtgaccgtgcggtatgcacccagcgaggctggcctgcacgagatggacatccgctatgacaacatgcacatcccaggaagccccttgcagttctatgtggattacgtcaactgtggccatgtcactgcctatgggcctggcctcacccatggagtagtgaacaagcctgccaccttcaccgtcaacaccaaggatgcaggagaggggggcctgtctctggccattgagggcccgtccaaagcagaaatcagctgcactgacaaccaggatgggacatgcagcgtgtcctacctgcctgtgctgccgggggactacagcattctagtcaagtacaatgaacagcacgtcccaggcagccccttcactgctcgggtcacaggtgacgactccatgcgtatgtcccacctaaaggtcggctctgctgccgacatccccatcaacatctcagagacggatctcagcctgctgacggccactgtggtcccgccctcgggccgggaggagccctgtttgctgaagcggctgcgtaatggccacgtggggatttcattcgtgcccaaggagacgggggagcacctggtgcatgtgaagaaaaatggccagcacgtggccagcagccccatcccggtggtgatcagccagtcggaaattggggatgccagtcgtgttcgggtctctggtcagggccttcacgaaggccacacctttgagcctgcagagtttatcattgatacccgcgatgcaggctatggtgggctcagcctgtccattgagggccccagcaaggtggacatcaacacagaggacctggaggacgggacgtgcagggtcacctactgccccacagagccaggcaactacatcatcaacatcaagtttgccgaccagcacgtgcctggcagccccttctctgtgaaggtgacaggcgagggccgggtgaaagagagcatcacccgcaggcgtcgggctccttcagtggccaacgttggtagtcattgtgacctcagcctgaaaatccctgaaattagcatccaggatatgacagcccaggtgaccagcccatcgggcaagacccatgaggccgagatcgtggaaggggagaaccacacctactgcatccgctttgttcccgctgagatgggcacacacacagtcagcgtcaagtacaagggccagcacgtgcctgggagccccttccagttcaccgtggggcccctaggggaagggggagcccacaaggtccgagctgggggccctggcctggagagagctgaagctggagtgccagccgaattcagtatctggacccgggaagctggtgctggaggcctggccattgctgtcgagggccccagcaaggctgagatctcttttgaggaccgcaaggacggctcctgtggtgtggcttatgtggtccaggagccaggtgactacgaagtctcagtcaagttcaacgaggaacacattcccgacagccccttcgtggtgcctgtggcttctccgtctggcgacgcccgccgcctcactgtttctagccttcaggagtcagggctaaaggtcaaccagccagcctcttttgcagtcagcctgaacggggccaagggggcgatcgatgccaaggtgcacagcccctcaggagccctggaggagtgctatgtcacagaaattgaccaagataagtatgctgtgcgcttcatccctcgggagaatggcgtttacctgattgacgtcaagttcaacggtacccacatccctggaagccccttcaagatccgagttggggagcctgggcatggaggggacccaggcttggtgtctgcttacggagcaggtctggaaggcggtgtcacagggaacccagctgagttcgtcgtgaacacgagcaatgcgggagctggtgccctgtcggtgaccattgacggcccctccaaggtgaagatggattgccaggagtgccctgagggctaccgcgtcacctatacccccatggcacctggcagctacctcatctccatcaagtacggcggcccctaccacattgggggcagccccttcaaggccaaagtcacaggcccccgtctcgtcagcaaccacagcctccacgagacatcatcagtgtttgtagactctctgaccaaggccacctgtgccccccagcatggggccccgggtcctgggcctgctgacgccagcaaggtggtggccaagggcctggggctgagcaaggcctacgtaggccagaagagcagcttcacagtagactgcagcaaagcaggcaacaacatgctgctggtgggggttcatggcccaaggaccccctgcgaggagatcctggtgaagcacgtgggcagccggctctacagcgtgtcctacctgctcaaggacaagggggagtacacactggtggtcaaatgggggcacgagcacatcccaggcagcccctaccgcgttgtggtgccctgagtctggggcccgtgccagccggcagcccccaagcctgccccgctacccaagcagccccgccctcttcccctcaaccccggcccaggccgccctggccgcccgcctgtcactgcagctgcccctgccctgtgccgtgctgcgctcacctgcctccccagccagccgctgacctctcggctttcacttgggcagagggagccatttggtggcgctgcttgtcttctttggttctgggaggggtgagggatgggg

SEQ ID NO: 13187 - DNA, 4205 bp, Homo sapiens
gaagcgggctgggaggcgtcggcggcggcagcgcacgtggtgacgtgcgagggggtgcggcgcgagcggtcggcggcggcggaggcagtgtctcccggtcgcgcgtggaggtcggtcgctcagagctgctgggcgcagtttctccgcctgctgcttcggcgcggctgtatcggcgagcgagcgagttcccgcgagttctcggtggcgctcccccttcctttcagtctccacggactggcccctcgtccttctacttgaccgctcccgtcttccgccgccttctggcgctttccgttgggccgattcccgcccgcttcctcctgcttcccatcgaagctctagaaatgaatgtttccatctcttcagagatgaaccagattatgatgcatcattatcacagaagaaattcgtgtctatagcttttaaggacttgattacatcattttcaagcctgatagttttggaatcaccattagagcttaagacacacctgccttcatttcaaccacctgtcttcataccctgacgaagtgcaccttttaacactcctttgtccttggattacttaagagttcccagaaatacatttgccaccaacagagtagccaaatttataaggaaaaatgattcccaatggatatttgatgtttgaggatgaaaattttattgagtcttctgttgccaaattaaatgccctgaggaaaagtggccagttctgtgatgttcgacttcaggtctgtggccatgaaatgttagcacacagagcagtgctagcttgctgcagtccctatttatttgaaatctttaatagtgatagtgatcctcatggaatttctcacgttaaatttgatgatctcaatccagaagctgttgaagtcttgttgaattatgcctacactgctcagttgaaagcagataaggaattggtaaaagatgtttattctgcagcaaaaaagctgaagatggatcgagtaaagcaggtttgtggtgattatttactgtctagaatggatgttaccagctgcatctcttaccgaaattttgcaagttgtatgggagactcccgtttgttgaataaggttgatgcttatattcaggagcatttgttacaaatttctgaagaggaggagtttcttaagcttccaaggctaaagttggaggtaatgcttgaagataatgtttgcttgcccagcaatggcaaattatatacaaaggtaatcaactgggtgcagcgtagcatctgggagaatggagacagtctggaagagctgatggaagaggttcaaaccttgtactactcagctgatcacaagctgcttgatgggaacctactagatggacaggctgaggtgtttggcagtgatgatgaccacattcagtttgtgcagaaaaagccaccacgtgagaatggccataagcagataagtagcagttcaactggatgtctctcttctccaaatgctacagtacaaagccctaagcatgagtggaaaatcgttgcttcagaaaagacttcaaataacacttacttgtgcctggctgtgctggatggtatattctgtgtcatttttcttcatgggagaaacagcccacagagctcaccaacaagtactccaaaactaagtaagagtttaagctttgagatgcaacaagatgagctaatcgaaaagcccatgtctcctatgcagtacgcacgatctggtctgggaacagcagagatgaatggcaaactcatagctgcaggtggctataacagagaggaatgtcttcgaacagtcgaatgctataatccacatacagatcactggtcctttcttgctcccatgagaacaccaagagcccgatttcaaatggctgtactcatgggccagctctatgtggtaggtggatcaaatggccactcagatgacctgagttgtggagagatgtatgattcaaacatagatgactggattcctgttccagaattgagaactaaccgttgtaatgcaggagtgtgtgctctgaatggaaagttatacatcgttggtggctctgatccatatggtcaaaaaggactgaaaaattgtgatgtatttgatcctgtaacaaagttgtggacaagctgtgcccctcttaacattcggagacaccagtctgcagtctgtgagcttggtggttatttgtacataatcggaggtgcagaatcttggaattgtctgaacacagtagaacgatacaatcctgaaaataatacctggactttaattgcacccatgaatgtggctaggcgaggagctggagtggctgttcttaatggaaaactgtttgtatgtggtggctttgatggttctcatgccatcagttgtgtggaaatgtatgatccaactagaaatgaatggaagatgatgggaaatatgacttcaccaaggagcaatgctgggattgcaactgtagggaacaccatttatgcagtgggaggattcgatggcaatgaatttctgaatacggtggaagtctataaccttgagtcaaatgaatggagcccctatacaaagattttccagttttaacaaatttaagaccctctcaaactaacaggcttagtgatgtaattatggttagtagaggtacacttgtgaataaagagggtgggtgggtatagatgttgctaacagcaacacaaagcttttgcatattgcatactattaaacatgctgtacatactttttgggtttatttggaaaggaatgcaaagatgaaggtctgttttgtgtacttttaagactttggttattttactttttggaaaagaataaaccaagaattgattgggcacatcatttcaagaagtcccctctcctccacatttgttttgccaatttgcacattaaatgactcttccctcaaatgtgtactatggggtaaaaggggtagggtttaaagatgtagacagttgggttttttaagggccctttttcaataactggaacactctataacaaaggatacttatttaaatagatgacattgactatttttgtttttattaaaaggaagcttacatgcctaccaatatttaatcttttatgattgcctttttataactttttatattctcagcagagtgctttaccaattgaagtaaaatgtggcaggctggagttattgaagcagagtggcagtcttcagtttgcagagtaggggtctgtcttttaaactctgagtgcaaacttcagagttcttgccttggctgcagtttttttccttcaagaatgcagtactaacatttatttgagtggagttactgaacagtaacatagctgtgatttttggtatttgaaacactggttttaaatattttgacttgttgagggtatgttttatatagcaagacattatatagcagtaaaaaatggtgttttatcttctatataattcctgtttttattattaacaaaacagtcctaaatagcagccctcaattgtgaaaaaatttactttaaactacattaggttgtgaatgcaggttttatcagaactatgtttttgttcagtttatctgttcatatggataaatattggttgggatgacttggtgtctaatgtgtagtgctacacacctaacttatggggccaaaatagcatgtcctaatgcttgctgctgatttaaacacattaaaggtactttgcaggaaatccttgcaccatgggattaatatccaattgctgcttgtacactcattcattactaaaagttttgagaaatttttttttccagtaatgagcttaagaaatttgtggaaaataactcacctggcatcttacatctgaaataaggaatgatataaggtttttttttctcacagaagatgaagcacacaggaacctaatgggccaactgggatgaggtgactattctgagatgactattcagtggctaacttgggttaggaagaaaataattaggtattttctccaaatgttcactggtactctgccactttatttctctcatctgttacacaaagaaccaccaggaaagcaaatcagtttggttggtaactctgtaattcctaactatcactggtttggttctggactaaaactacattgacagattgaatttgcctaatatgatgactgtttttaatatggatctgtatgtgttctattcagcacaaggaaataaaattttagttgaggattcagcactaaaaaaaaaa

SEQ ID NO: 13188 - DNA, 3248 bp, Homo sapiens
accacccctgggttccctcccgggtccgcagtggaaacactgccctctcccttcttgacccctagcccttccttccctccctccttccctcctgtcgccgtctcttctggcgccgctgctcccggaggagctcccggcacggcgatgggttctcgggcctccacgttactgcgggacgaagagctcgaggagatcaagaaggagaccggcttttcccacagtcaaatcactcgcctctacagccggttcaccagcctggacaaaggagagaatgggactctcagccgggaagatttccagaggattccagaacttgccatcaacccactgggggaccggatcatcaatgccttctttccagagggagaggaccaggtaaacttccgtggattcatgcgaactttggctcatttccgccccattgaggataatgaaaagagcaaagatgtgaatggacccgaaccactcaacagccgaagcaacaaactgcactttgcttttcgactatatgatttggataaagatgaaaagatctcccgtgatgagctgttacaggtgctacgcatgatggtcggagtaaatatctcagatgagcagctgggcagcatcgcagacaggaccattcaggaggctgatcaggatggggacagtgccatatctttcacagaatttgttaaggttttggagaaggtggatgtagaacagaaaatgagcatccgatttcttcactaaaggagaccaaactgttccttgcggtctagtatttaagaactggaacttgaaagtcctccttctaccaactccacctccaccccctcattccccttctcccaaagtactactgctgttgcatgacaaccccaaatatgttctgtcaacacaaacctgcctttggtgtataaacagggcattacagaatggtacaccctatatatttctgttcagtatccattcactagttcttcatttataaatatcatcttccccattctgctgctgaatgccacacatccatccagtctgagaaagtgagagaggcaatcatgccaagaacaagccagcaaagctctttcaccagatgtagactgtagccctgctgccttccctccagcgagtctgccagcatgcttcttcatcctttttatatgttctttgcttcctacttccctgtcttccaacatactgttcacttactctggcagtctttctgcttttcattaagcctcaaaatctcctctgttctacttggcaccacaagctatgtcctatatatgtatttctgacttggcaggatagttcaggggtctggcagtttttatttaccttcattattaaatgggcctctgggatgttgcctcttcaggagctttttggtaatcaatacttctctcagaagtatgagaccatcctctgcactctgctctgtcatcaaaggctgctgggtggagataccctttttgaaaggtggccttggtgagaggtatggagccaagtcttctaggttgcttgcccacatcactctatctctggcctctgattctcaactttgtacctgtgtggctcctcttgttagtgcaatgttgactgttgaaaaagcagcagtatgcttacaggtttgcttagtttggggacaccgttaccaccagaatggctgctctgacaatatgcctagggactttctcatggcttttatttaataaggaggctgggcaccctataaagcctcatgcattcacacctttgcagcatggtttatgcctcagtgttatgtgcactggaatgttttccacttcacatttccaagtagaaatattagtgttacggaagtgcctaatatcccagtccaaatttttttttttttttttttttttttttgagacagagtcttgctctgtcacccaggctggagtgcagtggtgcgatcgctcactgcaacctcagcctcctggatttaagtgattctcctgcctcagcctcccaagtagctgggattacaggtgtgcaccaccatgcccggctaattttttgtatttttagtggagacagggtttcaccatgttggccaggctggtctcgaactcctgacctcgtgatccgcctgcctcagcctcccaaagtgctgggattacaggtgtgagccaccacgcctggccccagtccaaaatatttaaagattgtttccttagtgtcttgaagttttgcacaaaattcttttttttgagatggagtctcactctgtcacccaggctggagtgcagtggcgtgatcttggctcactgcaacctctgcctcctgggttcaagcaattctcccacctcagcctcccaagtagctgggattacagacgtgtgccaccatacctgggtaatttttgcatttttagtggagagggagtttcaccatgttggccaggttggtcttgaactcctgacctcaggtgatcctcctgcctcggcctcccaaagtgctgggattacaggcatgagccaccgtgctcagccgcaaaattctttatgaattttacacttggcaaatgttaatgacggaagccatagtctgctcctaatacatgtccaaagcattgactgttgtgtcattagctgcctggttacattagctccctggcttcttgtttagaccactgctaatcccttaaaaacaagaggtctggcactagtagcacaacctaaggtggcattacagatctttgagcgagccacagcaacttttctgccaagtcagcttagtttagacttcagtgaatcaggctattgctatcctaatgtatgtctctatgagtgtatttagccacacatctgcccttggttgactttctgactcattgcttgcttgcttgtttccttgctttggaaaactattgaagattgctaaaaaataccactgcaaagtgatggaaaagggtggagaacaggggagtagccaggctggatggctcaaatataaatgaatgaggaattctttatgaagtatcagtcagattttatgattaagtgatgtaatataggaattatgtaaaagggaagaatgtctgatactgatctattagagaggtactttagaggcttcttgattggcataaagttcctaaggttatagattttccccccttttggctgtatagcaaagtgttttaatccacggttgtgccttattgttccattaaaattgtatcttcgatccatcaataaatacttgtggttgaaacaaaaaaaaaaaaaaaaaaaaaa

SEQ ID NO: 13189 - DNA, 3551 bp, Homo sapiens
gcgcctccgcccctcgctcgctcgctccttcccgccctccccgcagcgccggccgagccggcttcccctcagtctctcatgaatattgagcggcccctgttgtatttcccgagctccattgcggaagctgaggctcgccatattgtgcggcggcgccggcgtccgcggcagctgataccagagtcttgctccggccgcggccagcggagccctgggctggggcaggagccgcaatgtctcaggctgtgcagacaaacggaactcaaccattaagcaaaacatgggaactcagtttatatgagttacaacgaacacctcaggaggcaataacagatggcttagaaattgtggtttcacctcgaagtctacacagtgaattaatgtgcccaatttgtttggatatgttgaagaacaccatgactacaaaggagtgtttacatcgtttttgtgcagactgcatcatcacagcccttagaagtggcaacaaagaatgtcctacctgtcggaaaaaactagtttccaaaagatcactaaggccagacccaaactttgatgcactcatcagcaaaatttatccaagtcgtgatgagtatgaagctcatcaagagagagtattagccaggatcaacaagcacaataatcagcaagcactcagtcacagcattgaggaaggactgaagatacaggccatgaacagactgcagcgaggcaagaaacaacagattgaaaatggtagtggagcagaagataatggtgacagttcacactgcagtaatgcatccacacatagcaatcaggaagcaggccctagtaacaaacggaccaaaacatctgatgattctgggctagagcttgataataacaatgcagcaatggcaattgatccagtaatggatggtgctagtgaaattgaattagtattcaggcctcatcccacacttatggaaaaagatgacagtgcacagacgagatacataaagacttctggtaacgccactgttgatcacttatccaagtatctggctgtgaggttagctttagaagaacttcgaagcaaaggtgaatcaaaccagatgaaccttgatacagccagtgagaagcagtataccatttatatagcaacagccagtggccagttcactgtattaaatggctctttttctttggaattggtcagtgagaaatactggaaagtgaacaaacccatggaactttattacgcacctacaaaggagcacaaatgagcctttaaaaaccaattctgagactgaacttttttatagcctatttctttaatattaaagatgtactggcattacttttatggacagatcttggatatgttgttcaattttctttctgagccagactagtttacgctattcaaatcttttcccctttatttaagatttcctttttggaagggactgcaattattcagtatttttttctttcctttaaaaaaatatatctgaagtttcttgtgtttttttttttccccacaaagtgtgtttccacttggagcaccattttgacccaggaatttttcatagtttctgtattcttataagattcagttggctgtccttttcctgctcccctcaaaagatttttagtcatacagaatgttaaatattatgtattctgactttttttttcccccggagtcttgtatatttatagttttctatataaactgtagtatcttcatgaagacccaaggctcaaatttactgtccttaaaaacaattctcataggattattcttttcatggtattttcttccataatatctcattttaaaaagaagttctttatgaacttagtgtccattgtcatgcaatgtttttttttttccattctttttccctgtaattttggaatttctggtcctgggaagaatcaaacaaaatcttaagttctatgagaacttggttcattgacatattctgctgaagaaagaaaaattaaattggtagtaaaatatagtcttcaagtatacgtttgagagtgcttttttttgtattagttctgctgtcacttcatttcctgtattatatgtgatgtttttccccattaaaataccagagataatggagatattttgcactttagccttgatgaaaagtacaagatatgttcaaagcttccctaatttttttcttatttgtagccacataagtttcaagaataacatggcacacagaacaatggaaaaaagtttgtttccattggaaaattatatcattttgggttgccacatcagtttataaatttggcgctcttttaattacactctgtagaaggttaatagagcttgagccctgctttaatatgtagtgaaagataattctgtagaaaaacgtcagccagtagggtaaagtcattctactgttcttaatttttatattgaggaacaatattgggtgtttgggagccagaaagctttgttgacagatcagaaataagattgacttgggtgttatatttcatctctctccagactctaggtatatttccaactttatatatcacagtatttaaaaagacatgtttgcattgagaaattaaccctaaagggttttcaatagggtgtagacctccagtacctttgtaactaaagtctgtctagtcattgtaaatatttatctgtcagttttgacagattggggccagcttgatgttttaaatcttcagcccggtatgaaaacttaaaggtatatattcaattttttaccattttatggaaaatatttaaaatctgtttttacagggttttttttttttttttttttttgtaatctgtgccatgaaatttgaaaaccaccaaaaatcaagggaacttttatatattcaattccttttctggtgtaatgttaaagttgtatagattattaatgcatgcccactgaatataaccctggttttgtgataaaactgcttagattttgttgatgacattagattagtagttgcattaaataactaaattcccattgtgattaattgaaattttgtctttaagcagagagttatttgtgactataagctttgtgcttagagaatgtatgtgtttttatctgtcagtatgggaggatataaactgcatcattagtgaaattattggttgtgtaatcctttgtgaaatataattctaggtatttgatagggtattgagtgtattttgtgtgtgtgtggatgtgtgttttggggtacggggagaggcgatgctattggccatcactaccaaccagggtttcaaaaagtattacctaagtaatttcttttatcactatctcaactgaggaagaaaaggctcaccacaagtggtgtgaaggctttgggtacttagttctaaatttttttatggtaacatatacatagccacatttacagttttaaccattttaaggcatgtaattcagtggggttaggtacattcacaatgttgtgtaatgatcaccgctgtctacttgtaaaactttttcatcaccccaaacagaaactctgtgtgcaattaaagtaatgcatttctcttcttcttaacccct

SEQ ID NO: 13190 - DNA, 2648 bp, Homo sapiens
ggaactcggctgcggctccatggtctgagttgtcagccgttgttttttcgtgctcgctagtcgccgccgccgctccgccatggggaagcgacagcaccaaaaggacaaaatgtacattacctgtgctgaatacactcacttttatggtggcaagaagccagatctcccacaaacaaattttcgtcgtttaccttttgaccactgcagtctctctctgcagccctttgtctacccagtctgcactcccgatggcatcgtctttgacttactgaacattgttccatggcttaagaagtacgggaccaaccccagcaatggagagaagctggacgggaggtccctgatcaagctgaacttttccaagaacagtgaggggaagtaccactgcccagtgctgtttaccgtgttcaccaacaacacccacatcgtggctgtgaggacgaccggcaacgtctacgcctatgaggcagtggaacagctaaatatcaaggccaagaacttccgggacctgctgaccgacgagcccttctcccggcaggacatcatcaccctccaggaccccaccaatttggacaagttcaatgtctctaacttctatcatgtgaagaataacatgaaaataatagacccagatgaagagaaggccaaacaggacccgtcttattatctgaaaaatacaaatgccgagacccgagagaccctgcaggagctctacaaggagttcaaaggggacgagattctggcagccaccatgaaggccccggagaagaagaaagtggacaagctgaacgctgcccactattccacagggaaggtcagcgcttccttcacctccaccgcgatggtcccggagaccacacatgaagcagctgccatcgacgaggatgtgctgcgctaccagtttgtgaagaagaagggctacgtgcggctgcacaccaacaagggcgacctcaacctggagctgcactgcgacctgacaccaaaaacctgcgaaaacttcatcaggctttgcaagaagcattattacgatggcaccatcttccacagatccatccggaactttgtgatccaagggggcgaccccacaggcacaggcacgggtggggagtcatactgggggaagcccttcaaagacgagttccggcccaacctctcgcacacgggccgcggcatcctcagcatggccaactccgggcccaacagcaacaggtctcaattcttcatcacgtttcgctcctgtgcctacctggacaagaagcataccatctttggacgggttgttgggggctttgacgtactgacagccatggagaatgtggagagtgaccccaaaactgaccgccctaaggaggagatccgcattgatgccactacagtgttcgtggacccctatgaggaggccgatgcccagattgcgcaggagcggaagacacagctcaaggtagccccggagaccaaagtgaagagcagccagccccaggcagggagccagggcccccagaccttccgccagggcgtgggcaagtacatcaacccagcagccaccgagcagcagaggaagagccctcaaccagtgccactgtccccatgtccaagaagaagcccagtcggggttttggggacttcagctcctggtagcagcaggctgcctgatgaccactagaggtatgtctgcccctcgtcaccctgctgcacaccaatctgtggcccttcatcatgctaagaacaagaactgcgccatggctggctccttctcttctccagcccatccctctgcagcctgtcatccctgtctgtgaccattggtcgggcccctgggctctagagtgacttttgacgccctccatccctcccgccaggcactgtcctccgcaaggcctggtgcagccctggcagtaactggcttgtaagaggctcagacaccaagctgggcctgcagaggaggggcacagtaggacacagtgactgcccaggtgtccacacacctgtaggcctctgagccagcgtccagggtacaggtgcgggtggtggggatgaaggcctgaccagggagggagaagcaggtttggagaggaccctgtgcccaccctgacagacaccctggctggccctgactgactgtattctctggccacattcaagtcccccattggtgggggcagagaagtaggaccaggccatccttggctccagagctcgaagaccccaagacagccctctgctctcagcggcgccacagagagcctgggctcagccttctgcatcaggacatggcctcgtccactgagggcacgatttaaacatttgacatcagaagctttatttgtaaacctcacacagataaggaccaagggctggcggtgtggccagaggacaggggaagctgaaggccccgtgcttgagctcggcagtcctgctccttgcagtgaagccaccatgggtgaccgtccagcctcacccggtggcctgcacagtgagggaagggcttcagggccatctgctcccagggcaggggacaggccaccaaggacctttggcaaatgaaggtttacatttctgtagtttgtttgttttagagcttaatttgtagttttttagctattaaaaccatttgaatttttaacgacctgaaaaaaaaaaaaaaaaaa

SEQ ID NO: 13191 - DNA, 2609 bp, Homo sapiens
tccggggcgcgccgcggaacccggaagtggtcacggaactcggctgcggctccatggtctgagttgtcagccgttgttttttcgtgctcgctagtcgccgccgccgctccgccatggggaagcgacagcaccaaaaggacaaaatgtacattacctgtgctgaatacactcacttttatggtggcaagaagccagatctcccacaaacaaattttcgtcgtttaccttttgaccactgcagtctctctctgcagccctttgtctacccagtctgcactcccgatggcatcgtctttgacttactgaacattgttccatggcttaagaagtacgggaccaaccccagcaatggagagaagctggacgggaggtccctgatcaagctgaacttttccaagaacagtgaggggaagtaccactgcccagtgctgtttaccgtgttcaccaacaacacccacatcgtggctgtgaggacgaccggcaacgtctacgcctatgaggcagtggaacagctaaatatcaaggccaagaacttccgggacctgctgaccgacgagcccttctcccggcaggacatcatcaccctccaggaccccaccaatttggacaagttcaatgtctctaacttctatcatgtgaagaataacatgaaaataatagacccagatgaagagaaggccaaacaggacccgtcttattatctgaaaaatacaaatgccgagacccgagagaccctgcaggagctctacaaggagttcaaaggggacgagattctggcagccaccatgaaggccccggagaagaagaaagtggacaagctgaacgctgcccactattccacagggaaggtcagcgcttccttcacctccaccgcgatggtcccggagaccacacatgaagcagctgccatcgacgaggatgtgctgcgctaccagtttgtgaagaagaagggctacgtgcggctgcacaccaacaagggcgacctcaacctggagctgcactgcgacctgacaccaaaaacctgcgaaaacttcatcaggctttgcaagaagcattattacgatggcaccatcttccacagatccatccggaactttgtgatccaagggggcgaccccacaggcacaggcacgggtggggagtcatactgggggaagcccttcaaagacgagttccggcccaacctctcgcacacgggccgcggcatcctcagcatggccaactccgggcccaacagcaacaggtctcaattcttcatcacgtttcgctcctgtgcctacctggacaagaagcataccatctttggacgggttgttgggggctttgacgtactgacagccatggagaatgtggagagtgaccccaaaactgaccgccctaaggaggagatccgcattgatgccactacagtgttcgtggacccctatgaggaggccgatgcccagattgcgcaggagcggaagacacagctcaaggtagccccggagaccaaagtgaagagcagccagccccaggcagggagccagggcccccagaccttccgccagggcgtgggcaagtacatcaacccagcagccacgaagcgagcagcagaggaagagccctcaaccagtgccactgtccccatgtccaagaagaagcccagtcggggttttggggacttcagctcctggtagcagcaggttggccgctgtggaccttggtggggttgcagggctgggggcccatgtccacatctccatttccagcctttctagcctgccctctgctgccagccaataaattgcttgcctgctgcctgcatcccctttcctggcccctgggagcccacagccttcccatcccttaacctgttgccaagggccttggccctgtttccaggacctggcccagccagagcccactgctgggaccttcaagcacaaggcctgccctacacccaggctggtgcctcaggcctcccctctagtaggcaggccaggttagtgaggaaggactgtgtctccagattgtggtttcctctttaagacagggtcttgctctgttgcccaggctccagtgcagtggtgtgatcatggctcactgcagcctcgacctcctgggctcaagcaatcctcctgcctcagcctcgcaagtagctgggactacagccgtgcaccactacatccagctgtatatgtctggttttcttacccctacttctgtcatcttctcagggacagcctatttatacaaccagtgtggtcccctgaccaacgccattacctgggacaagttttcagaccccagacttactgagcctaagcctctgcagggtgggcttctcggtctgttttgacaaaacttcaggggcttctgaaggctggtgttggacggcagcattgagtttcctgccgtgccctgcctgagctctcagggccctgctcacctgctctggctgtgaaccacctgggcttcatctcaagcctgcctggcgtctctgtgcccctgtgagaatcttgaggggacccacactgggttgaggccagtgtctcctgctgtgagaacaagtggatgtccctctccccgccctcctgctgaagtggccttgctgctctcaggcccggcca

SEQ ID NO: 13192 - DNA, 2789 bp, Homo sapiens
gaactcggctgcggctccatggtctgagttgtcagccgttgttttttcgtgctcgctagtcgccgccgccgctccgccatggggaagcgacagcaccaaaaggacaaaatgtacattacctgtgctgaatacactcacttttatggtggcaagaagccagatctcccacaaacaaattttcgtcgtttaccttttgaccactgcagtctctctctgcagccctttgtctacccagtctgcactcccgatggcatcgtctttgacttactgaacattgttccatggcttaagaagtacgggaccaaccccagcaatggagagaagctggacgggaggtccctgatcaagctgaacttttccaagaacagtgaggggaagtaccactgcccagtgctgtttaccgtgttcaccaacaacacccacatcgtggctgtgaggacgaccggcaacgtctacgcctatgaggcagtggaacagctaaatatcaaggccaagaacttccgggacctgctgaccgacgagcccttctcccggcaggacatcatcaccctccaggaccccaccaatttggacaagttcaatgtctctaacttctatcatgtgaagaataacatgaaaataatagacccagatgaagagaaggccaaacaggacccgtcttattatctgaaaaatacaaatgccgagacccgagagaccctgcaggagctctacaaggagttcaaaggggacgagattctggcagccaccatgaaggccccggagaagaagaaagtggacaagctgaacgctgcccactattccacagggaaggtcagcgcttccttcacctccaccgcgatggtcccggagaccacacatgaagcagctgccatcgacgaggatgtgctgcgctaccagtttgtgaagaagaagggctacgtgcggctgcacaccaacaagggcgacctcaacctggagctgcactgcgacctgacaccaaaaacctgcgaaaacttcatcaggctttgcaagaagcattattacgatggcaccatcttccacagatccatccggaactttgtgatccaagggggcgaccccacaggcacaggcacgggtggggagtcatactgggggaagcccttcaaagacgagttccggcccaacctctcgcacacgggccgcggcatcctcagcatggccaactccgggcccaacagcaacaggtctcaattcttcatcacgtttcgctcctgtgcctacctggacaagaagcataccatctttggacgggttgttgggggctttgacgtactgacagccatggagaatgtggagagtgaccccaaaactgaccgccctaaggaggagatccgcattgatgccactacagtgttcgtggacccctatgaggaggccgatgcccagattgcgcaggagcggaagacacagctcaaggtagccccggagaccaaagtgaagagcagccagccccaggcagggagccagggcccccagaccttccgccagggcgtgggcaagtacatcaacccagcagccacgaagcgagcagcagaggaagagccctcaaccagtgccactgtccccatgtccaagaagaagcccagtcggggttttggggacttcagctcctggtagcagcagcaacttgcaggctgtacctctgcccttccttttctcatcaatcactgatgctgaagctgcaggcctgagccctttgtctccctggatgctgggtggcgcctcatctgcatctctgcctcaccccatccactgccacaggctgcctgatgaccactagaggtatgtctgcccctcgtcaccctgctgcacaccaatctgtggcccttcatcatgctaagaacaagaactgcgccatggctggctccttctcttctccagcccatccctctgcagcctgtcatccctgtctgtgaccattggtcgggcccctgggctctagagtgacttttgacgccctccatccctcccgccaggcactgtcctccgcaaggcctggtgcagccctggcagtaactggcttgtaagaggctcagacaccaagctgggcctgcagaggaggggcacagtaggacacagtgactgcccaggtgtccacacacctgtaggcctctgagccagcgtccagggtacaggtgcgggtggtggggatgaaggcctgaccagggagggagaagcaggtttggagaggaccctgtgcccaccctgacagacaccctggctggccctgactgactgtattctctggccacattcaagtcccccattggtgggggcagagaagtaggaccaggccatccttggctccagagctcgaagaccccaagacagccctctgctctcagcggcgccacagagagcctgggctcagccttctgcatcaggacatggcctcgtccactgagggcacgatttaaacatttgacatcagaagctttatttgtaaacctcacacagataaggaccaagggctggcggtgtggccagaggacaggggaagctgaaggccccgtgcttgagctcggcagtcctgctccttgcagtgaagccaccatgggtgaccgtccagcctcacccggtggcctgcacagtgagggaagggcttcagggccatctgctcccagggcaggggacaggccaccaaggacctttggcaaatgaaggtttacatttctgtagtttgtttgttttagagcttaatttgtagttttttagctattaaaaccatttgaatttttaacgacctgaaaaaaaaaaaaaaaaaa

SEQ ID NO: 13193 - DNA, 8662 bp, Homo sapiens
gtgcacgccgcagtgccggggactcggcggggcgccggccggcgggcggagaccgactcgggatctgtccgagcaggaagccagcctcagcccggccgctgtcgccgccctgtcctggtgcccgtccgcgtcgtcgccctcttcactggccctcatcacttctcaccgcgccctccagcttcacccgtacaggtagccccgccgccgcgcacctgccttcgctcccgcaccggtgacagtggatagtggaaacaggagatcgtggatcctccttcaaaaatggaggatggaaagcccgtttgggcgccacaccctacagatggatttcagatgggcaatattgtggatattggccccgacagcttaacaattgaacccttgaatcagaaaggcaagacatttttggctctcataaaccaagtgtttcctgcagaagaggacagtaaaaaagatgtggaagataactgttcactaatgtatttaaatgaagccacactgctccataatatcaaagttcgatatagtaaagacagaatttatacatatgtcgccaacattctgattgcagtgaatccatactttgacatacctaaaatatattcttcagaagcaataaagtcatatcaaggaaaatctcttgggacaagaccacctcatgtctttgcaattgctgataaagcttttcgagacatgaaggtgctcaagatgagtcagtctatcattgtatctggagaatcaggagccggcaaaacagaaaatacaaaatttgttctaagatacctgactgaatcctatggaacaggtcaagatattgatgacagaattgttgaagctaacccactcctagaagcctttggaaatgcgaagactgttcgcaacaataatagcagtcgatttgggaaatttgtagaaatacattttaatgaaaagagctcagttgttggaggatttgtttcacattatctcctagagaaatctaggatctgtgttcaaggcaaagaggaaagaaattatcatatcttttataggttgtgtgctggtgcttctgaagatattagagaaaaacttcatttgagttcaccagataattttcggtatttaaaccgaggctgcactagatactttgctaacaaagaaactgacaaacagattttacagaaccgcaaaagtcctgagtaccttaaggcaggttctatgaaagatcctctgctagatgaccatggtgattttattagaatgtgcacggctatgaaaaaaattggtttggatgatgaagaaaagcttgatctcttccgggtagtagctggcgtcctgcaccttggaaatattgattttgaggaagctggcagcacttcaggtggttgtaatctgaagaataaatctgctcagtctttggaatattgtgctgaattactgggtttggaccaagatgatcttcgagtaagtttgaccacaagagtcatgctaacaacagcagggggcaccaaaggaacagttataaaggtacctctgaaagtggagcaagcaaacaatgctcgtgatgccctggcaaagacagtgtatagccatctttttgatcatgtggtaaacagagtaaatcagtgttttccttttgaaacatcatcctattttattggagtcctagatattgctggttttgagtactttgagcataacagttttgaacaattttgcatcaactattgcaatgaaaaacttcaacaattttttaatgaaaggattctgaaggaggaacaagaactctatcaaaaagaaggtttaggtgttaatgaagtgcattatgtggataatcaggactgtatagatttaattgaagccaaattagtgggaatactggatattttggatgaagaaaatcgccttccccagccaagtgatcaacactttacatctgcagttcaccaaaagcacaaggatcattttcgactcactattcccagaaaatctaagctggcagttcataggaatatcagagacgacgaaggcttcattatcaggcattttgcgggggcagtgtgctatgaaacaacccagtttgtggagaaaaataatgatgctttacatatgtctcttgaatccttaatatgtgaatccagagataagtttatacgggaattatttgaatcatccacaaataacaacaaagatactaaacaaaaagcaggaaaacttagcttcatcagcgtgggaaacaagtttaagacacagttaaatttgcttctggataaacttcgaagtactggagcaagctttattcgttgcatcaaacctaacttaaagatgacaagccaccactttgaaggtgctcaaattctgtctcagcttcagtgttcagggatggtgtctgttttggacttgatgcagggtggttacccatcacgagcttcatttcatgaactctacaacatgtacaaaaagtatatgccagataaacttgcaagattggatccaagactattttgtaaggctttgtttaaagctttgggcttaaatgaaaatgactacaagtttgggttaaccaaagtattttttagacctggcaagtttgcagaatttgatcagatcatgaagtctgaccctgaccacttagcagagttggttaaaagagtcaatcactggctcacatgcagtcgctggaagaaagttcagtggtgctcactctcagtcatcaaattgaaaaacaaaataaaatatcgagctgaagcctgcattaaaatgcaaaaaactattcgaatgtggctttgcaagaggagacacaaacctcgcattgatggtctggttaaggtgggcacactgaaaaaacgacttgataaatttaatgaggtagtcagtgtgttgaaagatggaaaacccgagatgaataaacagatcaagaatctggaaatttctattgatactttgatggccaaaattaagtccactatgatgacgcaggaacaaatccagaaagaatatgatgcactggttaaaagctcagaggaactcctcagtgcattacagaaaaaaaaacagcaggaagaggaagcagaaaggctgaggcgtattcaagaagaaatggaaaaggaaagaaaaagacgtgaagaagacgaaaaacgtcgaagaaaggaagaggaggaaaggcggatgaaacttgagatggaagcaaagagaaaacaagaagaagaagagagaaagaaaagggaagatgatgaaaaacgcattcaagctgaagtggaggcacagctggcccgacagaaggaggaggaatcccaacagcaagcagttctggagcaggagcgcagggaccgggagctggccctgaggattgcccagagtgaagccgagctcatcagtgatgaggcccaggccgacctggcgctgcggagaaatgatggaacaagacccaaaatgacaccggaacaaatggccaaagaaatgtcagaatttttgagtagaggtcctgctgtactagccaccaaagcagctgctggtactaagaaatatgatcttagtaaatggaaatatgcagaactacgtgataccatcaatacttcttgtgatattgagctcctggcagcttgcagagaagaatttcataggagactaaaagtgtatcatgcttggaaatctaagaacaagaagagaaatactgaaacagagcaacgtgctccaaagtctgttactgattatgattttgcaccatttttgaacaattcacctcagcaaaacccagcagctcagattcctgccaggcagcgggagattgaaatgaaccgacagcaacgcttcttccgcatcccattcatccgccctgccgaccagtacaaagaccctcagagtaagaaaaaaggctggtggtatgcccattttgatggaccatggattgcccggcaaatggaactccatcctgacaagccacccatcctacttgtggctggtaaggacgacatggagatgtgtgagctgaatcttgaggagactggcctgactcggaagcgtggtgctgagatcttgccaagacagtttgaagaaatctgggaacgctgtggaggcatccagtaccttcagaatgcgattgagagcagacaggctcggcccacctatgcaacagccatgctgcagagtctgttaaagtagatgttgcacaccagccttacagctgggagcctttgccatggtacttaggtagggtgtgtgcccccagatttaaccattccataatcatgttagagttacttctataaagtgaacagattttattaatcacggcttttggtgaatttgtttaaggttaattatggtagcaaattttggacctaaacattatttttctgtatcccgctgtaattcccaaaactctcattattctctaactattacacatgggcatattctgatgtttctcatcctttgccagaagactaccttacatccatcgtaattgttctctaggaaaagagaacttttttcaaaattcaaaatactttttaaggatggcacagtaccatataactggagtaataaaacatgagcttacattcttacaataactaaaccacttaaaatgatcaaggcactaatgttttggtctgaaaagctgtgtactttatagacattttcagacatttttggaaatttccattaaaggtggaaaatctatttttttcctcctttgcagtgtcttagtttgaatgaaacacttcgaagttctagaattctagaaagagccttaatgtatttgatgtattctgtgataagaggtactaatagtatccagcacagatttgcttttctttgctagcacaatgtgtgttgctgtcagaatattctttttatattctgtggaaaaataaaggaaattcagattgtttaaatgcctaaaagttttgagataagttttgtttcaattagaaaaggaaataggttttaggtggcatagtggcttaactggactgaattcaaatattctttcaacttcatctcaatagtgatttttgtatcagaatcttgtccaagttgtttcattgatttagtaagtgttctgcttccaacatctttctttttaagaaattcctagtgtcttttttggcctttgaggttttggtaattgtagacctgtttcataagctttgtaattcagaaatccttgtatttagtaagtgcttgttttacataactgataattttaaaatgttttctttgtgtgctgttagtattgattcaaatgtcagcagctttaagcctaatatttatgactttcacatttggaatttaaagacaaaaatacatcaaggagttatgctgacataattctaaggagttttgttgtattttagaataaaattataaagtaaaatgattctctgtactgctttttcccccagtttttagagaccctaacctttgaaatgaaattccagtgatttcttttttccctagaaagattacctcagttagggaagtatttcccagctgactagtgtttgtgagccacagacactgtcttcagaattgcttctctcatgtcttagtagagaaatatttatttattatgatacattcaaatgattgtcaagttaaattaaatggttgtgtctgtgctattgagaatgcaaatgtgattatcttttgaaggctgtattactgcatagcttcacccaccctcgggtcatttcgtccctgtgattggggacagaaggtgtagctactgaagtaaatgacctattctctctcttccatctctcgcctttaactggtgtttttatttgtgtaggatagtgaatgataagcttttttcctaaccagtagtgagtaaagttcttgaacaaaatttagtagccaaattgttttttaatgacatgtctctttagtacaatagttttgtgtatcttttagatacattaataggcactagatggaaaattaaagagttaaacatatttaaatgagagaatctaatgtttcagaaatttgtaagaaatgtatcacagcaaagggttgttataagtccttagtttttgactctaatagttaatacaattatagttaatcttaagccataatgtttctaatcatgtcacacagctgtcctagaacttatctatttaaaatagtttcctgagttaattttggccagcagggcaactgccctaattcagatagatttacagtaacctacgtacagtagatgcacatacacacagacacccctttgctggagaaacttaggaccctgtcagccttttaaaggaaacagcaggagtggtgtcctaaatgatgttcatgcagctgctttaccatgttcacagtcaagcccatgcatgccaggttaaaactgtggaaatcaaaagtaaattcactcatattttaatcattttaactgagatttaaaattagaagtttaaaccactatatataaagaactaatcttttcttaataccagttctttccatagcatatgctttgcaaaggcagcatgcataaaatatttaaaatgagaggacagaatgttttcacatttgattcaattttaatataattcctaattgtggtaacacagttgagatatgtattatgagttatgggaactaattgagaaaaggaagttactctaatccacgtatgttaagagaatattgagttttcttagttgtaaagttggggagatggcaccttctcagaggattgtgaaaatatgaggaagaaacaaaacagtgcatgtaggagcacagggccacacaaaggcattctattgttatgctcattctgcttctgtaatgacttttcataggtcattcttgtgaaccattttgttttgcaagcaaccaaggaaagaacatcttaagtggaaaatcagtggtggttgtgaacacttagagaatagcaatccacaggcaagaataatggtattgtttgtagagctttattaattggatattttttaaaagacattttcattcacaggtcattactatggttctcagcgatccaaatatgtagatcattggtttttttttttacctgaagtagcttaagagtacttggatcagtagaataaatatttattgaatcaatcagtcagccaattaatatgatgttagtgatagacctgcctccttttatggaagaggtaacagatccagagaggtcaagtaatttagttgtagactgaaaaatatatcaaagcctttgctgcaatcatatgtaacaaaaagaaccaaaacaaacactttttagtggcacctgtggatttacaaagggttgcctctctgtcattccacaacttcagaaggtgtgacaggttttccctatttatcattaccaataataacaagtattgagagttttaaaatttctcccagaagataaactaacaaggatggaaggggagggcaaaggatatctaaacatgagaataaggacatgttagagggggggaaacagttgtaacaataaggaaagagaagagcaacagtggaagagacaggttgtgtgcccctaaagattctgcacccccagtttggaaacactgatacattttaggacacagagcactcctagatctctacgaaattttagaatgaataatgtgtaatttataggatcagaacgtatggttattaaaacttggatcaagatatgcccggtgtatacattcttagcacataggaatggcactgccatactggagaaggtcagcagtaaataggcattctgtacataagcctcatggaagggtaagatggagagactggcagaagtagcacctactctgctgggagcacttctctgagtacgctttagttcaattcaaatcactgtattctttccccattgctaacctaatatatgaaacaagcttagctgtctcagaagtttttcaagagatgatcaggaaaaattaatgcacattcaaaaggagaatcttcagtacaaatttgtttttttaaaaatagatttagggctgggcgcggtggctcacgcctgtaatcccagcactttgggaggccgaggcgggtggatcacgaggtcaagacttcgagaccagcctggccaacatggtgaaaccctgtctctactaaaaatacaaaacattagccaggcgtggtagtgggtgcctgtaatccctgctacttgggaggctgaggcaggagaatcacttgaacgcgggaggcagaggttgcagggagccgagatggcgccattgcactccatcctgggcaacaagagcgaaattccatctcaaaaaataaaatagatttagggggtacaagtgcagttttgttacatgggtatattgcatagtggtaaaatgtgggcttttagtgtacctaacacccagagaagcatacattgtgcccagtaggtaatttttcatccctaaaccttttctcagcctcccactttctggagtctccaatgtcggttattccactctttatgtccatatctacacattcaatcctaatttgtaccaagtagcatctcacctttaaatcacaggcttattagttgggtgttttctttttacttatgaaaattcatctagtcaaactgtcaattaatttttcctcatttcattaaaagtgtatatctaatgctttctctaaaaattgatgtactggaaatacaaataaataaatgctccctgtgtagaatttc

SEQ ID NO: 13194 - DNA, 1351 bp, Homo sapiens
ccgcttagacaatgccccggagccgccagaccgtcgcgcccctgccccatcgtagtatatgagctcgcctacacaaggacccccgctaaaagccagagctcccagtccccgaggcttgaagacggggactcccttctccaccaactctgtcctcggggggtggggccccagccgagatcacagcgcgacaggagtgggggtggccgctggagacaggtgaagaaacaagaaaactaagaaatccgagcggttggagggggagtctgtgtggatgggatggggacgccgggggaggggctgggccgctgctcccatgccctgatccggggagtcccagagagcctggcgtcgggggaaggtgcgggggctggccttcccgctctggatctggccaaagctcaaagggagcacggggtgctgggaggtaaactgaggcaacgactggggctacagctgctagaactgccacctgaggagtcattgccgctgggaccgctgcttggcgacacggccgtgatccaaggggacacggccctaatcacgcggccctggagccccgctcgtaggccagaggtcgatggagtccgcaaagccctgcaagacctggggctccgaattgtggaaataggagacgagaacgcgacgctggatggcactgacgttctcttcaccggccgggagtttttcgtaggcctctccaaatggaccaatcaccgaggagctgagatcgtggcggacacgttccgggacttcgccgtctccactgtgccagtctcgggtccctcccacctgcgcggtctctgcggcatggggggacctcgcactgttgtggcaggcagcagcgacgctgcccaaaaggctgtccgggcaatggcagtgctgacagatcacccatatgcctccctgaccctcccagatgacgcagctgctgactgcctctttcttcgtcctgggttgcctggtgtgccccctttcctcctgcaccgtggaggtggggatctgcccaacagccaggaggcactgcagaagctctctgatgtcaccctggtacctgtgtcctgctcagaactggagaaggctggcgccgggctcagctccctctgcttggtgctcagcacacgcccccacagctgagggcctggccttggggtactgctggccaggggtaggatagtataggaagtagaaggggaaggagggttagatagagaatgctgaataggcagtagttgggagagagcctcaatattgggggaggggagagtgtagggaaaaggatccactgggtgaatcctccctctcagaaccaataaaatagaattgaccttttaaaaaaaaaaaaaaaaaaaaa

SEQ ID NO: 13195 - DNA, 2388 bp, Homo sapiens
attgggtacatgcgcagtgccgctcgcgcgggccgcgccaatcctgcagcgccttcaacaggtttcgggcggcgaattccagttctccgggttttggggctccctgcgggaggcagtgctggatctgggaatctctaggaaaggaaagagcaaaggaggggaaagatggggggctgcagtctccacgtacgtccctcaaagcgcgtcctaaaacccggataaccggagcgctccccatggaccacacggagggctcgcccgcggaggagccgcctgcgcatgctccatcgcctgggaaatttggtgagcggcctccacctaaacgacttactagggaagctatgcgaaattatttaaaagagcgaggggatcaaacagtacttattcttcatgcaaaagttgcacagaagtcatatggaaatgaaaaaaggtttttttgcccacctccttgtgtatatcttatgggcagtggatggaagaaaaaaaaagaacaaatggaacgcgatggttgttctgaacaagagtctcaaccgtgtgcatttattgggataggaaatagtgaccaagaaatgcagcagctaaacttggaaggaaagaactattgcacagccaaaacattgtatatatctgactcagacaagcgaaagcacttcatgttgtctgtaaagatgttctatggcaacagtgatgacattggtgtgttcctcagcaagcggataaaagtcatctccaaaccttccaaaaagaagcagtcattgaaaaatgctgacttatgcattgcctcaggaacaaaggtggctctgtttaatcgactacgatcccagacagttagtaccagatacttgcatgtagaaggaggtaattttcatgccagttcacagcagtggggagccttttttattcatctcttggatgatgatgaatcagaaggagaagaattcacagtccgagatggctacatccattatggacaaacagtcaaacttgtgtgctcagttactggcatggcactcccaagattgataattaggaaagttgataagcagaccgcattattggatgcagatgatcctgtgtcacaactccataaatgtgcattttaccttaaggatacagaaagaatgtatttgtgcctttctcaagaaagaataattcaatttcaggccactccatgtccaaaagaaccaaataaagagatgataaatgatggcgcttcctggacaatcattagcacagataaggcagagtatacattttatgagggaatgggccctgtccttgccccagtcactcctgtgcctgtggtagagagccttcagttgaatggcggtggggacgtagcaatgcttgaacttacaggacagaatttcactccaaatttacgagtgtggtttggggatgtagaagctgaaactatgtacaggtgtggagagagtatgctctgtgtcgtcccagacatttctgcattccgagaaggttggagatgggtccggcaaccagtccaggttccagtaactttggtccgaaatgatggaatcatttattccaccagccttacctttacctacacaccagaaccagggccgcggccacattgcagtgcagcaggagcaatccttcgagccaattcaagccaggtgccccctaacgaatcaaacacaaacagcgagggaagttacacaaacgccagcacaaattcaaccagtgtcacatcatctacagccacagtggtatcctaactaccgtctttttgctaggacttaaactgacttgagtgtggcaaaaagttaacaaaaaaggagaaaaaatgaacaatcgtttgtggtttcttgggaaaacttttcataccaggtgatactattcaaaaaccccgttgtctccctgcaagtgctgatttgaaatgcagaagccacagtaaaaaaaaaaaaaaaaaaaaaaaaaaagaaaaaaaaatcaaaatgtataaatattggaaatcaagtttttcagctgttttgttggttggttggttggtttttgtttggttttgtttaaatgggcaagaagtaaataatgtggctggaatacaagttgaacaaactagaagacacaaatctaacatagtttttatggaccaaggaacttgtatattgtataagctttagtaaaaggtacattttcaccatacctttttttatatcacggtattatagtacaccttgttaccaaataggttgttctcttccccacccacctttgagcttttgctctaaaatacattcaggttccaagcctgaccatccttgtttaatctatcatactcttccaggttttttttttttggtctaaggctggaacttttttcttttttttcagctgaagtcttatgacttttcatgagtcaaaatt

SEQ ID NO: 13196 - DNA, 2316 bp, Homo sapiens
agggaaggcagcgagcaggatcccctactctgcgggcggcgcgaggcgtctggctcttcgcggcggcggcgaggggaaagggagcgcgggggctgggtggaatcgaggagtgaggaaaaagggaaggggcgggggagagggaccagggaaggcgtcggggggaatctcgcgagggttggagttttggcgagagtttgtggaagatggcgcctgttgtgacagggaaatttggtgagcggcctccacctaaacgacttactagggaagctatgcgaaattatttaaaagagcgaggggatcaaacagtacttattcttcatgcaaaagttgcacagaagtcatatggaaatgaaaaaaggtttttttgcccacctccttgtgtatatcttatgggcagtggatggaagaaaaaaaaagaacaaatggaacgcgatggttgttctgaacaagagtctcaaccgtgtgcatttattgggataggaaatagtgaccaagaaatgcagcagctaaacttggaaggaaagaactattgcacagccaaaacattgtatatatctgactcagacaagcgaaagcacttcatgttgtctgtaaagatgttctatggcaacagtgatgacattggtgtgttcctcagcaagcggataaaagtcatctccaaaccttccaaaaagaagcagtcattgaaaaatgctgacttatgcattgcctcaggaacaaaggtggctctgtttaatcgactacgatcccagacagttagtaccagatacttgcatgtagaaggaggtaattttcatgccagttcacagcagtggggagccttttttattcatctcttggatgatgatgaatcagaaggagaagaattcacagtccgagatggctacatccattatggacaaacagtcaaacttgtgtgctcagttactggcatggcactcccaagattgataattaggaaagttgataagcagaccgcattattggatgcagatgatcctgtgtcacaactccataaatgtgcattttaccttaaggatacagaaagaatgtatttgtgcctttctcaagaaagaataattcaatttcaggccactccatgtccaaaagaaccaaataaagagatgataaatgatggcgcttcctggacaatcattagcacagataaggcagagtatacattttatgagggaatgggccctgtccttgccccagtcactcctgtgcctgtggtagagagccttcagttgaatggcggtggggacgtagcaatgcttgaacttacaggacagaatttcactccaaatttacgagtgtggtttggggatgtagaagctgaaactatgtacaggtgtggagagagtatgctctgtgtcgtcccagacatttctgcattccgagaaggttggagatgggtccggcaaccagtccaggttccagtaactttggtccgaaatgatggaatcatttattccaccagccttacctttacctacacaccagaaccagggccgcggccacattgcagtgcagcaggagcaatccttcgagccaattcaagccaggtgccccctaacgaatcaaacacaaacagcgagggaagttacacaaacgccagcacaaattcaaccagtgtcacatcatctacagccacagtggtatcctaactaccgtctttttgctaggacttaaactgacttgagtgtggcaaaaagttaacaaaaaaggagaaaaaatgaacaatcgtttgtggtttcttgggaaaacttttcataccaggtgatactattcaaaaaccccgttgtctccctgcaagtgctgatttgaaatgcagaagccacagtaaaaaaaaaaaaaaaaaaaaaaaaaaagaaaaaaaaatcaaaatgtataaatattggaaatcaagtttttcagctgttttgttggttggttggttggtttttgtttggttttgtttaaatgggcaagaagtaaataatgtggctggaatacaagttgaacaaactagaagacacaaatctaacatagtttttatggaccaaggaacttgtatattgtataagctttagtaaaaggtacattttcaccatacctttttttatatcacggtattatagtacaccttgttaccaaataggttgttctcttccccacccacctttgagcttttgctctaaaatacattcaggttccaagcctgaccatccttgtttaatctatcatactcttccaggttttttttttttggtctaaggctggaacttttttcttttttttcagctgaagtcttatgacttttcatgagtcaaaatt

SEQ ID NO: 13197 - DNA, 3099 bp, Homo sapiens
tgcgaggcagagtgctagcgggagcgcgagccagcaagaggcgcctgcgcgatgtccgggcccctgagcccgcggcgctgagccagccgggacggacatgcgcgggagggcgccgcggggcagccgccgctcctccgggggaatgaaagctactggttgattttaaagtgcctgggcctcacaggtttggagatgtcccagaataaggcacaatgtcaatagcaggagttgctgctcaggagatcagagtcccattaaaaactggatttctacataatggccgagccatggggaatatgaggaagacctactggagcagtcgcagtgagtttaaaaacaactttttaaatattgacccgataaccatggcctacagtctgaactcttctgctcaggagcgcctaataccacttgggcatgcttccaaatctgctccgatgaatggccactgctttgcagaaaatggtccatctcaaaagtccagcttgccccctcttcttattcccccaagtgaaaacttgggaccacatgaagaggatcaagttgtatgtggttttaagaaactcacagtgaatggggtttgtgcttccacccctccactgacacccataaaaaactccccttcccttttcccctgtgcccctctttgtgaacggggttctaggcctcttccaccgttgccaatctctgaagccctctctctggatgacacagactgtgaggtggaattcctaactagctcagatacagacttccttttagaagactctacactttctgatttcaaatatgatgttcctggcaggcgaagcttccgtgggtgtggacaaatcaactatgcatattttgataccccagctgtttctgcagcagatctcagctatgtgtctgaccaaaatggaggtgtcccagatccaaatcctcctccacctcagacccaccgaagattaagaaggtctcattcgggaccagctggctcctttaacaagccagccataaggatatccaactgttgtatacacagagcttctcctaactccgatgaagacaaacctgaggttccccccagagttcccatacctcctagaccagtaaagccagattatagaagatggtcagcagaagttacttcgagcacctatagtgatgaagacaggcctcccaaagtaccgccaagagaacctttgtcaccgagtaactcgcgcacaccgagtcccaaaagccttccgtcttacctcaatggggtcatgcccccgacacagagctttgcccctgatcccaagtatgtcagcagcaaagcactgcaaagacagaacagcgaaggatctgccagtaaggttccttgcattctgcccattattgaaaatgggaagaaggttagttcaacacattattacctactacctgaacgaccaccatacctggacaaatatgaaaaattttttagggaagcagaagaaacaaatggaggcgcccaaatccagccattacctgctgactgcggtatatcttcagccacagaaaagccagactcaaaaacaaaaatggatctgggtggccacgtgaagcgtaaacatttatcctatgtggtttctccttagaccttggggtcatggttcagcagaggttacataggagcaaatggttctcaattttccagtttgattgaagtgcagagaaaaatcccttagattgcaaaataaaatagttgaactctctgtcttcatgtggaaggtttagagcagttgtgagatgctgttatgctgagaaaccctgactttgttagtgttggaaaaaagtcttacaagtctataatttaaagatgtgatggtggggaggggaggatggggaagctttttatatatgcatacattacatacctatatataaacttgtggtataaccatagaccatagctgcaggttaaccaattagttactatcgtagagtaatatatattcagaataataaactcaagctggagaaatgagtcctgatagactgaaaattgagcaaatggaagaagatacagtattgtttagatcagaatcattaaaaaatatttttgtttagtaagtttgaagatttctggcttttaggccttttctattttgttccatttatttttgcaggcaatcttttccatggagggcagggtatccattctttaccatgggtgtacctgcttaggttaaaaatcataccaaggcctcatacttccaggtttcatgttgcgtcttgttgagggagggagagcaggttacttggcaaccatattgtcacctgtacctgtcacacatcttgaaaaataaaacgataatagaactagtgactaattttcccttacagttcctgcttggtcccacccactgaagtagctcatcgtagtgcgggccgtattagaagcagtggggtacgttagactcagatggaaaagtattctaggtgccagtgttaggatgtcagttttacaaaataatgaagcaattagctatgtgattgagagttattgtttggggatgtgtgttgtggttttgcttttttttttttagactgtattaataaacatacaacacaagctggccttgtgttgctggttcctattcagtatttcctggggattgtttgctttttaagtaaaacacttctgacccatagctcagtatgtctgaattccagaggtcacatcagcatctttctgctttgaaaactctcacagctgtggctgcttcacttagatgcagtgagacacatagttggtgttccgattttcacatccttccatgtatttatcttgaagagataagcacagaagagaaggtgctcactaacagaggtacattactgcaatgttctcttaacagttaaacaagctgtttacagtttaaactgctgaatattatttgagctatttaaagcttattatattttagtatgaactaaatgaaggttaaaacatgcttaagaaaaatgcactgatttctgcattatgtgtacagtattggacaaaggattttattcattttgttgcattattttgaatattgtcttttcattttaataaagttataatacttaaaaaaaaaaaaaaaaaaaaaa

SEQ ID NO: 13198 - DNA, 1577 bp, Homo sapiens
attcggcacaggcgtccgctgcagtccgccggcgagggagttacgcacgtcctgattctcctggagtctccagcccgcccagtggccgcagtcacccaggtccagaggcggcggtatcacaggctctccgacatgtctatgctggctgaacgtcggcggaagcagaagtgggctgtggatcctcagaacactgcctggagtaatgacgattccaagtttggccagcggatgctagagaagatggggtggtctaaaggaaagggtttaggggctcaggagcaaggagccacagatcatattaaagttcaagtgaaaaataaccacctgggactcggagctaccatcaataatgaagacaactggattgcccatcaggatgattttaaccagcttctggccgaactgaacacttgccatgggcaggaaaccacagattcctcggacaagaaggaaaagaaatcttttagccttgaggaaaagtccaaaatctccaaaaaccgtgttcactatatgaaattcacaaaagggaaggatctgtcatctcggagcaaaacagatcttgactgcatttttgggaaaagacagagtaagaagactcccgagggcgatgccagtccctccactccagaggagaacgaaaccacgacaaccagcgccttcaccatccaggagtactttgccaagcggatggcagcactgaagaacaagccccaggttccagttccagggtctgacatttctgtgacgcaggtagaacgtaaaagggggaagaaaagaaataaagaggccacaggtaaagatgtggaaagttacctccagcctaaggccaagaggcacacggagggaaagcccgagagggccgaggcccaggagcgagtggccaagaagaagagcgcgccagcagaagagcagctcagaggcccctgctgggaccagagttccaaggcctctgctcaggatgcaggggaccatgtgcagccgcctgagggccgggacttcaccctgaagcccaaaaagaggagagggaagaaaaagctgcaaaaaccagtagagatagcagaggacgctacactagaagaaacgctagtgaaaaagaagaagaagaaagattccaaatgaatccttcccagccggggccttccgaccactcagctgtcagggcactgcgggggcagacacctctggcctgaagtcacagcagagttcaccccagagcgcctgggcgcatcttgtggcatgcccatgggctgccgagtcctgccctctcgccacatttcccccaagttacattcccaggaggacctttttaatgttctcaatcgtggctctcagacacaaataaatttttttgtaaactctgagcccttcagcaagagagtttaattataatcattacaaatacatgcattcatgtaagtgtgcacacgtgtgtgtgcatgtgcgcatctgtgtgtgtgtgtgtgtgtcactatctccgtttgctctcggttcccttcaataacaatgaatggtgctttcttctgaaagactcagcctaattaaaggatttagaggcaaaaaaaaaaaaaaaaaaaaaa

SEQ ID NO: 13199 - DNA, 5894 bp, Homo sapiens
ctctgcctttcctctcgcagccacccttcctctcagaccagtacggtggccgacgggagtcagacgctggggatgaatgaaggatcaacaaacagtaataatgactgaatgtacaagtcttcagtttgtcagcccttttgcttttgaggcaatgcagaaggtggatgttgtttgcctggcatctttaagtgatccagaattaagacttcttctgccctgtttggtacggatggcactttgtgcacctgctgaccagagccaaagctgggctcaggataagaaactcatccttcgccttctttctggagtggaagctgtcaactccattgttgcattgttgtccgtggactttcatgctttagaacaagatgccagcaaagaacagcagcttaggcataaacttggaggaggcagtggagagagcatcctggtatcacagcttcagcatggactgacgttagagtttgaacacagtgattcacctcgtcgattgcgtcttgtgcttagtgaactgttggcaattatgaacaaggtgtctgagtccaacggagaattttttttcaagtcttctgaactttttgagagtccagtatatttggaggaagctgcagatgtactttgtattttacaagcagagctcccttccttgctccctatagttgatgtagctgaagctttgctacatgttagaaatggtgcctggttcttgtgtctcttggtggccaatgttcctgatagttttaatgaagtttgtaggggcctgataaaaaatggagaacgacaagatgaagaaagtcttggaggaaggcgcaggacagatgccttacgcttcttgtgtaaaatgaatccttctcaggccctcaaggtccgaggcatggtggtggaagaatgtcacttgccaggccttggtgtggctttgacattggatcatactaaaaatgaagcttgtgaggatggagtgagtgacttggtttgttttgtaagtggtttgcttcttggaacaaatgcgaaagtccggacttggtttggaacttttatccgaaatggacagcagagaaaaagagagaccagcagttctgtcctttggcagatgagaaggcagcttcttctggagttgatgggcattcttcccacagtaagaagcacccgaattgtggaagaagctgatgtggatatggagcccaatgtgtctgtgtattcggggctgaaagaagagcatgttgtgaaagccagtgcactcttacgtctgtactgtgctttgatggggatcgctggactcaaaccaactgaagaagaagctgagcaattactgcagttgatgacgagccgtcctcctgctacgccagctggggttcgctttgtttcactttccttttgtatgctactggccttttctacacttgtcagtacacctgaacaggagcagctgatggtggtgtggctaagttggatgataaaagaagaagcgtattttgagagtacttcaggcgtctctgcttcttttggggagatgttattattggtggctatgtactttcacagcaaccagcttagtgctatcattgacttggtctgttccactttggggatgaagattgtaattaagccaagctccttgagcaggatgaagacaatcttcacacaggaaatttttactgagcaggttgtcacagctcatgcagttcgggtccctgtcaccagcaacctgagtgccaacattactggatttttgcctattcattgtatttaccagcttctcaggagccgttcctttaccaagcacaaagtgtcaataaaagattggatttatagacagctgtgtgaaacctctactccacttcatcctcaattacttcctttgattgatgtgtacataaattctatacttactcctgcgtcgaaatctaatccagaagccacaaatcagccagtcacagaacaggagatactcaatattttccaaggagtcattgggggtgacaacatccgccttaatcagcgtttcagtatcacagcacagcttttggtgctctactatatactgtcttatgaagaggctcttctagcaaacacgaagactttagctgccatgcaaagaaagcccaaatcatattcttcttctttaatggatcagattcctatcaaattccttattcgacaggctcaagggctgcagcaggagttgggagggttgcattcagctttactacgtctccttgctactaactacccacatttatgtattgtggatgactggatttgtgaagaagaaatcacagggactgatgccctgctacggcgaatgctcctgactaataatgctaaaaatcattctcccaaacaactccaagaagcattttcagctgtcccagtaaatcacacacaagtgatgcagattatagaacacttgactctactctctgccagtgaacttataccatatgcggaagtgttaacatccaatatgagccagctattgaattcaggggttccacggagaattctgcaaacagtcaataaactatggatggttcttaatactgtgatgcctagaaggctatgggtaatgacggttaatgcacttcagccttcaataaagtttgtacgacaacaaaagtatactcagaatgacctgatgatagatcctctcattgtcctaaggtgtgatcagagggttcacagatgccccccactgatggatattaccctacacatgttgaatggatatcttcttgcatctaaagcctaccttagtgctcatctgaaggaaacagagcaagataggccttcccagaataatacaattggtttagttggacaaactgatgctccggaagttaccagggaagaattgaaaaatgcattactggccgctcaggatagtgcagctgtccagattctcttagagatttgcctacctactgaagaggagaaagcaaatggtgtcaatccagatagcttgttaagaaatgttcaaagtgttattaccaccagcgctccaaataagggaatggaggaaggagaagacaatttgctctgtaaccttcgagaagttcagtgccttatctgttgtctcttgcaccaaatgtacattgcagatcccaacattgctaagcttgttcactttcagggttatccatgtgaacttttgcctctgacggtcgcaggtattccatctatgcacatctgtctagatttcatacctgagcttattgcacagccagaacttgagaaacagatatttgctatccagttgctttctcacttgtgtatacaatatgcattaccaaagtcacttagtgtggctcgtttagctgtcaatgtcatgggaactttgttaacagttttaacacaggctaagcggtatgctttttttatgccaactctgccaagtttggtctctttttgtcgagcatttcctccattgtatgaggatattatgtctttgctgatccaaatagggcaagtttgtgcctctgatgttgccactcagacaagagacattgatccaattattacacgtcttcaacaaataaaggagaaaccaagtggatggtctcaaatctgtaaagattcatcttataaaaatggatccagggacactggaagcatggatcctgatgtacagctctgtcactgtattgaaagaacagtaattgaaataataaatatgagtgttagtggaatttaaaacaaaatttaaaacaacaaaaagttgtttgctgcatatacccaacatgaatctgcatattagtaacaactctaaactgaatgggaacagtaaagtattgtcttggaatcactaaaacaattcaattcaacatgagtatagtttagaactttatgagaattatgcttgcttgtttctgattggcacatctttggatctactttgctgatatgtttctattgtagcagctgagctttttttttttccactgggaacacatgtaagaaactcattattggaaagggaatttggccttgtatttagcttttgaagtgaagactgccatgcctttaatttcttataaaaatgagtctgtgggtagccctagtgtttattttaactgtgagcttgtaacagaatgtgacaaagatgcaaagatgggagaggaaaaaagggtaaagggaaaggagaattaaggaaataataggagttaaaaacacaagtagaaatctcaaagatttgcagtgcaagtaatagtaatgcaagttggaattctagttctcaagaaagagtattgagaagacttttaaaaaggcaagtagcttttgtaaatgatttctgtggaaatacagatgaggatttaaagatttcacatatttgcttcaatttttattaatatatgaagccatatgtttaaagagatacttgaataatttggaattttaagatactggtgtaaaagtgtttacagaaacatctttgttcaaagaagaacctgagagatctcatttagttttatgttttaaatttatttttataatgctttattaacttacctaatgctcagaggggggaaatatgtatcaaattaaatgaaggtagagcaataaaacccactggattaaagagctcttggtttgtcatcaggattataattcatatcttactttgagaagatctttgagtaagaaaatgcagtgtttgaacctgaggaaaagttaaagtgtagaaaatattgtcttgccgaaggattttgcagtcctctgtcagtaacttccattgattaggcagacatattcaggtaaaccctaatcattaaaaaaaaattatcaatgtagaaagtaattcccttttttctctctgagatatacctcaatcacacacttccccacccccacttgaaacagacctcttcacttgtgttttttttttttttttcctgaggtggagtcttcccctgttgcccaggctggagtgcagtgggatgatcttggctcactgcaacttctgccacctgggttcaagggattctcgtgcctcaacctcctgagtagctgggactgcaggcacgcgccacctgtatttttgtatttttagtagagacgggggtttgccatgttgcccagactggttttgaactcctggcctcaggtgatctgcccaccttggcctcccaaagtgctgggattacaggtgtgagccaccgcacctggccagaccgcttcacttgtaaaagaaattaggctaataagaaggtgtagtttttgagaaatgaaatttaactttagccttttcactagtaaatagtcacatctcattttcttcctttgtaaaatggggttactactggccctacctcatattctatgagaatgagtttgtagctgtttcaaatcatgaagtgcatagtatcacatgtgatagaatatttataactttttattagatgcttaatgttcaattaagtaattttgatgtgaaaaataaaagtaataaaagtatcttaaaaatagcataagaattttcatatttttaaacaaggcagttttgtagtcccttaagattaaatacaactgctccttttttttttaaactgaggccttgcgatattttgtgtgaatagatatgccctaggagttcagaaaaagttaaaagtatgttttctaattaaatgcagtgcacattcctggatcaatattcaaagactggtcataacctgctgtgttaaaataatcacatatgctctttttcatcagatttgttgatgatgtaaataaaatgtgtaaatatattagtaaatgttaatattcatgtattttaagttaaggttataaaatttgtcacaatgtgtttttttattcaagtgaaaacagatgtgtgcagctattttgaatattggtttataaacattcatattctttatcaaacaaaaaaaaaaaaaaaa

SEQ ID NO: 13200 - DNA, 3938 bp, Homo sapiens
ttgtcacaccgacctgcaccatctctcgcctgcctgtggggtttctgtcaactagtcgtggagggaaggagactctttaaagaataacatcttattgtggccatgccagaacccactaagaaagaggaaaatgaagtgccagccccagccccacccccggaagaaccaagtaaagagaaggaggccggaactacaccagcaaaagatgaagaggaagtctccccgcctagcgccttgcctccaggtttgggtagtcgggccctggagagaaaagattcagactggacccttgtcgaaactcctcctggggaggaacaagccaagcagaatgccaactcccagctgtccatcttgttcattgaaaaacctcaaggaggaacagtgaaagttggtgaagatatcaccttcatagccaaagtcaaggctgaagatcttctgagaaaacccactatcaaatggttcaaaggaaaatggatggacctggccagcaaagccgggaagcaccttcagctgaaggaaacctttgagaggcacagtcgggtgtacacatttgagatgcagatcatcaaggccaaagataactttgcaggaaattacagatgcgaggtcacctataaggataagtttgacagctgttcatttgatcttgaagtgcacgaatctactgggactactccaaacattgacatcagatctgctttcaagagaagtggagaaggtcaagaggatgcaggagaacttgactttagtggtctcctgaaacgtagggaggtgaagcagcaggaggaagaaccccaggtggacgtatgggagttgctgaagaacgcgaaacccagtgagtacgagaagatcgccttccagtatggaatcaccgacctgcgcggcatgctcaagcgactcaagcgcatgcgcagagaggagaagaagagcgcagcttttgcaaaaattcttgatcctgcatatcaggttgacaaaggaggcagagtgaggtttgttgtggagctggcagatccaaagttggaggtgaaatggtataaaaatggtcaagaaattcgacccagtaccaaatacatctttgaacacaaaggatgccagagaatcctgtttatcaataactgtcagatgacagatgattcagagtattatgtgacagccggtgatgagaaatgttccactgagctcttcgtaagagagcctccaattatggtgaccaaacagctggaagatacaactgcttattgtggggagagagtggaattagaatgtgaggtgtctgaagatgatgccaatgtaaaatggtttaagaatggtgaagagattatccctggtccaaaatcaagataccgaattagagttgagggtaaaaaacacatcttgatcatagagggagcaacaaaggctgatgctgcagaatattcagtaatgacaacaggaggacaatcatctgctaaacttagtgttgacttgaaacctctgaagattttgacacctctgactgatcagactgtaaatcttggaaaagaaatctgcctgaagtgtgaaatctctgaaaacataccaggaaaatggactaaaaatggcctacctgttcaggagagtgaccgtctaaaggtggttcacaagggaaggatccacaagttagtgatagccaatgccctcactgaagatgaaggtgattatgtatttgcacctgatgcctacaatgttactctgcctgccaaagttcatgttattgatcctcctaagatcatcctggatggtcttgatgctgacaacacagtgacagtgattgcaggaaacaagcttcgtcttgagatccccatcagcggagaaccacctcctaaagccatgtggagccggggagataaggctattatggaaggcagtggccggataagaacagaatcttaccctgatagcagcactctggtcattgatatagctgaaagagatgactctggtgtttaccacatcaatctgaaaaacgaagctggagaggcacatgcaagcatcaaggttaaagttgtggacttccctgatcctccagtggcaccgactgtgacagaggtgggagatgactggtgtatcatgaactgggagcctcctgcctacgacggaggctctccaatcctaggatattttattgagaggaagaagaaacaaagctccaggtggatgaggctgaattttgatctctgcaaagaaacaacttttgagcccaagaagatgattgaaggtgtggcctatgaggtccgcatctttgcagtcaatgccattggcatctccaagcccagtatgccctccaggccttttgttcctttggctgtaacaagccctcctactcttctgactgtggactctgtcactgacacgactgtcacgatgaggtggcgccccccagaccacattggtgcagcaggtttagatggctatgtgctagagtattgctttgaaggaactgaggactggatagttgcaaacaaagatctgattgacaagacgaagttcaccatcacaggtctgccaacagatgcaaagatctttgtgcgtgtgaaggctgttaatgcagctggtgccagcgagcccaagtactattctcagcccattctcgtgaaggaaatcatagaacctccaaagattcgcattccaagacacctgaagcaaacctatatccgcagagttggagaagctgtcaatctggttatacctttccagggaaaaccaagaccagaattaacttggaagaaggatggtgcagaaattgataagaatcaaataaacattcgcaactctgagactgatacaatcatatttattagaaaagcagagaggagccactctgggaaatatgatctgcaagtcaaagtggacaaattcgtggagaccgcatcaattgacatccagatcattgaccgtccaggtccaccccaaattgtgaagattgaggatgtctggggagaaaatgtcgctctcacatggactccaccaaaggatgatggaaatgctgctatcacaggctataccattcagaaggctgacaagaagagcatggaatggtttactgtcattgagcattatcatcgaaccagtgccaccattactgaattggtcatagggaatgaatattacttccgggtcttttctgaaaacatgtgtggcctcagtgaggatgccaccatgactaaagagagtgcagtgatcgccagggatggtaaaatctacaaaaatccagtgtatgaagactttgatttctcagaggcacccatgtttactcagcctttggttaacacctatgccatagctggttacaatgccaccctaaactgcagtgtgagaggaaatcctaagcctaaaataacctggatgaaaaacaaagttgctattgtggatgatccaagatacaggatgttcagcaaccagggagtctgtaccctggaaattcgcaagcccagcccctatgatggaggcacttactgctgcaaagcagtcaatgaccttgggacagtggagattgaatgcaaactggaggtgaaagtgatatatcaaggagtaaatacccctggacaaccagtcttcctggaggggcagcaacagtcattgcacaataaggatttttgaatgtataatatcatctaaggtgggctctccttctgcagactcctcttgcaaggcgtacctccaaacataattgattcgtatctgcgagacttacactcaagcaatcctgaggaatactgagggagggcctggctactgtctctctgcactctgctgctttgaaatctggttgaaatgagaaaaagcattttctgttttcccaccaggcccccaagtgtggtctttttctttcctcctaatgttgaagagaaaaaaaaaaaaaaaagtttgcccagattgcttaattaaaaattgcaaacaaaatctcatttgaagtcaaa

SEQ ID NO: 13201 - DNA, 3624 bp, Homo sapiens
atatacaggaggagataaaaaatttagtcaaattacagactagtagtgcttccttagcttcctgtgaaggaaattcttcaaacaaacaagtatcttcggaaagtcaaatgggttttttttctctaagcagtgagagaaatgaatctgttatccattatcctgaatccacagaacctgaaatacagcaagaaatgtccacgtcacaaccagactgcaatgtggatagttgctcagtaagcagtggatatggcaccttttgtatctcagaattaaatctgtacaaatctaaagaccctaaggagttcatggagcacatagatgttcccaaaggacagtatgtagcacctgcggtgccggctgagtcacttgtagatggtgtgaaaaatgagaatttttatatacagactcctgaagagtgtcatgtgtctttaaaggaagatgtatccatttctcctggtgaatttgaacataattttcttggtgaaaataaggtttctgaagtatacagtgggaaaacaaatagtaatgctataacatcatgggcacaaaaactgaagcagaaccaaccaaagagagcacatgtagaagatggaggttcaagatctaaacaaggaaatgagcaaagtaagaagacaccaattgagaaatctgattttgctgctgctacacatcctcgtgctttttacctcagtaaaccagatgaaactccaaatgcttggatgtctgattcaggaacaggattgacttactggaaactagaggaaaaggatatgcaccactctttgcctgaaactttagagaagacgttcatatcattgtcttccacagatgtgtcaccaaaccagtctaatactagtaatgagatgaagctaccgtcactgaaggatatttattataaaaaacaaagggaaaacaagcagttacctgagaggaatctcacttctgcttccaacccaaatcatccaccagaggtcctgactctagatcctacgttacacatgaagccaaagcagcagatttcagggattcaacctcacggccttccgaatgcccttgatgacagaatatccttttccccggactctgttctagagcctagtatgtctagtccctctgacatagactcattttcacaagcaagtaatgtcacttctcagttacctggatttccaaaatatccctcacacacaaaagcttctccggtggactcttggaaaaatcagacattccaaaacgaaagtaggaccagttccacgtttccgtcagtatataccattactagtaatgatatctcggtcaacactgtagatgaagaaaacactgtcatggttgcttcggcctcagtcagtcagtcccagcttccaggtacagccaacagtgtcccagaatgcatttcattgacttccttggaagatcctgtgatattgtctaagattaggcagaatctgaaggaaaagcatgctcgacacatagcagatcttcgagcttattatgaatcagaaataaatagtttgaaacagaagctggaggcaaaagaaatctctggagttgaagattggaagataaccaatcaaattcttgtagacagatgtggccaattagatagtgctttgcatgaagctactagtcgcgtgagaacacttgaaaataagaataacttactggaaattgaagtgaatgatttgagagaacgcttcagtgcagccagcagtgcttccaaaattttgcaggaacgaattgaagaaatgagaacaagcagtaaagaaaaagacaataccatcattcgactaaaatctagactgcaagatttagaagaagcatttgagaatgcttacaaactctcagatgataaagaagctcaactaaaacaagagaacaaaatgtttcaagatcttttaggagagtatgagtcccttggaaaagaacacaggagagtaaaggatgcattaaatacaactgagaacaaattgcttgatgcatatactcagatttctgatttgaaaagaatgatttcaaaacttgaagctcaggtcaagcaagtagaacatgaaaatatgttaagccttcgtcataattctagaattcacgtgagaccctcgcgtgccaacacactagcaacttcagacgtcagcaggcggaaatggctgattccaggtgcagagtattccatctttactggccagcctctggacacccaggacagtaacgtggataaccagctggaggaaacctgtagcctagggcaccgttcacctctggaaaaggattcttcacctggaagttcatcaacaagcttgttgataaaaaagcaaagagagacttcagacacgccgatcatgagagctttaaaagaacttgatgagggaaaaatatttaaaaattgggggacacagacagagaaagaggacacctcaaatataaatcctcggcaaactgaaacttcagttaatgcaagtcgttctccagaaaagtgtgcccaacagagacaaaagagacttaattcggcctcacagagatcatcatctttaccaccttcaaatcgtaaatcaagtactccaacaaaaagagagattatgctaacaccagtgactgtggcttatagtccaaagcgatcccctaaagaaaacttgtccccaggatttagtcatctgcttagcaaaaatgagagcagtccaattcgatttgatatacttttggatgatttagatactgttcctgtgtctacattacaacgtaccaatccaagaaagcaactccagtttcttcctctagatgactcggaagaaaaaacttattctgagaaagccaccgataaccatgttaatcatagctcttgccctgaaccggtgccaaatggagtgaagaaagtatctgtgagaacagcctgggagaagaataaatcagttagctacgaacagtgtaagccggtttcagtcactccacaggggaatgattttgaatatacagcaaaaattcggaccctagctgaaacagaacgattttttgatgaacttacaaaagaaaaggaccagattgaggcagcactaagcaggatgccttctcctggaggacgaatcactttacagacaagattaaatcaggaagccttggaagatcgtttggaaaggattaatcgagaactgggttcagttcgcatgacgctaaagaaattccatgttttgcgcacctctgcaaatctttgagatttgtagccattaaattttgagacatttttgtttgcactaatgtataattatgcagtcagaaaaggcaaactattttgtactgtttataagccttcaaacagtagttttacaatcatgctattcttacacttgctattttatacttcaaatggccacatattttcaagatatttttgttatgctcaggaatctcttgtatattttactatttaaaaagcattatttttaaatagtatctgtctccaatttatatcaagaataaggaaatataaacagaggaagcagcttgtttctaaacaaatagtgttatccttttacaattaactgcacatcaattttatagacttgttctacattgtaaatacaattcagtttttaaaaaataaagcttaatagcttccataaaaaaaaaaaaaaa

SEQ ID NO: 13202 - DNA, 2674 bp, Homo sapiens
acgctgcgggcgacattgtttgggacgctgggttctgcttttccagaatcctgccctttccaaaaggaagacggtatgattaagttccaggaaagggtgacattcaaggatgtggctgttgtcttcaccaaggaagagctggcactattggataaagcccagataaacctgtaccaagatgtgatgctggaaaacttcaggaacctcatgttagtgagagacgggattaaaaacaacattttgaatcttcaggcaaaggggttaagttacctttcgcaagaagtgcttcattgctggcagatttggaaacaaaggatccgggatttaactgtgagtcaggattatatcgtgaaccttcaagaagagtgttccccacatttagaagatgtttccctcagtgaagagtgggcaggcatttctcttcagatttctgaaaatgaaaactatgtagtaaatgccattatcaaaaatcaagatatcacagcatggcaaagcctgacacaggttcttaccccagaatcgtggaggaaagccaacataatgaccgagccccagaactctcagggaagatataagggaatttacatggaagagaaattgtacagacgtgctcagcatgatgacagcctcagttggacctcatgtgatcatcatgagtcccaagaatgtaaaggagaggaccctggtagacatcccagctgtgggaaaaacttgggtatgaaatcaacggttgaaaaacgtaatgcggcccatgtattaccacagcctttcccatgtaataactgtggggtggcctttgcagatgatacagatcctcatgtccatcacagcactcacctaggagaaaaatcttataaatgtgaccagtatggaaagaactttagtcagagccaagatcttatcgttcattgtaaaactcactctggcaagactccctatgaattccacgaatggcctatgggctgcaaacagagctcagaccttcccagatatcagaaagtctcctcaggagacaaaccctacaaatgtaaagaatgtggcaagggcttcaggcgcagctcttcccttcacaaccatcatcgagtccacacaggggagatgccctacaaatgcgatgaatgtgggaaagggtttggatttaggtcacttctttgtattcatcagggagtacacacagggaaaaagccctataaatgtgaagagtgtgggaagggctttgatcagagctccaaccttcttgtccatcagagagtccacactggagagaagccctacaaatgcagtgagtgtggcaagtgctttagttcaagctccgttcttcaagtccactggaggtttcacacaggggagaaaccatataggtgtggtgagtgtggaaagggcttcagccaatgtacacaccttcacattcaccagagagtccacacaggggagaaaccatacaaatgcaatgtgtgtggaaaggattttgcgtatagctctgttcttcacactcatcagagagttcacactggagaaaaaccatataaatgtgaagtgtgtggaaagtgcttcagttacagttcatattttcacttacatcaaagagatcacatcagagagaaaccatataaatgtgatgagtgtggtaaaggcttcagccggaattcagatcttaatgttcacctcagagtccacacaagagagaggccctataagtgtaaggcatgtggtaagggcttcagtcgtaattcatacctccttgcccatcagagagtgcatatagatgagacacagtacacacactgtgagcgtggaaaggaccttctgactcatcaaagactacatgagcagagagaaacattataaatgtagtaagtcagggttcaattagtaaaacagaagccacactgtattccagatgatagaggcttactcagcctgtgggagggctaggggagcaaaagacagggacactgccatcgataatgtcagcctgcagcactgaagtgtgccaggcaaggactgtggatttcaagaacttctgtgaagctcccatcaactgctgtatgctacaatggcaaagaggttacttttgacaaatgggtggtttgtggtagtggttgtagttagtggtcaaatttccattaaagggtgtgtccaggaaggaaattctaattgggatgatcatggtaaggtcttcagttcagccaacgtctttagatttttttttagtccccagtagaaaaatactctctgtatgaagaacattcaaaagtgtgctcaaaaatgaaacccatgctcttactatgaaagaacgttagtacccaggttttccatgagattctctacacaggcaagaagctccatagaagtggcatttgaagggtgtggcagaggcagtgctgtgtttatcacactggttccatttccttgcaaataagaagtctatttcccagtaacccttgcagttaagagtgtgcccatgtgattgagttctagccaatggagtgtgagcaaaagtgatataagccactttcaggtctagcctttacaaacatcctcaggcttctctatccctgccaaggtgaccttggaggctgcttattccagactgggttgatagaaggtcactacttcatctgtgttggatttctttttagagtaagaaataaaagttcattgtgtctcacca

SEQ ID NO: 13203 - DNA, 2729 bp, Homo sapiens
gtaggtgccgcaaggagccggcgagcggagcgcccgctcgggaccgcagccgccgggcgacgtcgccgccgcaccgggcacttctgtctccccggagcagctcctccagctcagtctccagctccacctccggctcccgctgggcctcccgctcgccctccgcgcccggctccccgcgcgcccgtcccgagtccgctgctcgccggcggccgcccggtcatgtcaggatggagatccggcagcacgagtggctctcggcctccccccatgagggcttcgagcagatgaggctcaaaagccgccccaaggagccctccccaagcctgacccgagtgggcgcgaacttctacagcagcgtcaagcagcaggactacagcgccagcgtctggcttcggaggaaagacaagctggagcactcccagcagaagtgcatcgtgatctttgccctggtgtgctgctttgccattctggttgcactgatcttttcagccgtggacatcatgggagaggatgaggatggactctcagaaaaaaattgccaaaataaatgtcggtaagagaattgccctggtggaaaatattcctgaaggccttaactattcagaaaatgcaccatttcacttatcacttttccaaggctggatgaatttactcaacatggccaaaaagtctgttgacatagtgtcttcccattgggatctcaaccacactcatccatcagcatgtcagggtcaacgtctttttgaaaagttgctccagctgacttcgcaaaatattgaaatcaagctagtgagtgatgtaacagctgattcaaaggtattagaagccttgaaattaaagggagccgaggtgacgtacatgaacatgaccgcttacaacaagggccggctgcagtcctccttctggatcgtggacaaacagcacgtgtatatcggcagtgccggtttggactggcaatccctgggacagatgaaagaactcggtgtcatcttctacaactgcagctgcctggtcctagatttacaaaggatatttgctctatatagttcattaaaattcaaaagcagagtgcctcaaacctggtccaaaagactctatggagtctatgacaatgaaaagaaattgcaacttcagttgaatgaaaccaaatctcaagcatttgtatcgaattctccaaaactcttttgccctaaaaacagaagttttgacatagatgccatctacagtgtgatagatgatgccaagcagtatgtgtacatcgctgtcatggactacctgcctatctccagcacaagcaccaaaaggacttactggccagacttggatgcaaaaataagagaagcattagttttacgaagcgttagagttcgactccttttaagcttctggaaggaaactgatccccttacgtttaactttatttcatctcttaaagcgatttgcactgaaatagccaactgcagtttgaaagttaaattttttgatctggaaagagagaatgcttgtgctacaaaagaacaaaagaatcacacctttcctaggttaaatcgcaacaagtacatggtgacagatggagcagcttatattggaaattttgattgggtagggaatgatttcactcagaatgctggcacgggccttgttatcaaccaggcagatgtgaggaacaacagaagcatcattaagcaacttaaagatgtgtttgaaagggactggtattcaccgtatgccaaaaccttacagccaaccaaacagccgaactgctcaagcctgttcaaactcaaacccctctccaacaaaactgccacagacgacacaggcggaaaggatccccggaacgtataacatgatgaagaaactgacaggacagctctgtatttcatatttatacataaaggacttgaggagagaaaaaacactttaatatgtctctttttttagggaaaaagcacacttataaaaaatattctctgaacaacacataatacctatctaacaatatcttagcgtcgtgtacactaaaattaagacttttgtatttgttacctctgacagagaatgtcattctggcgtagaagttagtttttacgtttgcatacaaattttaagactttcattcctgctcctttctagttttagaactttttctgctgacctacccggtcagttgttaggaagcttagcatgaggtgggctctttaacaccattctgagaactgttgatttagagaggaaggtgaggattttgccttggagaagagactgataaaaccaagtgtttattcttgtaaatcgtctccaagacctacacagtcagctaagcatgaatagcttacatctcatgccagccttcaacacccttgaaaaatatccttttctgtcttgctcattttcttcttataccataagttttatttggtatcattttctcttctcacaaaatgttcctattatatagcattttctgtattcacctcaacattacttctaactatgataacatcttttgaaaacatacaaatttttcagaatggatactaagtggaaatagcagtctttcattttcacctttcaactgaatccttttttcccctaccgaattggtatttaaaaaaaatcacagtcagcaatatgtatcctttctctcaagctcagaaaaattatgtagccacctgctaatatccagcaagctatcaagtctgcattttgggaataaagtagtttttcac

SEQ ID NO: 13204 - DNA, 5583 bp, Homo sapiens
ataatctatcccagatcctttcccagagagaaacttggcgatcacgttttcacatgatgctcacgctcagggcgcttcaattatccctccccacaaagataggtggcgcgtgtttcagggtctctcgtctctctcctacagaaaagaaaaagaaaaaaatgtcattagaagaggcgtaacacgtcagtccgtccccaggtttgtgtttcctggagtggccgaaagagatcagttctaacctgctctgcaggaataacggtcctgcctcccgacactcttggcgaggtttttgtacagtttgctccgggagctgtttcttcgcttccacctttttctcccccacacttcgcggcttcttcatgctttttcttctcaccatttctggccaaaactacaaacaagacttcgcagatcgagcctgcgtgctgccgaagcagggcgccgagtccatgcgaactgccatctgatccgctcttatcaatgaagcagccgatcatggcggatggcccccggtgcaagaggcgcaaacaagccaatcccaggaggaaaaacgtggtgaactatgacaatgtagtggacacaggttctgaaacagatgaggaagacaagcttcatattgctgaggatgacggtattgccaaccctctggaccaggagacgagtccagctagtgtgcccaaccatgagtcctccccacacgtgagccaagctctgttgccaagagaggaagaggaagatgaaataagggagggtggagtggaacacccctggcacaacaacgagattctacaagcctctgtagatggtccagaagaaatgaaggaagactatgacactatggggccagaagccacgatccagaccgcaattaacaatggtacagtgaagaatgcaaattgcacatcagattttgaggaatactttgccaaaagaaaactggaggaacgcgatggtcatgcagtcagcatcgaggagtaccttcagcgcagtgacacagccattatttacccagaagcccctgaggagctgtctcgccttggcacgccagaggccaatgggcaagaagaaaatgacctgccacctggaactccagatgcttttgcccaactgctgacctgcccctactgcgaccggggctacaagcgcttgacatcactgaaggagcacatcaagtaccgccacgagaagaatgaagagaacttttcctgccctctctgtagctacacgtttgcctaccgcacccagctcgagcggcatatggtgacacacaagccagggacagatcagcaccaaatgctaacccaaggagcaggtaatcgcaagttcaaatgcacagagtgtggcaaggccttcaaatataaacaccatctgaaagaacacctgcgaattcacagtggtgaaaaaccttacgagtgcccaaactgcaagaaacgtttctcccattctggttcctacagttcgcacatcagcagcaagaaatgtattggtttaatctctgtaaatggccgaatgagaaacaatatcaagacgggttcttcccctaattctgtttcttcttctcctactaattcagccattacccagttaagaaacaagttggagaatggaaaaccacttagtatgtctgaacagacaggcttacttaaaattaaaacagaaccactagacttcaatgactataaagttcttatggctacacacgggtttagtggcactagtccctttatgaatggtgggcttggagccaccagccctttaggagttcatccatctgctcagagtccaatgcagcacttaggtgtagggatggaagcccctttacttgggtttcccaccatgaatagtaatttaagtgaggtacaaaaggttctacagattgtggacaatactgtttccaggcaaaaaatggactgcaaggctgaagaaatttcaaagttgaaaggttatcacatgaaggatccatgctctcaacctgaggaacaaggagttacttctcctaatattccgcctgtcggtcttccggtagtgagtcataatggtgccactaaaagtattattgactatacgttggaaaaagtcaatgaagccaaagcttgcctccagagcttgactactgactcaaggagacagatcagtaatataaagaaagagaagctacgtactttaatagatttggtcactgatgacaaaatgattgagaaccacaacatatccactccattttcatgccagttctgtaaagaaagttttcctggccccatccctttgcatcagcatgaacgttacctttgtaagatgaatgaagagatcaaggcggtcctgcagcctcatgaaaacatagtccccaacaaagccggagtttttgttgataataaagccctcctcttgtcatctgtactttctgagaaaggaatgacaagccccatcaacccatacaaggaccacatgtctgtactcaaagcatactatgctatgaacatggagcccaactccgatgaactgctgaaaatttccattgctgtgggccttcctcaggaatttgtgaaggaatggtttgaacaacgaaaagtctaccagtactcaaattccaggtccccatccctggaaagaagctccaagccgttagctcccaacagtaaccctcccacaaaagactctttattacccaggtctcctgtaaaacctatggactccataacatcaccatctatagcagaactccacaacagtgttacgaattgtgatcctcctctcaggctaacaaaaccttcccattttaccaatattaaaccagttgaaaaattggaccactccaggagtaatactccttctcccttaaatctttcctccacatcttctaaaaactcccacagtagttcatacactccaaacagcttctcttctgaggagctccaggctgagcctttagacttgtcattaccaaaacaaatgaaagaacccaaaagtattatagccacaaagaacaaaacaaaagctagtagcatcagtttagatcataacagtgtttcttcctcatctgaaaactcagatgagcctctgaacttgacttttatcaagaaggaattttcaaattcaaataatctggacaacaaaagcactaacccagtgttcagcatgaacccatttagtgccaaacctttatacacagctcttccacctcaaagcgcatttccccctgctactttcatgccaccagtccagaccagtattcctgggctacgaccatacccaggactggatcagatgagcttcctaccacatatggcctacacctacccaactggagcagctacttttgctgatatgcagcaaaggagaaagtaccagcggaaacaaggatttcagggagaattgcttgatggagcacaagactacatgtcaggcctagatgatatgacagactccgactcctgtctgtctcgcaaaaagatcaagaagacagagagtggcatgtatgcatgtgacttatgtgacaagacattccagaaaagcagttcccttctgcgacataaatacgaacacacaggaaaaagaccacatcagtgtcagatttgtaagaaagcgtttaaacacaagcaccaccttatcgagcactcaaggcttcactcgggcgagaagccctatcagtgtgataaatgtggcaagcgcttctcacactcgggctcgtactcgcagcacatgaatcacaggtattcctactgcaagcgggaggcggaggagcgggaagcggcggagcgcgaggcgcgcgagaaagggcacttggaacccaccgagctgctgatgaaccgggcttacttgcagagcattacccctcaggggtactctgactcggaggagagggagagtatgccgagggatggcgagagcgagaaggagcacgagaaagaaggcgaggatggctacgggaagctgggcagacaggatggcgacgaggagttcgaggaggaagaggaagaaagtgaaaataaaagtatggatacggatcccgaaacgatacgagatgaagaagagactggagatcactccatggacgatagttcggaggatgggaaaatggaaaccaaatcagaccacgaggaagacaatatggaagatggcatgtaataaactactgcattttaagcttcctatttttttttccagtagtattgttacctgcttgaaaacactgctgtgttaagctgttcatgcacgtgcctgacgcttccaggaagctgtagagagggacagaaggggcggttcagccaagacagatgtagacggagttggagctgggtattgttaaaaactgcattatgcaaaaattttgtacagtgttaaggcctaaaaactgtgtggttcagagactaattcctgtgtttaatagcatttatactttaagcacaactagaaaattgtaagaattgcactctacttatgtatcactacaaactttaaaaaactatgtctaatttatattaatacattttaaaaaggtgcccgcactaccatacatcagtatttttattattattattgttattcctttttaatttaatgtgctcgcactacaatgcatcagtattatgattcctctgtactttcctttcgctattcatcaatttcccattttttttttcagcttaagtaaccacacaattttaggcctcaatttttttttttttctgtgaaggaacttgaagtgatgcatgtgtgaatttaagataccgaagtcttaaagtgacctggacgtgaaggaaaaagtaagatgagaaataaagaaagcctttgtaaggtggttttaaaagccttatatgcaaaccttttaatctgtgtttctgcaagtgccatccttgtacagtgttaagagggtaacatgggttacctttgcaccagcttcagtgttaagctcaccctgttctttgaagcacccatgtcagtattagaagaataggcagcagttccttagtttacatatgtttgtgcaattattttctgtacttttttgttcattaattttgtcagtattacaccaaactgtttttgcaacaaaaaaattttttttgcattcatttaattttaggtcaaataacattttatttatgtggctcattttatatttcctaattttatttatttcatactgtagtgtacagtattatagttcttcaatatatagatatattttagtaaaaaaggaacatgacgttgatcatttgggcaaattttacgtaaagagaagagcatttattgtgttttggaacattaattgtgagatgggatttttcaattttattattttatttttgtttttttccaattactggaaattccaaatttgggaacttttgatacgatcttgtgaaaacactgtattttcgactgaaaattccactttcttcatcttgttttttagctaaaaagagggactgttaaatacaatgtatgataccatgacaaaaatctttcctgaattgtctttgtaaaagtattattgaattttcaatttgtaatttcttttgaaaatgaccatgctcgaataaaaatgtagccaaactaaaaaaaaaaaaaaaaaaaaaaaaa

SEQ ID NO: 13205 - DNA, 7171 bp, Homo sapiens
cgggcatgctcagtgggccgggccggcaggtttgcgtggccgctgagttgccggcgccggctgagccagcggacgccgcgttccttggcggccgccggttcccgggaagttacgtggcgaagccggcttccgaggagacgccgggaggccacgggtgctgctgacgggcgggcgaccgggcgaggccgacgtggccgggctgcgaaagctgcgggaggccgagtgggtggccgcgctcggagggaggtgccggtcgggcgcgccccgtggagaagacccgggcggggcgggcgcttcccggacttttgtccgagttgaattccctccccctgggccgggcccttccggccgcccccgcccgtgccccgctcgctctcgggagatgtttatttgggctgtggcgtgaggagcgggcgggccagcgccgcggagtttcgggtccgaggagcctcgcgcggcgctggagagagacaagatgtccgccagagctgcggccgccaagagcacagcaatggaggaaacagctatatgggaacaacatacagtgacgcttcacagggctcctggatttggatttggaattgcaatatctggtggacgagataatcctcattttcagagtggggaaacgtcaatagtgatttcagatgtgctgaaaggaggaccagctgaaggacagctacaggaaaatgaccgagttgcaatggttaacggagtttcaatggataatgttgaacatgcttttgctgttcagcaactaaggaaaagtgggaaaaatgcaaaaattacaattagaaggaagaagaaagttcaaataccagtaagtcgtcctgatcctgaaccagtatctgataatgaagaagatagttatgatgaggaaatacatgatccaagaagtggccggagtggtgtggttaacagaaggagtgagaagatttggccgagggatagaagtgcaagtagagagaggagcttgtccccgcggtcagacaggcggtcagtggcttccagccagcctgctaaacctactaaagtcacactggtgaaatcccggaaaaatgaagaatatggtcttcgattggcaagccatatatttgttaaggaaatttcacaagatagtttggcagcaagagatggcaatattcaagaaggtgatgttgtattgaagataaatggtactgtgacagaaaatatgtcattgacagatgcaaagacattgatagaaaggtctaaaggcaaattaaaaatggtagttcaaagagatgaacgggctacgctattgaatgtccctgatctttctgacagcatccactctgctaatgcctctgagagagacgacatttcagaaattcagtcactggcatcagatcattctggtcgatcacacgataggcctccccgccgcagccggtcacgatctcctgaccagcggtcagagccttctgatcattccaggcactcgccgcagcagccaagcaatggcagtctccggagtagagatgaagagagaatttctaaacctggggctgtctcaactcctgtaaagcatgctgatgatcacacacctaaaacagtggaagaagttacagttgaaagaaatgagaaacaaacaccttctcttccagaaccaaagcctgtgtatgcccaagttggcaaccagatgtggatttacctgtcagtccatctgatggtgtcctacctaattcaactcatgaagatgggatttcttcggcccagcatgaaattggtaaaattcagaaaaggagatagtgtgggtttgcggctggctggtggaaatgatgttggaatatttgtagctggcgttctagaagatagccctgcagccaaggaaggcttagaggaaggtgatcaaattctcagggtaaacaacgtagattttacaaatatcataagagaagaagccgtccttttcctgcttgacctccctaaaggagaagaagtgaccatattggctcagaagaagaaggatgtttatcgtcgcattgtagaatcagatgtaggagattctttctatattagaacccattttgaatatgaaaaggaatctccctatggacttagttttaacaaaggagaggtgttccgtgttgtggataccttgtacaatggaaaactgggctcttggcttgctattcgaattggtaaaaatcataaggaggtagaacgaggcatcatccctaataagaacagagctgagcagctagccagtgtacagtatacacttccaaaaacagcaggcggagaccgtgctgacttctggagattcagaggtcttcgcagctccaagagaaatcttcgaaaaagcagagaggatttgtccgctcagcctgttcaaacaaagtttccagcttatgaaagagtggttcttcgagaagctggatttctgaggcctgtaaccatttttggaccaatagctgatgttgccagagaaaagctggcaagagaagaaccagatatttatcaaattgcaaagagtgaaccacgagacgctggaactgaccaacgtagctctggcattattcgcctgcatacaataaagcaaatcatagatcaagacaaacatgctttattagatgtaacaccaaatgcagttgatcgtcttaactatgcccagtggtatccaattgttgtatttcttaaccctgattctaagcaaggagtaaaaacaatgagaatgaggttatgtccagaatctcggaaaagtgccaggaagttatacgagcgatctcataaacttcgtaaaaataatcaccatctttttacaactacaattaacttaaattcaatgaatgatggttggtatggtgcgctgaaagaagcaattcaacaacagcaaaaccagctggtatgggtttccgagggaaaggcggatggtgctacaagtgatgaccttgatttgcatgatgatcgtctgtcctacctgtcagctccaggtagtgaatactcaatgtatagcacggacagtagacacacttctgactatgaagacacagacacagaaggcggggcctacactgatcaagaactagatgaaactcttaatgatgaggttgggactccaccggagtctgccattacacggtcctctgagcctgtaagagaggactcctctggaatgcatcatgaaaaccaaacatatcctccttactcaccacaagcgcagccacaaccaattcatagaatagactcccctggatttaagccagcctctcaacagaaagcagaagcttcatctccagtcccttacctttcgcctgaaacaaacccagcatcatcaacctctgctgttaatcataatgtaaatttaactaatgtcagactggaggagcccaccccagctccttccacctcttactcaccacaagctgattctttaagaacaccaagtactgaggcagctcacataatgctaagagatcaagaaccatcattgtcgtcgcatgtagatccaacaaaggtgtatagaaaggatccatatcccgaggaaatgatgaggcagaaccatgttttgaaacagccagccgttagtcacccagggcacaggccagacaaagagcctaatctgacctatgaaccccaactcccatacgtagagaaacaagccagcagagacctcgagcagcccacatacagatacgagtcctcaagctatacggaccagttttctcgaaactatgaacatcgtctgcgatacgaagatcgcgtccccatgtatgaagaacagtggtcatattatgatgacaaacagccctacccatctcggccaccttttgataatcagcactctcaagaccttgactccagacagcatcccgaagagtcctcagaacgagggtactttccacgttttgaagagccagcccctctgtcttacgacagcagaccacgttacgaacaggcacctagagcatccgccctgcggcacgaagagcagccagctcctgggtatgacacacatggtagactcagaccggaagcccagccccacccttcagcagggcccaagcctgcagagtccaagcagtattttgagcaatattcacgcagttacgagcaagtaccaccccaaggatttacctctagagcaggtcattttgagcctctccatggtgctgcagctgtccctccgctgataccttcatctcagcataagccagaagctctgccttcaaacaccaaaccactgcctccacccccaactcaaaccgaagaagaggaagatccagcaatgaagccacagtctgtactcaccagagttaagatgtttgaaaacaaaagatctgcatccttagagaccaagaaggatgtaaatgacactggcagttttaagcctccagaagtagcatctaaaccttcaggtgctcccatcattggtcccaaacccacttctcagaatcaattcagtgaacatgacaaaactctgtacaggatcccagaacctcaaaaacctcaactgaagccacctgaagatattgttcggtccaatcattatgaccctgaagaagatgaagaatattatcgaaaacagctgtcatactttgaccgaagaagttttgagaataagcctcctgcacacattgccgccagccatctctccgagcctgcaaagccagctcattctcagaatcaatcaaatttttctagttattcttcaaagggaaagcctcctgaagctgatggtgtggatagatcatttggcgagaaacgctatgaacccatccaggccactccccctcctcctccattgccctcgcagtatgcccagccatctcagcctgtcaccagcgcgtctctccacatacattctaagggagcacatggtgaaggtaattcagtgtcattggattttcagaattccttagtgtccaaaccagacccacctccatctcagaataagccagcaactttcagaccaccaaaccgagaagatactgctcaggcagctttctatccccagaaaagttttccagataaagccccagttaatggaactgaacagactcagaaaacagtcactccagcatacaatcgattcacaccaaaaccatatacaagttctgcccgaccatttgaacgcaagtttgaaagtcctaaattcaatcacaatcttctgccaagtgaaactgcacataaacctgacttgtcttcaaaaactcccacttctccaaaaactcttgtgaaatcgcacagtttggcacagcctcctgagtttgacagtggagttgaaactttctctatccatgcagagaagcctaaatatcaaataaataatatcagcacagtgcctaaagctattcctgtgagtccttcagctgtggaagaggatgaagatgaagatggtcatactgtggtggccacagcccgaggcatatttaacagcaatgggggcgtgctgagttccatagaaactggtgttagtataattatccctcaaggagccattcccgaaggagttgagcaggaaatctatttcaaggtctgccgggacaacagcatccttccacctttagataaagagaaaggtgaaacactgctgagtcctttggtgatgtgtggtccccatggcctcaagttcctgaagcctgtggagctgcgcttaccacactgtgatcctaaaacctggcaaaacaagtgtcttcccggagatccaaattatctcgttggagcaaactgtgtttctgtccttattgaccacttttaactcttgaaatataggaacttaaataatgtgaaactggattaaacttaatctaaatggaaccactctatcaagtattataccttttttagagttgatactacagtttgttagtatgaggcatttgtttgaactgataaagatgagtgagcatgcccctgaaccatggtcggaaaacatgctacacactgcatgtttgtgattgacgggactgttggtattggctagaggttcaaagatattttgctttgtgatttttgtaatttttttatcgtcactgcttaacttcacatattgatttccgttaaaataccagccagtaaatgggggtgcatttgaggtctgttctttccaaagtacactgtttcaaactttactatggccctggcctagcatacgtacacattttattttattatgcatgaagtaatatgcacacattttttaaatgcacctggaatatataaccagtgttgtggatttaacagaaatgtacagcaaggagatttacaactgggggagggtgaagtgaagacaatgacttactgtacatgaaaacacatttttcttagggaaggatacaaaagcatgtgagactggttccatggcctcttcagatctctaacttcaccatattaccacagacatactaaccagcagaaatgccttaccctcatgttcttaattcttagctcattctccttgtgttactaagtttttatggcttttgtgcattatctagatactgtatcatgacaaagactgagtacgttgtgcatttggtggtttcagaaatgtgttatcacccagaagaaaatagtggtgtgatttggggatatttttttcttttcttttcttttctttttttttttttttgacaaggggcagtggtggttttctgttctttctggctatgcatttgaaaattttgatgttttaaggatgcttgtacataatgcgtgcataccacttttgttcttggtttgtaaattaacttttataaactttaccttttttatacataaacaagaccacgtttctaaaggctacctttgtattctctcctgtacctcttgagccttgaactttgacctctgcagcaataaagcagcgtttctatgacacatgcaaggtcattttttttaagaaaaaggatgcacagagttgttacatttttaagtgctgcatttaaaagatacagttactcagaattctctagtttgattaaattcttgcaaagtatccctactgtaatttgtgatacaatgctgtgccctaaagtgtatttttttactaatagacaatttattatggcacatcagcacgatttctgtttagataatacaccactacattctgttaatcattaggtgtgactgaatttcttttgccgttattaaaaatctcaaatttctaaatctccaaaataaaactttttaaaataaaaaaaaa

SEQ ID NO: 13206 - DNA, 6931 bp, Homo sapiens
cgggcatgctcagtgggccgggccggcaggtttgcgtggccgctgagttgccggcgccggctgagccagcggacgccgcgttccttggcggccgccggttcccgggaagttacgtggcgaagccggcttccgaggagacgccgggaggccacgggtgctgctgacgggcgggcgaccgggcgaggccgacgtggccgggctgcgaaagctgcgggaggccgagtgggtggccgcgctcggagggaggtgccggtcgggcgcgccccgtggagaagacccgggcggggcgggcgcttcccggacttttgtccgagttgaattccctccccctgggccgggcccttccggccgcccccgcccgtgccccgctcgctctcgggagatgtttatttgggctgtggcgtgaggagcgggcgggccagcgccgcggagtttcgggtccgaggagcctcgcgcggcgctggagagagacaagatgtccgccagagctgcggccgccaagagcacagcaatggaggaaacagctatatgggaacaacatacagtgacgcttcacagggctcctggatttggatttggaattgcaatatctggtggacgagataatcctcattttcagagtggggaaacgtcaatagtgatttcagatgtgctgaaaggaggaccagctgaaggacagctacaggaaaatgaccgagttgcaatggttaacggagtttcaatggataatgttgaacatgcttttgctgttcagcaactaaggaaaagtgggaaaaatgcaaaaattacaattagaaggaagaagaaagttcaaataccagtaagtcgtcctgatcctgaaccagtatctgataatgaagaagatagttatgatgaggaaatacatgatccaagaagtggccggagtggtgtggttaacagaaggagtgagaagatttggccgagggatagaagtgcaagtagagagaggagcttgtccccgcggtcagacaggcggtcagtggcttccagccagcctgctaaacctactaaagtcacactggtgaaatcccggaaaaatgaagaatatggtcttcgattggcaagccatatatttgttaaggaaatttcacaagatagtttggcagcaagagatggcaatattcaagaaggtgatgttgtattgaagataaatggtactgtgacagaaaatatgtcattgacagatgcaaagacattgatagaaaggtctaaaggcaaattaaaaatggtagttcaaagagatgaacgggctacgctattgaatgtccctgatctttctgacagcatccactctgctaatgcctctgagagagacgacatttcagaaattcagtcactggcatcagatcattctggtcgatcacacgataggcctccccgccgcagccggtcacgatctcctgaccagcggtcagagccttctgatcattccaggcactcgccgcagcagccaagcaatggcagtctccggagtagagatgaagagagaatttctaaacctggggctgtctcaactcctgtaaagcatgctgatgatcacacacctaaaacagtggaagaagttacagttgaaagaaatgagaaacaaacaccttctcttccagaaccaaagcctgtgtatgcccaagttggcaaccagatgtggatttacctgtcagtccatctgatggtgtcctacctaattcaactcatgaagatgggatttcttcggcccagcatgaaattggtaaaattcagaaaaggagatagtgtgggtttgcggctggctggtggaaatgatgttggaatatttgtagctggcgttctagaagatagccctgcagccaaggaaggcttagaggaaggtgatcaaattctcagggtaaacaacgtagattttacaaatatcataagagaagaagccgtccttttcctgcttgacctccctaaaggagaagaagtgaccatattggctcagaagaagaaggatgtttatcgtcgcattgtagaatcagatgtaggagattctttctatattagaacccattttgaatatgaaaaggaatctccctatggacttagttttaacaaaggagaggtgttccgtgttgtggataccttgtacaatggaaaactgggctcttggcttgctattcgaattggtaaaaatcataaggaggtagaacgaggcatcatccctaataagaacagagctgagcagctagccagtgtacagtatacacttccaaaaacagcaggcggagaccgtgctgacttctggagattcagaggtcttcgcagctccaagagaaatcttcgaaaaagcagagaggatttgtccgctcagcctgttcaaacaaagtttccagcttatgaaagagtggttcttcgagaagctggatttctgaggcctgtaaccatttttggaccaatagctgatgttgccagagaaaagctggcaagagaagaaccagatatttatcaaattgcaaagagtgaaccacgagacgctggaactgaccaacgtagctctggcattattcgcctgcatacaataaagcaaatcatagatcaagacaaacatgctttattagatgtaacaccaaatgcagttgatcgtcttaactatgcccagtggtatccaattgttgtatttcttaaccctgattctaagcaaggagtaaaaacaatgagaatgaggttatgtccagaatctcggaaaagtgccaggaagttatacgagcgatctcataaacttcgtaaaaataatcaccatctttttacaactacaattaacttaaattcaatgaatgatggttggtatggtgcgctgaaagaagcaattcaacaacagcaaaaccagctggtatgggtttccgagggaaaggcggatggtgctacaagtgatgaccttgatttgcatgatgatcgtctgtcctacctgtcagctccaggtagtgaatactcaatgtatagcacggacagtagacacacttctgactatgaagacacagacacagaaggcggggcctacactgatcaagaactagatgaaactcttaatgatgaggttgggactccaccggagtctgccattacacggtcctctgagcctgtaagagaggactcctctggaatgcatcatgaaaaccaaacatatcctccttactcaccacaagcgcagccacaaccaattcatagaatagactcccctggatttaagccagcctctcaacaggtgtatagaaaggatccatatcccgaggaaatgatgaggcagaaccatgttttgaaacagccagccgttagtcacccagggcacaggccagacaaagagcctaatctgacctatgaaccccaactcccatacgtagagaaacaagccagcagagacctcgagcagcccacatacagatacgagtcctcaagctatacggaccagttttctcgaaactatgaacatcgtctgcgatacgaagatcgcgtccccatgtatgaagaacagtggtcatattatgatgacaaacagccctacccatctcggccaccttttgataatcagcactctcaagaccttgactccagacagcatcccgaagagtcctcagaacgagggtactttccacgttttgaagagccagcccctctgtcttacgacagcagaccacgttacgaacaggcacctagagcatccgccctgcggcacgaagagcagccagctcctgggtatgacacacatggtagactcagaccggaagcccagccccacccttcagcagggcccaagcctgcagagtccaagcagtattttgagcaatattcacgcagttacgagcaagtaccaccccaaggatttacctctagagcaggtcattttgagcctctccatggtgctgcagctgtccctccgctgataccttcatctcagcataagccagaagctctgccttcaaacaccaaaccactgcctccacccccaactcaaaccgaagaagaggaagatccagcaatgaagccacagtctgtactcaccagagttaagatgtttgaaaacaaaagatctgcatccttagagaccaagaaggatgtaaatgacactggcagttttaagcctccagaagtagcatctaaaccttcaggtgctcccatcattggtcccaaacccacttctcagaatcaattcagtgaacatgacaaaactctgtacaggatcccagaacctcaaaaacctcaactgaagccacctgaagatattgttcggtccaatcattatgaccctgaagaagatgaagaatattatcgaaaacagctgtcatactttgaccgaagaagttttgagaataagcctcctgcacacattgccgccagccatctctccgagcctgcaaagccagctcattctcagaatcaatcaaatttttctagttattcttcaaagggaaagcctcctgaagctgatggtgtggatagatcatttggcgagaaacgctatgaacccatccaggccactccccctcctcctccattgccctcgcagtatgcccagccatctcagcctgtcaccagcgcgtctctccacatacattctaagggagcacatggtgaaggtaattcagtgtcattggattttcagaattccttagtgtccaaaccagacccacctccatctcagaataagccagcaactttcagaccaccaaaccgagaagatactgctcaggcagctttctatccccagaaaagttttccagataaagccccagttaatggaactgaacagactcagaaaacagtcactccagcatacaatcgattcacaccaaaaccatatacaagttctgcccgaccatttgaacgcaagtttgaaagtcctaaattcaatcacaatcttctgccaagtgaaactgcacataaacctgacttgtcttcaaaaactcccacttctccaaaaactcttgtgaaatcgcacagtttggcacagcctcctgagtttgacagtggagttgaaactttctctatccatgcagagaagcctaaatatcaaataaataatatcagcacagtgcctaaagctattcctgtgagtccttcagctgtggaagaggatgaagatgaagatggtcatactgtggtggccacagcccgaggcatatttaacagcaatgggggcgtgctgagttccatagaaactggtgttagtataattatccctcaaggagccattcccgaaggagttgagcaggaaatctatttcaaggtctgccgggacaacagcatccttccacctttagataaagagaaaggtgaaacactgctgagtcctttggtgatgtgtggtccccatggcctcaagttcctgaagcctgtggagctgcgcttaccacactgtgatcctaaaacctggcaaaacaagtgtcttcccggagatccaaattatctcgttggagcaaactgtgtttctgtccttattgaccacttttaactcttgaaatataggaacttaaataatgtgaaactggattaaacttaatctaaatggaaccactctatcaagtattataccttttttagagttgatactacagtttgttagtatgaggcatttgtttgaactgataaagatgagtgagcatgcccctgaaccatggtcggaaaacatgctacacactgcatgtttgtgattgacgggactgttggtattggctagaggttcaaagatattttgctttgtgatttttgtaatttttttatcgtcactgcttaacttcacatattgatttccgttaaaataccagccagtaaatgggggtgcatttgaggtctgttctttccaaagtacactgtttcaaactttactatggccctggcctagcatacgtacacattttattttattatgcatgaagtaatatgcacacattttttaaatgcacctggaatatataaccagtgttgtggatttaacagaaatgtacagcaaggagatttacaactgggggagggtgaagtgaagacaatgacttactgtacatgaaaacacatttttcttagggaaggatacaaaagcatgtgagactggttccatggcctcttcagatctctaacttcaccatattaccacagacatactaaccagcagaaatgccttaccctcatgttcttaattcttagctcattctccttgtgttactaagtttttatggcttttgtgcattatctagatactgtatcatgacaaagactgagtacgttgtgcatttggtggtttcagaaatgtgttatcacccagaagaaaatagtggtgtgatttggggatatttttttcttttcttttcttttctttttttttttttttgacaaggggcagtggtggttttctgttctttctggctatgcatttgaaaattttgatgttttaaggatgcttgtacataatgcgtgcataccacttttgttcttggtttgtaaattaacttttataaactttaccttttttatacataaacaagaccacgtttctaaaggctacctttgtattctctcctgtacctcttgagccttgaactttgacctctgcagcaataaagcagcgtttctatgacacatgcaaggtcattttttttaagaaaaaggatgcacagagttgttacatttttaagtgctgcatttaaaagatacagttactcagaattctctagtttgattaaattcttgcaaagtatccctactgtaatttgtgatacaatgctgtgccctaaagtgtatttttttactaatagacaatttattatggcacatcagcacgatttctgtttagataatacaccactacattctgttaatcattaggtgtgactgaatttcttttgccgttattaaaaatctcaaatttctaaatctccaaaataaaactttttaaaataaaaaaaaa

SEQ ID NO: 13207 - DNA, 1893 bp, Homo sapiens
attagacagcacactgctgactgttttcagttgtttctgtaacagcagaaagtgcactcactaggagtagtcagaattcaaaatgctcaagagaaagccatccaatgtttcagagaaggagaaacatcaaaaaccaaagcgaagcagcagttttgggaatttcgatcgttttcggaataattctttatcaaaaccagatgattcaactgaggcacatgaaggagatcccacaaatggaagtggagaacaaagtaaaacttcaaataatggaggcggtttgggtaaaaaaatgagagctatttcatggacaatgaagaaaaaagtgggtaaaaagtacatcaaagccctttctgaggaaaaggatgaggaagatggagagaatgcccacccatatagaaacagtgaccctgtgattgggacccacacagagaaggtgtccctcaaagccagtgactccatggatagtctctacagtggacagagctcatcaagtggcataacaagctgttcagatggtacaagtaaccgggacagctttcgactggatgacgatggcccctattcaggaccattctgtggccgtgccagagtgcatacggatttcacgccaagtccctatgacactgactccctcaaaatcaagaaaggagacatcatagacattatttgcaaaacaccaatggggatgtggacaggaatgttgaacaataaagtgggaaacttcaaattcatttatgtggatgtcatctcagaagaggaagcagcccccaagaaaataaaggcaaaccgaaggagtaacagcaaaaaatccaagactctgcaggagttcctagagaggattcatctgcaggaatacacctcaacacttttgctcaatggttatgagactctagaagatttaaaagatataaaagagagtcacctcattgaattaaatattgaaaacccagatgacagaagaaggttactatcagctgctgaaaacttccttgaagaagaaattattcaagagcaagaaaatgaacctgagcccctatccttgagctcagacatctccttaaataagtcacagttagatgactgcccaagggactctggttgctatatctcatcaggaaattcagataatggcaaagaggatctggagtctgaaaatctgtctgacatggtacataagattattatcacagagccaagtgactgaacacgcattcccaactatatatctacagatgcattccattttaactcttcttgagctaaaacgtcaaataggagaggaagataagataaatatttgtaaataaaacctaaagtttaaatgttttaatctgaataattgtacataaaattttgtatctctaacattccaaattactgtcaataaaatatatatttattattttaaatgctatgtgttaatatttcacttgcttgtattagaaaggcaaaatgtaagactttggtatgtgtgacatatgctttatttggctttattttacaagtacagtatctgcaaaaaacaaagtaaccttttttcatacctgccagttttgaatttatatatgttattgaacaaatagtaatagaggattcgctgttgaaacaagttgtccaagcaatgttatattcatttttatacttattgggaaagtgtgagttaatattggacacattttatcctgatccacagtggagttttagtaattatattttgttgatttcttcattttgttttctggtataaaagtagagataatgtgtagtcacttctgatttagtgaaaccaattgtaataattgtggaaatgttttgtctttaagtgtaaatattttaaaatttgacataccctaatgttaataataaaaagaactatttgcatattgcaaaaaa

SEQ ID NO: 13208 - DNA, 5281 bp, Homo sapiens
gggacccagaacctcggacgagcggcgggcacccgcgagcggacggcggccgcgtagtgagcaatggcctgagcccccatggctgcccctcaggacctggacatcgctgtgtggctggccacggtgcacctggagcagtatgcagacacgttccgacggcatggcctggctacagcaggtgcagcccggggcctgggccacgaggagttgaagcagttgggcatcagcgccacagggcaccggaaacgcattctacgcctgctacagacaggcaccgaagagggctccctggatcccaaatcagatagtgccatggaaccatcccccagcccagccccgcaagcccagccccctaagcccgtgccgaagcccaggaccgtgtttggtggactcagtggccctgccaccactcagagacctgggctgagcccagccctcgggggaccaggagtgtccaggagcccagagcccagcccaaggcctcctcctctccccacttcctcctctgagcagtcttcagccctaaatactgtggagatgatgcctaattccatctacttcggcctggactcaagaggcagggcacaggcagctcaggacaaggccccagacagctcccaaatctctgcccccacccctgccctcaggcccacaacaggcacagtgcacatcatggatcctggttgcctgtactatggtgtccaacctgtggggactccaggagcccccgacagaagagagagcagaggtgtttgtcagggcagggctgaacacaggctcagcagacaggatctggaggcacgggaggatgctggctatgccagccttgagctacctggagactccaccctcttatcgcccaccctggaaacagaggagaccagtgatgacctcatttcaccctatgccagcttctccttcacggcagaccgcctcacgcccctgctcagtggctggctagacaagctctcccctcagggaaactatgtcttccagagacgctttgtgcagttcaatgggaggagtctgatgtactttggcagtgacaaggaccccttccctaagggtgtgatacctttgactgccattgagatgacccgcagcagcaaggacaacaagttccaggtcatcaccggccagagggtgttcgtgttccgcacagagagcgaggctcagcgggacatgtggtgctccacgctgcagtcctgtctgaaggagcagcgcctcctgggccacccccggcccccccaaccaccccgacccctccgcacgggcatgctggagctgcgtggacacaaggccaaggtgtttgctgccttgagccctggagagctggcactgtacaagagtgagcaggccttctctctgggcatcgggatctgcttcatcgaactgcagggctgcagcgtccgggagaccaagagtcgaagctttgacctgctcacaccccatcgctgcttcagcttcacagccgagtctgggggtgctcggcagagctgggcggccgctctgcaggaagcagtaaccgagaccctgtctgactacgaggtggctgagaagatctggtctaatcgggccaaccggcagtgtgcggactgtgggtcctcccgcccagattgggctgctgtcaatttgggggtggtcatctgcaagcagtgtgcaggtcagcaccgggccctgggttctgggatctccaaggtgcagagcctgaagctggacacgagtgtctggagtaatgagatagtacagttattcattgtcctgggaaatgatcgtgccaaccgcttctgggcagggaccctacccccaggtgagggactacatccagatgcgacccctggcccccggggagagttcatctcccgaaagtaccgtctgggtctcttccggaagccccaccctcagtacccagatcatagccagcttctccaggcactgtgtgcagctgtggcaagacccaacctgctgaagaacatgacccagctcctctgtgttgaggcctttgaaggcgaggagccctggttccccccagcccctgatggcagctgccctggcctcttgccctcagacccctcccctggtgtgtacaatgaggtggtggtgcgtgctacttacagcggcttcctgtactgcagtcccgtcagcaacaaagctggaccctcaccccctcgcaggggccgggatgctcccccgcgcctttggtgtgtgctgggagcagctctggaaatgtttgcatcggaaaacagccctgaacccctcagcctcatacagccccaggatattgtatgtctgggtgtgagccccccacccactgacccaggtgacaggttccccttttcctttgagctcatcctcgctggggggaggatccagcattttggcacagatggagctgacagtctggaggcctggactagtgctgtgggcaagtggttctccccgctgagctgccaccagctgctgggccccgggctgctgcggctgggccgcctatggctgcggtccccctcccatacagccccggcccctggtctctggctgtcagggtttggcctccttcgtggtgaccacctcttcctgtgctcagcgccgggcccaggccccccagcccctgaggacatggtgcatctgcggcggctacaggagatcagtgtggtttctgcagctgacaccccagataagaaagagcatttggtcctggtggagacaggaaggaccctgtatctgcaaggagagggccggctggacttcacggcatggaacgcagccattgggggcgcggctggtgggggcggcacagggctgcaggagcagcagatgagccggggtgacatccccatcatcgtggatgcctgcatcagttttgttacccagcatgggctccggctggaaggtgtataccggaaagggggcgctcgtgcccgcagcctgagactcctggctgagttccgtcgggatgcccggtcggtgaagctccgaccaggggagcactttgtggaggatgtcactgacacactcaaacgcttctttcgtgagctcgatgaccctgtgacctctgcacggttgctgcctcgctggagggaggctgctgagctgccccagaagaatcagcgcctggagaaatataaagatgtgattggctgcctgccgcgggtcaaccgccgcacactggccaccctcattgggcatctctatcgggtgcagaaatgtgcggctctaaaccagatgtgcacgcggaacttggctctgctgtttgcacccagcgtgttccagacggatgggcgaggggagcacgaggtgcgagtgctgcaagagctcattgatggctacatctctgtctttgatatcgattctgaccaggtagctcagattgacttggaggtcagtcttatcaccacctggaaggacgtgcagctgtctcaggctggagacctcatcatggaagtttatatagagcagcagctcccagacaactgtgtcaccctgaaggtgtccccaaccctgactgctgaggagctgactaaccaggtactggagatgcgggggacagcagctgggatggacttgtgggtgacttttgagattcgcgagcatggggagctggagcggccactgcatcccaaggaaaaggtcttagagcaggctttacaatggtgccagctcccagagccctgctcagcttccctgctcttgaaaaaagtccccctggcccaagctggctgcctcttcacaggtatccgacgtgagagcccacgggtggggctgttgcggtgtcgtgaggagccacctcgcttgctgggaagccgcttccaggagaggttctttctgctgcgtggccgctgcctgctgctgctcaaggagaagaaaagctctaaaccagaacgggagtggcctttggaaggtgccaaggtctacctgggaatccgcaagaagttaaagcccccaacaccgtggggcttcacattgatactagagaagatgcacctctacttgtcctgcactgacgaggatgaaatgtgggattggaccaccagcatccttaaagcccagcacgatgaccagcagccagtggtcttacgacgccattcctcctctgaccttgcccgtcagaagtttggcactatgcctttgctgcctatccgtggggatgacagtggagccaccctcctctctgccaatcagaccctgcggcgactacacaaccggaggaccctgtccatgttctttccaatgaagtcatcccaggggtctgtggaggagcaagaggagctggaggagcctgtgtacgaggagccagtgtatgaggaagtaggggccttccctgagttgatccaggacacttctacctccttctccaccacacgggagtggacagtgaagccagagaaccccctcaccagccagaagtcattggatcaaccctttctctccaagtcaagcacccttggccaggaggagaggccacctgagccccctccaggccccccttcaaagagcagtccccaggcacgggggtccctagaggaacagctgctccaggagctcagcagcctcatcctgaggaaaggagagaccactgcaggcctgggaagtccttcccagccatccagcccccaatcccccagccccactggccttccaacacagacacctggcttccccacccaacccccatgcacttccagtccaccctccagccagcccctcacatgaccctaggaccagcagtctgagagggtaggtaccagaagacccagaaactcttatcgtggcactgttgcagcttcctctgccctggctggaaagactccagaatccagtgtggtgctgtggaaggagcactggactaaaggcttcagtggctgcgtgtcccaggacaggtcatggcccctctctgggcccagcccatttatctataccatgaggtaactgaagtaaggagagcagtgaatgtcaaactgtgtttcttagagccataagccccacatattatccctgaacaagggcagctcctgctttatatatttgatacgtaggggttccatgagagattttgggttttaaaggaatggttttactgcattaaagaaaaaaaatgctttggaaaccagaggcctgggtgatgttaaagtctatcctgtcccacttcctacattctgggactaccgtgaagcctggagtagggagagcgagtttgggagctgggactcggggagtcaaaaatagatgagtaattgtcaataaacctgggaaccaaaagacaaaaaaaaaaaaaaaaaaa

SEQ ID NO: 13209 - DNA, 2104 bp, Homo sapiens
acgtagcgcggcgctcggaactgacctactaacacacatctctccgcgcggccacggcgcccgcggacccggcgcgcccgcccgcctcccgcgccgcgccctcgccgccgcccgcctcccgccgcggccccggaggcccggcccggcccgagccccgagcgccggcggcccgactcccggccgcccctttctttctcctcgccggcccgagagcaggaacacgataacgaaggaggcccaacttcattcaataaggagcctgacggatttatcccagacggtagaacaaaaggaagaatattgatggattttaaaccagagtttttaaagagcttgagaatacggggaaattaatttgttctcctacacacatagatagggtaaggttgtttctgatgcagctgagaaaaatgcagaccgtcaaaaaggagcaggcgtctcttgatgccagtagcaatgtggacaagatgatggtccttaattctgctttaacggaagtgtcagaagactccacaacaggtgaggagctgcttctcagtgaaggaagtgtggggaagaacaaatcttctgcatgtcggaggaaacgggaattcattcctgatgaaaagaaagatgctatgtattgggaaaaaaggcggaaaaataatgaagctgccaaaagatctcgtgagaagcgtcgactgaatgacctggttttagagaacaaactaattgcactgggagaagaaaacgccactttaaaagctgagctgctttcactaaaattaaagtttggtttaattagctccacagcatatgctcaagagattcagaaactcagtaattctacagctgtgtactttcaagattaccagacttccaaatccaatgtgagttcatttgtggacgagcacgaaccctcgatggtgtcaagtagttgtatttctgtcattaaacactctccacaaagctcgctgtccgatgtttcagaagtgtcctcagtagaacacacgcaggagagctctgtgcagggaagctgcagaagtcctgaaaacaagttccagattatcaagcaagagccgatggaattagagagctacacaagggagccaagagatgaccgaggctcttacacagcgtccatctatcaaaactatatggggaattctttctctgggtactcacactctcccccactactgcaagtcaaccgatcctccagcaactccccgagaacgtcggaaactgatgatggtgtggtaggaaagtcatctgatggagaagacgagcaacaggtccccaagggccccatccattctccagttgaactcaagcatgtgcatgcaactgtggttaaagttccagaagtgaattcctctgccttgccacacaagctccggatcaaagccaaagccatgcagatcaaagtagaagcctttgataatgaatttgaggccacgcaaaaactttcctcacctattgacatgacatctaaaagacatttcgaactcgaaaagcatagtgccccaagtatggtacattcttctcttactcctttctcagtgcaagtgactaacattcaagattggtctctcaaatcggagcactggcatcaaaaagaactgagtggcaaaactcagaatagtttcaaaactggagttgttgaaatgaaagacagtggctacaaagtttctgacccagagaacttgtatttgaagcaggggatagcaaacttatctgcagaggttgtctcactcaagagacttatagccacacaaccaatctctgcttcagactctgggtaaattactactgagtaagagctgggcatttagaaagatgtcatttgcaatagagcagtccattttgtattatgctgaattttcactggacctgtgatgtcatttcactgtgatgtgcacatgttgtctgtttggtgtctttttgtgcacagattatgatgaagattagattgtgttatcactctgcctgtgtatagtcagatagtccatgcgaaggctgtatatattgaacattatttttgttgttctattataaagtgtgtaagttaccagtttcaataaaggattggtgacaaacacagaaaaaaaaaaaaaaaaaaaaa

SEQ ID NO: 13210 - DNA, 846 bp, Homo sapiens
atggcatctcctgtcctatccctggatggcttaactcaggaaaactcctggatccaagaggagtcagacaaaggaatggtggccttcttctgctgctcctgggagctttgctccatctctcatccagctcagactgttgctgggcctgatagtctttgcatagtcaaggtggttcttgaagaactcttgtctgcacgaggtctgagctgcttctccagaatctgcagcatgggtttccataactgcatgaagatctggagccactggagtgaatccgtgctgctgcacatgccccagcctgtgaatccagagctcactatagggcccatcacaggaccggtggacaggctcaaccacttccgagtggaaacttccttcacttgggaagtaaccaattacaatatcaggctgtttgaggatgtgagaagtttgatgtttagatgtggatctttgaattctgacagatctgacaattttgctgcatggggagcctgggtcttctcctctggcaaacactactgggagctggatgtggacaactcttgggactgggctctgggagtctgtaaggactcctggataaggaagaatagtacaatggttaaatctaaggacatatttcttcttttatgtgttaaggtggataatcatttcagtctcttgaccacctccccaatgtttcctgactatgtagagaaacctctgggccgggttggtgtgtttcttgattttgaaagtggaagtgtgagttttttgaatgtcacaaagagttccctcatatggagttacccgactggctccttaaattttcctgtcaggcctttcttttatactggccacagatga

SEQ ID NO: 13211 - DNA, 3508 bp, Homo sapiens
gcaacagcccagccctagcttgggagcggacccacacgaactgctcaaaggcttggagcgggtctagtaaggcgaacggactgcttccggccagaggtcccgggcggaggaggaagctgtggctgccggcggtgggacgccccggccgctcagcccccgggcactgctgtggggcgttcagctttccacacttggggcaaagcaagccgcgaggaggaaccagacagtcctgttagttgtggccagccctcattccctggaaatggcaaacaaggggaacaagaagcgtcggcagttctctctggaggagaaaatgaaagttgtgggagctgtagactcaggcaagaggaaaggtgatgtggcaaaagaatttggtatcactccctctactttatctacattcttaaaggatcgcaccaaatttgaagaaaaggtgcgggaggcatccgtgggaccccagcggaaaaggatgaggagcgctctttatgatgacattgataaggctgtttttgcttggtttcaagaaatccatgccaaaaacattcttgtgactggttctgtcattcggaaaaaagcactaaacttggccaacatgcttggctatgacaattttcaagcaagtgtgggctggctgaacagatttagagatcgccacggaattgctttgaaagcagtctgtagagaagatagtgacaggttaatgaatggtctaggaatagataagattaatgagtggcatgcaggggaaattataaaactgattgctgactacagcccagatgatatctttaatgctgatgagacaggagtgtttttccagttgcttccccagcacacacttgctgctaaaggagaccactgtagagggggcaagaaagcaaagcagcggttgacagcactcttttgttgcaatgcctcggggactgaaaaaatgagaccattgattgttggtaggtcagccagcccacactgcctcaagaacattcattccctcccttgtgattaccgagccaaccagtgggcttggatgacaagggatctgtttaatgagtggctgatgcaagtggatgccaggatgaagagggcggaacgccggatcctcttgctcatagacaactgctctgctcataacatgcttccacacttggaaaggattcaggttgggtatctgccctccaactgtactgctgtcctgcagccactgaatcttggcataattcacaccatgaaagtactgtaccagagccaccttctaaaacagatcctcctcaagctcaacagcagtgaggatcaagaagaggtggacatcaagcaggccatcgacatgattgctgcagcgtggtggtcagtcaagccatccacagtggtgaaatgttggcagaaggcaggcatcgtccctatggaatttgcagaatgtgacacagaatcagcagccagtgaaccagacattgccattgaaaagttgtggcacacagtggctattgccacctgtgtcccaaatgaagtaaatttccaggactttgttactgcagatgatgatctcattatctctcaggacacagacatcatccaggacatggtggctggcgaaaataccagtgaagcaggaagtgaagatgaaggggaggtatctttaccagagcaaccaaaagtcaccatcacagaagccatatcaagtgtacagaaacttagacagttcctttccacttgtgtagacattcctgatgccatttttggacaattaaatggcatagatgaatatttaatgaaaagagtgacacaaacccttattgattccaaaattacagatttcctccaaacaaaataatgcaggaatttatttcagaaaatgtagtttacaagaataaagatttctttagataggttgttgagccaatttaagtaaagcaatgttattgtgacaacattccagtactctgaaatagccaggaaacttctttgaatggaatttgactaatatgtgtgttttcttttcttttgtttttggctgtctctggtccttgattcaagatgtattttgattcatccaagggtttccaaacttgtctgcaaattaggatcacttgagaatcctttaaaaattccaaagctcaggccatatcccaggcctattaaatcacaatctttggtgacgggtcacaggcattggtagttttgaagctctccaggtgattccaatgtgcagacaaatttgaaaactgaaccaaccacaggaacatcaagtacactgtgggcctgggtccagcttctttccagtaagtgtatctcaggggcttccaaatttagcttacatcagaatcacttggaaggcttgttaaaacccaaggctgctaggcccacccccagagtttgatacagtagacctcaggtgggacccaaaaatttgcatttctaacacattctcagctgatgcagtccaggctccatgctttgaaaaccactggtctagctttagataggatattgagccaatttaaataaagcaatatactggtctagctgagttctagaacttctctctttagctggccatctgaatactcccccatcactaattgttaaaaaaagaatcaactgttcttactctagagctcttttttcctttctgctgatttgctggaagcactacaagacttctgtttgttcgttcgtttgtttgtttgtttgtttttaaagatggggtcttgttatattgcctaggctggaatgcagtggttattcacaggcatgattataacacactactctctctaactcctggcctcaagccatcctcccaaatagatgggactactgatgcacactgccatgctggccttacgaaatgttttaataggcatttcactaatagggatctggagtacaaggaaatacagtgcatttaagacataggctgggcatggtggctcatgcctgtaatcccagcacattgggaagatcacttgaggcaaggagtttgagaccagactggccaacacagcgagacccccatctctaaaaaaaaaaaaattaataagacatggatacaaccagggagggaggttataataatagagcatcctgttaatcagaatcatgggggagaacatacagcccagcgtgcctctcactttccagaaagggtgagaggatcattagagagttcattagagagtatttattcctaataagtcagataaatgtcagtttcatttttagaagtttcacacaatacctgctaatggtgtgatgtcatttttccccctgcttcaggttaattttttggatatttcagaaacccatagcaattcagtgatttttctttttgtagtagctcagtcaaaacaggtaacagcagattaatcatagaaaatgttgcttccacattaacaaaacaatcactgaaaaacagcagatgtttaaatagattattttatagcttattttggatattttttcttttaataaactaatatgatcatttgaattaaaaaaaaaaaaaaaaaaa

SEQ ID NO: 13212 - DNA, 4183 bp, Homo sapiens
gtagccgacaggccagagtttccagtttcggtggcttcgtaggcttttagcttctgaaatccgctaaaagcggcggttcattcatcttcaagtacctagcctgactggtagggctgctcagcattccgaaacatttcgacctggggaggggggcggcggtgaaagaatactttctgtagagagtgcccctcgcgtcgcccctgctttgaaggctttatgtattaacggaatgccgaacatttgtgtcctacttgctgacagcgcacaggatccttctaacagtatttctcaagtacttaacaaaaagatgaaaacttgaagtccaagccgtgctgctgattccgtctcacagtttaaagactgtccagaaactttaagctttcaaaactgtacattttaaaatcctgtgcgtttatcttcattttgctgggcagaaagccaaagtactggactgcctggttcagggctgaacgcctagtacacctgctaacttggagcttcagagccatggcaaccaaggagtcaagagacgccaaagcacagttggccctctcctcatcggccaatcagagcaaggaagtgcctgaaaacccaaactatgctctcaaatgtactcttgtgggacacacggaagcagtgtcatcagttaagtttagtcctaatggagaatggctagcaagttcttctgctgataggctaatcataatttggggagcatatgatggaaaatatgagaaaacactctatggtcataatttggaaatatcggatgttgcctggtcatcagattccagtcgtcttgtttctgcctcagatgataaaactctaaaattatgggatgtgagatctggaaaatgtttgaaaacactgaaggggcacagtaattatgtcttttgttgtaacttcaatccgccatccaaccttataatctcgggatcttttgatgagactgtaaaaatatgggaggtgaaaacaggaaagtgtctcaagactttgtctgctcattctgacccagtttctgctgttcattttaattgtagtgggtccttgatagtgtcaggtagctatgatggcctctgtagaatctgggatgctgcatcaggtcagtgtttaaaaacgctcgttgatgacgataaccctcctgtctcttttgtaaaattttctccaaatggtaaatacattctcactgcaactttggacaacactcttaaactatgggattatagcagaggcaggtgcctgaaaacatacactggtcataagaatgagaaatattgcatatttgccaatttttcagttactggtggaaagtggattgtgtctggttccgaggataacctggtttacatttggaaccttcagactaaagagattgtgcagaaattacaaggccatacagatgttgtgatctcagcagcttgtcatcctacagaaaacctcatcgcatcagcagcattagaaaatgacaaaacaattaaactgtggatgagtaaccactaatccctttgaaaatcaagtagtagagccaagttggccaaaaaacttggatatttaaaaagacggtttcttttaattttggcagtttggtattttaaaaattgtctattgttaaattttgagattcatacactacatttacaaaatgagatagttgaaaaagcacatctagaattcagcttctgactaccaatcttttttgagcaactttttgtaatttttatggatttatgtcacttttattacagggatatattgcatagtggtgaaatctgggcttagtataccctcacccaaatagtatacattgtacctagtaaatactttcccatctctcaccccactcccacctttgaaggctctagtgtctatgattctgctctccacgtccaggtgtacacattgtttatctcccacttacgagaacatgtggtttttgactttctgtatcattacttcacttaatggcctccaggtccatccatgttgttgcaaaagataagatttcattatttttttttggctgagtagtattctgtggtgtgtatgtgtgtgtgtgtatgcatatatgtgtatgtgtatgtatataagtatatacaccacattatccagtcatctggatatgtatataagtatatacaccacattttctttatccagtcatctcttgatggacccttaggttggttccataactttgctattacgaatagtgctgcgataaacagcactattatgaatagtgctgcgataaacagtgcaggtgattttaaaatataatttcctttgggtagatacctactagtgggattgctggatcgaatggtagtttttagttggaaaatctccatactgttttccagaggttgtaaaatgtacattcctccccacagtgtataagctgtgcctttactctgcatctttgccatgattctttttgagacagagtctctggtgcccaggctggagtgcagtggcacaatcttggctcactgcaacctctgcctcccgggttcaagcagttctcatgtctcaacatcccaggtagctaggattacaggcgtgccaccatgcctggctaatgtttctatttttagtagagacagggtttcaccatgttcgaggctggtcttgaactcctggcctcaagtgatccacctgcctcggcctcccaaagtgctgggattacaggcatgagccactgtacccagccattttttgactttttaataatagccattctaactggtttaagagagtatctcattgtggttatattttgtattcctctgatgattagtgatgttgagcatttttttgtgtgtgtttgttggccacttgtatgtcttctttgaaaactgacttctaatcttgaggcctattaataatttcatttgtctgtcactggacaatttctcattcctctcagtgactatcctagaggatcagtgtatttgagaaatatttagaagtaaagttgacaggacaggatgattgattaaaagaggggagcaagggaatttgaaataattccagggtttctggtttgggagatcagatgaacaagtgcataagcctgggatgctggtggaggactggagagacatggcagatgctacctgcacacttttggtaatattctgtgtgatgggatatgaaatggtccatagaaaaaaaccggaaaaatacgccaaggttaggttcattctaagagtctaaaaatttcaaaaaccaaaacaacattataaatggtgtttctcaaggacctttcactacctttttagattgtgcttgtgattttcaggcaagctaaatgtctgatgaagactgctcttcttttgttctgtgtctgacctactaattcctgcccatgcttcaaactcagttcagaaatcactgaaggaaccatccactgccggcctgcctgcaaccacagctgacagctgagttagttaggttttcctgtccctattatttaccagtttgtactgaaatgctttcatgggctgtgcttccagattatgagttctgtggaatcaggaagtatgtctctgtattcttgtattctttggcttttttgtgtagtaaagggactcaagtaatgtttgacagtgaaggatacaacttcattccttgcctgctttgataaattttagtaataaattcccaaaactatcatgttgattaaaaataaaaagtaaccgtaacctcacacattaactttattcaaacaaacagcacttacaggaaatgtaaagtagaaaaagatttctgcccactttacctacggagacatgataaacacgcaaaaaaaacctagaaattaagcaaaaaatagcacaataatttaactgaaagcaacaagggcaaaactgtctccttttgtagtttgtggtaccttatagtagtgctcattcagtttcgtttgcttgataaatctgaggactatgagatatcagagttactagtagggtaggagtgctgtaagggtactgggagaagtaggattagttaggggcagatcttgaattctggccaagaaactgatatttaacccataaagagatagtcactatatgttatcaaataggagaataacacaaatgagaaatgactgttaattcctgatgcataataacagttgtgagctttagtttaatgtaatatttgtaataaaaacgtttgg

SEQ ID NO: 13213 - DNA, 396 bp, Homo sapiens
atgttttcagataattcacattgccctgattgtggacaacagtggttccctagtttagaactaggccactggttgtaccaaactgaacttgttgaaaatgaatgttaccaggtattcttagaccgtattaacagagctgattattgtcctgagtgttatcctgataatcctgctaatagaagccttgttcttccttggtctttcccacttgagtgggctccccagaatctcaccagatggacctttgagaaagcttgccatccatttcttctgggtcctccactggttagaaaaagaatacatgactctcgagtagctggttttaaccctgcattacagttaatcttgaccagaacagataaaaccttaaacaaaaaactgggccaaaacaaatag

SEQ ID NO: 13214 - DNA, 1930 bp, Homo sapiens
gaccaagtggctcctgcgatggcggcggaagaggaggctgcggcgggaggtaaagtgttgagagaggagaaccagtgcattgctcctgtggtttccagccgcgtgagtccagggacaagaccaacagctatggggtctttcagctcacacatgacagagtttccacgaaaacgcaaaggaagtgattcagacccatcccagtcaggaatcatgacagaaaaagtggtggaaaagctttctcagaatccccttacctatcttctttcaacaaggatagaaatatcagcctccagtggcagcagagtggaagatggtgaacaccaagttaaaatgaaggccttcagagaagctcatagccaaactgaaaagcggaggagagataaaatgaataacctgattgaagaactgtctgcaatgatccctcagtgcaaccccatggcgcgtaaactggacaaacttacagttttaagaatggctgttcaacacttgagatctttaaaaggcttgacaaattcttatgtgggaagtaattatagaccatcatttcttcaggataatgagctcagacatttaatccttaagactgcagaaggcttcttatttgtggttggatgtgaaagaggaaaaattctcttcgtttctaagtcagtctccaaaatacttaattatgatcaggctagtttgactggacaaagcttatttgacttcttacatccaaaagatgttgccaaagtaaaggaacaactttcttcttttgatatttcaccaagagaaaagctaatagatgccaaaactggtttgcaagttcacagtaatctccacgctggaaggacacgtgtgtattctggctcaagacgatcttttttctgtcggataaagagttgtaaaatctctgtcaaagaagagcatggatgcttacccaactcaaagaagaaagagcacagaaaattctatactatccattgcactggttacttgagaagctggcctccaaatattgttggaatggaagaagaaaggaacagtaagaaagacaacagtaattttacctgccttgtggccattggaagattacagccatatattgttccacagaacagtggagagattaatgtgaaaccaactgaatttataacccggtttgcagtgaatggaaaatttgtctatgtagatcaaagggcaacagcgattttaggatatctgcctcaggaacttttgggaacttcttgttatgaatattttcatcaagatgaccacaataatttgactgacaagcacaaagcagttctacagagtaaggagaaaatacttacagattcctacaaattcagagcaaaagatggctcttttgtaactttaaaaagccaatggtttagtttcacaaatccttggacaaaagaactggaatatattgtatctgtcaacactttagttttgggacatagtgagcctggagaagcatcatttttaccttgtagctctcaatcatcagaagaatcctctagacagtcctgtatgagtgtacctggaatgtctactggaacagtacttggtgctggtagtattggaacagatattgcaaatgaaattctggatttacagaggttacagtcttcttcataccttgatgattcgagtccaacaggtttaatgaaagatactcatactgtaaactgcaggagtatgtcaaataaggagttgtttccaccaagtccttctgaaatgggggagctagaggctaccaggcaaaaccagagtactgttgctgtccacagccatgagccactcctcagtgatggtgcacagttggatttcgatgccctatgtgacaatgatgacacagccatggctgcatttatgaattacttagaagcagaggggggcctgggagaccctggggacttcagtgacatccagtggaccctctagc

SEQ ID NO: 13215 - DNA, 4115 bp, Homo sapiens
ccacagcgctgtagactgcgccgcattagaagcctggcctcctgatgctgtgctcttcatctagacccaagccccaggtcgtgggacgatttctcccgtttttgactccctggaactgtattgcctgctttacctgcgtacatgttgattctttctcatggcaaccccgcaggaaaccatcaagatctcattttacagctgggattctctggttcacagaggtaacggagcttgcccgaggccagttaaacgagaagattcatcaccgctttgatggctgcctcacaaacttcacaaactgttgcatctcacgttccttttgcagatttgtgttcaactttagaacgaatacagaaaagtaaaggacgtgcagaaaaaatcagacacttcagggaatttttagattcttggagaaaatttcatgatgctcttcataagaaccacaaagatgtcacagactctttttatccagcaatgagactaattcttcctcagctagaaagagagagaatggcctatggaattaaagaaactatgcttgctaagctttatattgagttgcttaatttacctagagatggaaaagatgccctcaaacttttaaactacagaacacccactggaactcatggagatgctggagactttgcaatgattgcatattttgtgttgaagccaagatgtttacagaaaggaagtttaaccatacagcaagtaaacgaccttttagactcaattgccagcaataattctgctaaaagaaaagacctaataaaaaagagccttcttcaacttataactcagagttcagcacttgagcaaaagtggcttatacggatgatcataaaggatttaaagcttggtgttagtcagcaaactatcttttctgtttttcataatgatgctgctgagttgcataatgtcactacagatctggaaaaagtctgtaggcaactgcatgatccttctgtaggactcagtgatatttctatcactttattttctgcatttaaaccaatgctagctgctattgcagatattgagcacattgagaaggatatgaaacatcagagtttctacatagaaaccaagctagatggtgaacgtatgcaaatgcacaaagatggagatgtatataaatacttctctcgaaatggatataactacactgatcagtttggtgcttctcctactgaaggttctcttaccccattcattcataatgcattcaaagcagatatacaaatctgtattcttgatggtgagatgatggcctataatcctaatacacaaactttcatgcaaaagggaactaagtttgatattaaaagaatggtagaggattctgatctgcaaacttgttattgtgtttttgatgtattgatggttaataataaaaagctagggcatgagactctgagaaagaggtatgagattcttagtagtatttttacaccaattccaggtagaatagaaatagtgcagaaaacacaagctcatactaagaatgaagtaattgatgcattgaatgaagcaatagataaaagagaagagggaattatggtaaaacaacctctatccatctacaagccagacaaaagaggtgaagggtggttaaaaattaaaccagagtatgtcagtggactaatggatgaattggacattttaattgttggaggatattggggtaaaggatcacggggtggaatgatgtctcattttctgtgtgcagtagcagagaagccccctcctggtgagaagccatctgtgtttcatactctctctcgtgttgggtctggctgcaccatgaaagaactgtatgatctgggtttgaaattggccaagtattggaagccttttcatagaaaagctccaccaagcagcattttatgtggaacagagaagccagaagtatacattgaaccttgtaattctgtcattgttcagattaaagcagcagagatcgtacccagtgatatgtataaaactggctgcaccttgcgttttccacgaattgaaaagataagagatgacaaggagtggcatgagtgcatgaccctggacgacctagaacaacttagggggaaggcatctggtaagctcgcatctaaacacctttatataggtggtgatgatgaaccacaagaaaaaaagcggaaagctgccccaaagatgaagaaagttattggaattattgagcacttaaaagcacctaaccttactaacgttaacaaaatttctaatatatttgaagatgtagagttttgtgttatgagtggaacagatagccagccaaagcctgacctggagaacagaattgcagaatttggtggttatatagtacaaaatccaggcccagacacgtactgtgtaattgcagggtctgagaacatcagagtgaaaaacataattttgtcaaataaacatgatgttgtcaagcctgcatggcttttagaatgttttaagaccaaaagctttgtaccatggcagcctcgctttatgattcatatgtgcccatcaaccaaagaacattttgcccgtgaatatgattgctatggtgatagttatttcattgatacagacttgaaccaactgaaggaagtattctcaggaattaaaaattctaacgagcagactcctgaagaaatggcttctctgattgctgatttagaatatcggtattcctgggattgctctcctctcagtatgtttcgacgccacaccgtttatttggactcgtatgctgttattaatgacctgagtaccaaaaatgaggggacaaggttagctattaaagccttggagcttcggtttcatggagcaaaagtagtttcttgtttagctgagggagtgtctcatgtaataattggggaagatcatagtcgtgttgcagattttaaagcttttagaagaacttttaagagaaagtttaaaatcctaaaagaaagttgggtaactgattcaatagacaagtgtgaattacaagaagaaaaccagtatttgatttaaagctaggtttcctagtgaggaaagcctctgatctggcagactcattgcagcaggtggtaatgataaaatactaaactacattttatttttgtatcttaaaaatctatgcctaaaaagtatcattacatataggaaaacaataattttaacttttaaggttgaaaagacaatagcccaaagccaagaaagaaaaattatcttgaatgtagtattcaatgattttttatgatcaaggtgaaataaacagtctaaagaagaggtgtttttataatatccatatagaaatctagaatttttacttagatactaataaaatacatttagaaacttttaaagtcatgaaaaagcattaaccttctaaacagtatattctaaaaagtcaaaacgttaacaatagtttttatctaataaaagcactgcaagaaaatagggtagaattgttacagctggacttgtaaaaatatgtctttttactcagggtttaaaatgtcccatttaaatatgaaatgtaaacaaatttgttttttaaggttaaggccaaatgtaacaataaaaccctgtcgatggttttagctaaattagaggaagttgtatgagacttaatgatctaaaaacttaaaattgaattggtttgattaaaaataaagcttgcaattttaaaagtagctcacatttaatttcttgtgtgaaatagaacatgctttaaaggaagtatttttatgtgaatttgcattccagtataaatagtattcacaaaaaagattttcctagattttatctattgaataggtgtcaatatggcatgcatattgtaactttcattagaaataagttgctttgacttttaaaaatgacatagttagattatttaaagtcaatgtatatagtatatattatgtatggatttatataccaaattttggaatacagcctatctcatgaccatattgaaatgtacggaatttgatccatgcgatactatgtgtgcattatttgaaagttattggaaattttattcaaaccgtggaacaaatgtatgtgattttgttatacttcttaatttaaataaaatatttaatgcactattaaaaaaaaaaaaaaaaaaa

SEQ ID NO: 13216 - DNA, 2744 bp, Homo sapiens
agaatgcgagaaagtgaagtcaaattcggacttgtaggcgatcagggctgaagacgctgattagagagaaaacagagggtgatggtggctgcacgtggggaatgggtgacatctcccagggggaatgagcacaaggcccagatcggaaaccccaaactcagattttaaggtttggacaagaagtacctgaggagtggaggagtgagaaagaagtgccagagagcctgaggaggaaaatcagcagactggcattatgaagaatgttgtcagaagtagggagtaggcactagtcacctaagataaggagctggattctgcccaaggcactgttatgtggtatacttgttacatgtcctgaggatccgctgaggtatttagagggaatgatcatggttataatcaaaagtggtcttcagaatcttctttgatgactccggaattgatgataaaagcctgtagcttttatactggacatttagtaaagactcatttttgcacttggagagacatagctcgtacaaatgaaaatgtcgtcctggctgaaaaaatgaacagagcagtgacatgctacaatttcagacttcaaaaatctgtatttcatcactggcactcttatatggaagaccagaaagaaaaacttaaaaatatgctattgcggatacaacagatcatctattgtcacaagctaaccattatcctaacaaaatggcggaatacagcaagacataagagtaaaaagaaagaagatgagctgatattaaaacatgaacttcaattgaaaaaatggaaaaataggttaatactcaaaagagctgctgcagaagaatccaattttcctgaacgaagttcttctgaagtctttcttgtagatgagactctaaaatgtgacatttcactgttacctgaaagagcaatattacagattttcttctacctcagtttaaaagatgtgataatatgtggtcaagttaatcatgcctggatgttgatgacacaactaaactcactgtggaatgctattgatttttcctcagtgaaaaatgtgattccagataaatatatagtgtctactttgcaaaggtggcgtttaaatgtgctgcgtttgaattttcgtggttgtcttctccgacccaaaactttcagatctgtcagccactgtaggaacttgcaagagttgaatgtctctgactgcccaacattcacagatgaatcaatgagacacatttctgagggctgcccgggggtcctgtgtctcaatctgtctaacacaactatcaccaacaggacgatgcgactcctgccgaggcacttccacaacttacagaatcttagtttggcttattgcagacggttcacagacaaaggcttacagtacctgaacttggggaatggatgccacaagctcatctatctggacctctctggctgcacccagatttcagtccaaggcttcaggtacattgcaaacagctgcactggaattatgcatcttaccattaatgacatgccaactctgacggacaactgtgtaaaagctttagttgaaaaatgctctcgtattacatcgctggttttcactggtgcaccgcatatctccgattgtactttcagagctctttctgcttgtaaactcagaaagatccgatttgaaggaaataaaagggttactgatgcatccttcaaatttatagacaagaattatccaaatctcagtcacatttatatggctgactgcaagggaataacagacagcagcctcagatccctttcacctttgaagcaactgactgtgttgaatttggcaaattgtgtaagaattggtgatatgggactaaagcaatttcttgatggtcctgcaagcatgaggataagagagctaaatttaagcaactgtgtgcggctaagtgatgcctctgttatgaaactatctgagcgctgccctaatttaaactacttgagtttacgaaattgtgaacatttgactgcccaaggaattggatatattgtaaacatcttttccttggtatcaatagatctctctggaacagacatctctaatgagggtttgaatgtgctttccagacataaaaaattgaaggaactttctgtatctgaatgttatagaatcactgatgatggaattcaggcattctgcaaaagctcactgatcttggaacatttggatgtctcttattgctcccagctgtcagatatgattatcaaagcactggccatttactgcattaacctcacatctctcagcattgctggctgtccaaagattactgactcagcaatggagatgttatcggcaaaatgccattacctgcacattttggatatctctggttgtgtcttgcttactgaccaaatccttgaggaccttcagataggctgcaaacaactccggatccttaagatgcaatactgcacaaatatttccaagaaggcagctcaaagaatgtcatctaaagttcagcagcaggaatacaacactaatgaccctccacgttggtttggctatgatagggaaggaaaccctgttacagagcttgacaacataacatcatctaaaggagccttagaattaacagtgaaaaagtcaacatacagcagtgaagaccaagcagcgtgaccttcagcctcaagcaggaagaacaaaaaatcaagaacttggcaagttttctccatttgttgcaagtatgtttactagctgaatctcaataacaatgtaaacaagcaac

SEQ ID NO: 13217 - DNA, 5992 bp, Homo sapiens
aaattgctgtgaccgcagcatctctaggaagacgctttattcctgaaggacactgactgtcacttgggaaccaagaagccctctgcagtcatgagctctgacgcagaaatggccatttttggagaagcagctccctacctccggaaaccagagaaggagagaatcgaggctcaaaatcgtccattcgattccaagaaagcctgctttgtagcggataataaggaaatgtatgtgaaaggcatgatccagactagggaaaatgacaaagtcatagtcaagaccctcgatgaccggatgctcactctgaacaatgaccaggtcttccccatgaaccctcccaaatttgacaagatcgaggacatggccatgatgactcacctgcatgaacctgctgttctgtacaacctcaaagagcgctatgcagcctggatgatctacacctactcaggcctcttctgtgtcaccgtcaacccctacaagtggctgccggtgtacaagcccgaggtggtggctgcctacagaggcaaaaagcgccaggaggccccgccccacatcttctccatctctgacaatgcctatcagttcatgctgactgatcgagacaaccagtctatcctcatcaccggagaatccggggctgggaagactgtgaacaccaagcgtgtcatccagtattttgcaacaattgcagttaccggggacaagaagaaggagacacagccaggcaaaatgcagggaaccctagaggatcagatcatccaggccaacccactgctggaggcctttggaaatgccaagactgtgaggaatgacaactcctcaagatttgggaagttcattcggattcattttggagccacaggaaagctggcatcggcagacatcgaaacttatctgttagaaaaatccagagtgacgtttcaattatccagtgagagaagctatcatattttctaccaaattatgtcaaacaagaagccagaactaattgacctgcttctgatctccaccaaccccttcgacttccccttcgtgagccaaggagaggtcacggtagccagtatcgatgacagtgaagaactgctggcgacagataatgccattgacatcctgggcttcagctcagaggagaaagtcgggatctacaaactgacgggagccgtgatgcattatgggaacatgaagttcaagcagaagcagcgtgaggagcaggcggagccagacggcaccgaagtggctgacaaagccggatacctgatgggactgaattctgcagaaatgctgaagggcctgtgctgtccaagggtgaaggttggcaatgaatatgtcactaaagggcaaaatgtccagcaggtgaccaattcggtgggtgctctggccaaagccgtctacgagaagatgttcctgtggatggtcacccgcatcaaccagcagttggacaccaagcagcccaggcagtacttcatcggggtcttggacattgctggctttgagatctttgatttcaacagcctggagcagctgtgcatcaacttcaccaatgagaaactgcaacagtttttcaaccaccacatgttcgtgctggagcaggaagagtacaagaaggaaggcatcgagtgggagttcattgacttcggaatggacctggctgcctgcatcgagctcatcgagaagcctatgggcatcttctccatcctggaagaggagtgcatgttccccaaggcaacagacacctccttcaagaacaagctgtatgaccagcatcttggaaaatccaacaacttccagaagcccaagcctgccaaaggcaaggctgaggctcacttctcgctggtgcactatgccggcaccgtggactacaacatcgccggctggctggacaaaaacaaggaccccctgaatgagactgtggtggggctgtaccagaagtcttcgctgaagcttctctccttccttttttccaactatgctggtgcagagacaggtgactccggaggaagcaagaagggcgggaagaagaagggctcctctttccagaccgtgtcggccgtgttcagggaaaatttaaacaaattgatgactaacttaaggagcacccaccctcactttgtacgatgtctgattcccaatgagaccaagactcctggtgtgatggaccactacttggtcatgcaccagctgcgctgtaacggggtcctcgagggcatccggatttgcaggaagggattccccagccggatcctctatgctgacttcaagcagcggtaccggatcctcaatgccagtgctatccctgaagggcagttcattgacagcaaaaatgcctcagagaagctcctcaactccatcgatgtggaccgggagcagttcaggttcggcaacaccaaggtgtttttcaaagctgggctcctgggacttttggaggagatgagagatgagaagctggtgacgctgatgacaagcacgcaggcggtgtgcagggggtacctgatgcgggtggagttcaagaagatgatggagaggagggactccatcttctgcatccaatacaacatccgctcttttatgaacgtcaagcactggccctggatgaacctgttcttcaaaatcaagcccctgctgaagagtgcagaggccgagaaggagatggccaccatgaaggaagactttgagaggaccaaggaagaactggcccgatctgaggctcgccggaaggagctggaggagaaaatggtctccctcctgcaggagaagaatgacctccaattgcaggtccagtctgaaacagaaaatctgatggacgctgaggaacggtgtgaaggactcatcaaaagcaagatcctactggaagcaaaagtcaaggagctgacggagagattggaagaggaagaggagatgaattctgaattggttgccaagaagaggaatctggaagataaatgctcctctctcaagagagacattgatgatctggagctgaccttgacgaaagttgaaaaggagaagcatgccacagagaacaaggtaaagaatctttccgaagaaatgacagcacttgaagaaaacatttccaaattgaccaaagaaaagaaatctctacaggaggcccatcagcaaacactggatgatcttcaggtggaagaagataaagtcaatggtctaatcaaaataaatgccaagcttgaacagcaaacagatgatcttgagggttccttagagcaggagaagaaactgcgggcggacttggaaagggcgaagaggaagctggaaggagatctgaaaatgtcccaggaatccattatggatctagaaaatgaaaagcagcaaatagaagagaaattgaaaaagaaggagtttgaactcagtcagttacaagccagaatagatgacgaacaagtccacagtttgcagtttcaaaagaagattaaagagctgcaagcccgcatagaagagctggaggaggaaattgaagcggaacacacgctcagagccaagattgagaagcagcgctcagatctggccagggaactggaggagatcagcgagaggctggaagaagccagtggggccacttcagcccagattgagatgaacaagaagagggaggctgagttccagaaaatgcgcagggacctggaggaggccaccctgcagcacgaagccacagcagccaccctgaggaagaagcaagcagatagtgtggccgagcttggggagcagattgacaacctgcagcgggtgaagcagaagctggagaaggagaagagcgagctgaagatggagatcgacgacatggccagcaacatcgaggctctctccaagtcaaagagtaacatagaaagaacgtgccggacggtagaagatcaatttagtgaaatcaaagccaaggacgagcaacagacacagttgatccatgatctgaacatgcagaaagcaagactgcagacccaaaatggggagctgagccaccgagtggaagagaaggagtctctgatttcacagctgaccaaaagcaagcaggccctcacccagcagctggaggagcttaagaggcaaatggaagaagaaaccaaggccaagaacgccatggcgcacgccctgcagtcctcccgccacgactgtgacctgctgcgggaacagtatgaggaggagcaggaagccaaggccgagctgcagagggcgctgtccaaggccaacagtgaggttgcccagtggaagaccaaatacgagacggacgccattcagcgcacagaagagctggaggaggccaagaaaaaactggcccagaggctccaggaagcagaggagaagacggagacggcgaactccaagtgcgcatcgttggagaaaaccaagcagaggctgcagggagaggtggaggatctgatgcgggatctggagcgctcccacaccgcctgtgccacactggacaagaagcagaggaacttcgacaaggtccttgcagagtggaagcaaaagctggacgaaagccaggctgagctggaagctgctcagaaggagtccaggtcactcagcactgaactcttcaagatgaggaatgcctatgaggaggtggtggaccagttagagacactgaggcgagagaacaaaaatctgcaagaagagatttccgacttaactgagcagattgcagaaactggcaagaatcttcaggaagcggaaaagaccaagaagctagtggagcaggaaaagtcagatctgcaggtcgccttagaagaagtggagggttccttggaacacgaggagagcaagatcttgcgcgtgcagctagagctgagccaggtgaaatccgagctagaccgcaaggtcattgagaaggatgaagaaatcgagcagctaaaaagaaacagccagcgggcagcagaggccctgcagagcgtgctggatgctgaaatccgcagccggaacgacgccctgaggctaaagaagaagatggagggagaccttaatgagatggagattcagctgggccactccaaccgccagatggcagagacccagaggcatctgcgcacggtccagggccagctcaaggactcccagctgcatctcgatgacgccctgaggagcaatgaggacctcaaggagcagctggccatcgtggagcgcaggaatggcctcctgctggaggagctggaggaaatgaaggtggccctggaacagacggagcggacccgcaggctgtcagagcaggagctgctggacgccagcgaccgcgtgcagctcctgcactcccagaacacaagcctgataaataccaagaaaaaactggaggctgacatagctcagtgccaggcagaggtggagaactcgatccaggagtccaggaacgcagaggagaaggccaagaaggccatcacggatgctgccatgatggctgaggagctaaagaaggaacaggacaccagcgcccacctggagcggatgaagaagaacctggagcagacggtgaaggacctgcagcaccgtctagatgaggctgaacaactggcgctgaagggcgggaagaagcagatccagaaactggagaaccgggtgcgggagctggaaaatgagcttgatgtggaacagaagaggggagctgaagccctgaagggagcccacaagtacgaacgcaaagtcaaggagatgacttaccaggctgaggaggaccgcaagaatatccttaggctccaggacctggtggacaagctgcaggccaaagtgaagtcttacaagaggcaggctgaggaggcggaggagcaggccaacacgcagctgtccagatgccggagagtccagcatgagctagaggaggccgcggagagggcggacatcgctgagtcccaggtcaacaagctgagggccaagagccgagacgtgggcagccagaagatggaagaatgaggctcacctgatgctcgttgccatgggacacctccgagagagtggagggaaaatgtgtgagaaataaattctcctaaatactcgg

SEQ ID NO: 13218 - DNA, 10551 bp, Homo sapiens
gcggccgctgctcgcgctgaggtgcgtcggtgcccggccccccgcgcccccgcgcgccgcggctcctgttgacccggtccgcccgtcggtctgcagcgcggctgaggaaacttggctgtaacttcaaaagaagatttgattctttatttctggactgcatatatatatataacaaggccattaaaatgtcgggagcctcagtgaaggtggctgtccgggtaaggcccttcaattctcgagagaccagcaaggaatccaaatgcatcattcagatgcaaggcaactcgaccagtattattaacccaaagaatccaaaggaagctccaaagtccttcagcttcgactattcctactggtctcatacctcacccgaagatccctgttttgcatctcaaaaccgtgtgtacaatgacattggcaaggaaatgctcttacacgcctttgagggatataatgtctgtatttttgcctatgggcagactggtgctggaaaatcttatacaatgatgggtaaacaagaagaaagccaggctggcatcattccacagttatgtgaagaactttttgagaaaatcaatgacaactgtaatgaagaaatgtcttactctgtagaggtgagctacatggaaatttactgtgaaagagtacgagatttgctgaatccaaaaaacaagggtaatttgcgtgtgcgtgaacacccacttcttggaccctatgtggaggatctgtccaagttggcagttacttcctacacagacattgctgacctcatggatgctgggaacaaagccaggacagtggcagctacaaacatgaatgaaacaagtagccgttcccacgctgtgtttacgattgttttcacccagaagaaacacgataatgagaccaacctttccactgagaaggtcagtaaaatcagcttggtggatctagcaggaagtgaacgagctgattcaactggtgccaaagggactcgattaaaggaaggagcaaatattaataagtctcttacaactttgggcaaagtcatttcagccttggccgaggtgagtaaaaagaagaagaaaacagattttattccctacagggattctgtacttacttggctccttcgagaaaatttaggtggcaattctcggactgcaatggttgctgctctgagccccgcggatatcaactacgatgagactttgagcactctgagatatgcagatcgtgcaaaacaaattaaatgcaatgctgttatcaatgaggaccccaatgccaaactggttcgtgaattaaaggaggaggtgacacggctgaaggaccttcttcgtgctcagggcctgggagatattattgatacatccatggggtccctcacttcatccccatcttcctgctcactcagtagtcaggtgggcttgacgtctgtgaccagtattcaagagaggatcatgtctacacctggaggagaggaagctattgaacgtttaaaggaatcagagaagatcattgctgagttgaatgaaacttgggaagagaagcttcgtaaaacagaggccatcagaatggagagagaggctttgttggctgagatgggagttgccattcgggaagatggaggaaccctaggggttttctcacctaaaaagaccccacatcttgttaacctcaatgaagacccactaatgtctgagtgcctactttattacatcaaagatggaattacaagggttggccaagcagatgctgagcggcgccaggacatagtgctgagcggggctcacattaaagaagagcattgtatcttccggagtgagagaagcaacagcggggaagttatcgtgaccttagagccctgtgagcgctcagaaacctacgtaaatggcaagagggtgtcccagcctgttcagctgcgctcaggaaaccgtatcatcatgggtaaaaaccatgttttccgctttaaccacccggaacaagcacgagctgagcgagagaagactccttctgctgagaccccctctgagcctgtggactggacatttgcccagagggagcttctggaaaaacaaggaattgatatgaaacaagagatggagaaaaggctacaggaaatggagatcttatacaaaaaggagaaggaagaagcagatcttcttttggagcagcagagactggactatgagagtaaattgcaggccttgcagaagcaggttgaaacccgatctctggctgcagaaacaactgaagaggaggaagaagaggaagaagttccttggacacagcatgaatttgagttggcccaatgggccttccggaaatggaagtctcatcagtttacttcattacgggacttactctggggcaatgccgtgtacctaaaggaggccaatgccatcagtgtggaactgaaaaagaaggtgcagtttcagtttgttctgctgactgacacactgtactcccctttgcctcctgaattacttcccactgagatggaaaaaactcatgaggacaggcctttccctcgcacagtggtagcagtagaagtccaggatttgaagaatggagcaacacactattggtctttggagaaactcaagcagaggctggatttgatgcgagagatgtatgatagggcaggggagatggcctccagtgcccaagacgaaagcgaaaccactgtgactggcagcgatcccttctatgatcggttccactggttcaaacttgtggggagctcccccattttccacggctgtgtgaacgagcgccttgccgaccgcacaccctcccccactttttccacggccgattccgacatcactgagctggctgacgagcagcaagatgagatggaggattttgatgatgaggcattcgtggatgacgccggctctgacgcagggacggaggagggatcagatctcttcagtgacgggcatgacccgttttacgaccgatccccttggttcattttagtgggaagggcatttgtttacctgagcaatctgctgtatcccgtgcccctgatccacagggtggccatcgtcagtgagaaaggtgaagtgcggggatttctgcgtgtggctgtacaggccatcgcagcggatgaagaagctcctgattatggctctggaattcgacagtcaggaacagctaaaatatcttttgataatgaatactttaatcagagtgacttttcgtctgttgcaatgactcgttctggtctgtccttggaggagttgaggattgtggaaggacagggtcagagttctgaggtcatcactcctccagaagaaatcagtcgaattaatgacttggatttgaagtcaagcactttgctggatggtaagatggtaatggaagggttttctgaagagattggcaaccacctgaaactgggcagtgccttcactttccgagtaacagtgttgcaggccagtggaatcctcccagagtatgcagatatcttctgtcagttcaactttttgcatcgccatgatgaagcattctccacggagcccctcaaaaacaatggcagaggaagtcccctggccttttatcatgtgcagaatattgcagtggagatcactgaatcatttgtggattacatcaaaaccaagcctattgtatttgaagtctttgggcattatcagcagcacccacttcatctgcaaggacaggagcttaacagtccgcctcagccgtgccgccgattcttccctccacccatgccactgtccaagccagttccagccaccaagttaaacacgatgagcaaaaccagccttggccagagcatgagcaagtatgacctcctggtttggtttgagatcagtgaactggagcctacaggagagtatatcccagctgtggttgaccacacagcaggcttgccttgccaggggacatttttgcttcatcagggcatccagcgaaggatcacagtgaccattatccatgagaaggggagcgagctccattggaaagatgttcgtgaactggtggtaggtcgtattcggaataagcctgaggtggatgaagctgcagttgatgccatcctctccctaaatattatttctgccaagtacctgaagtcttcccacaactctagcaggaccttctaccgctttgaggctgtgtgggatagctctctgcataactcccttcttctgaaccgagtgacaccctatggagaaaagatctacatgaccttgtcggcctacctagagctggatcattgcatccagccggctgtcatcaccaaggatgtgtgcatggtcttctactcccgagatgccaagatctcaccaccacgctctctgcgtagcctctttggcagcggctactcaaagtcaccagattcgaatcgagtcactggcatttacgaactcagcttatgcaaaatgtcagacacaggtagtccaggtatgcagagaaggagaagaaaaatcttagatacgtcagtggcatatgtgcggggagaagagaacttagcaggctggcggccccgtggagacagcctcatccttgagcaccagtgggagctggagaagctggagctcctacatgaggtggaaaaaacccgccactttttgctgctgcgtgagagacttggtgacagcatccccaaatccctgagcgactcgttatcccccagcctcagcagtgggaccctcagcacctccaccagtatctcctctcagatctcaaccactacctttgaaagcgccatcacacctagcgagagcagtggctatgattcaggagacatcgaaagcctggtggaccgagagaaagagctggctaccaagtgcctgcaacttctcacccacactttcaacagagaattcagccaggtgcacggcagcgtcagtgactgtaagttgtctgatatctctccaattggacgggatccctctgagtccagtttcagcagtgccaccctcactccctcctccacctgtccctctctggtagactctaggagcaactctctggatcagaagaccccagaagccaattcccgggcctctagtccctgcccagaatttgaacagtttcagattgtcccagctgtggaaacaccatatttggcccgagcaggaaaaaacgaatttctcaatcttgttccagatattgaagaaattagaccaagctcagtggtctctaagaaaggataccttcatttcaaggagcctctttacagtaactgggctaaacattttgttgtcgtccgtcggccttatgtcttcatctataacagtgacaaagaccctgtggagcgtggaatcattaacctgtccacagcacaggtggagtacagtgaggaccagcaggccatggtgaagacaccaaacacctttgctgtctgcacaaagcaccgtggggtccttttgcaggccctcaatgacaaagacatgaacgactggttgtatgccttcaacccacttctagctggcacaatacggtcaaagctttcccgcagatgcccgagccagtcgaaatactaagtgactctgccgagtgccctcactcgccttcgagagataaagaaagcgttacctctcatttctctttgtgattcttgacggtgactcttgtatgtaatcctgtggcttaactacttctccctccttgtccagcacttttctagctctcccgttccccatctccattgctctgtactcttttcttttttcttgtgctgagaatctcgttagtagcatgtggcctaacaaaaggaaaaaatgtttttaaacacacacacacacacacacacacacacacacatacacagacaaaaacacaaaaactctgaggggatctggtgaatctccaaattattgtgggtgtactttggcttccttttgtatgataggtccccatcatgaccacctctgatgtctgtgctgctgtcaccaggcacctttgtttttcaagacaacatactttttttttcttttctctgtttgtgatatcactttaatttttcttgggtggcttagagactaagggaggagacatctggcctttttagaacctgagaggaaaaaaagagtctttttttcccctctgtctctttttgccatggctaatccctgcatttccattcagggaaaaggtggtagtgagcatagaactgcaacagttatattctgagtcaaagttggggctttttacggcataattatggaatttttatttactggtagagaggagacgagaggctttttcagtgggcctgggacagtggctgctcttgactttgtgtgaagggaaatgccaaggatgcttctggtggacttcaggggaccccagggtttggccgtgggccgtgatggcagcaggcggtgggatgcttgtagctcctcacagcaggattcctgcccactgttttttctctgttgggagggaagctcttttctaggagtgtctcagttctgcttttggcattagtgatggtggtggtacagttggaattagtgccatgtcatacacaaatgttccacaaggcgggagtgtttcactttctggtgataaacttgatggtcattgttatgattaagataatgccgggcaggccgggcacagtggctcacgcctgtaatccaagcacttggggaggccgaggcgggcagatcacgagatcaggagttcaagaccagcctggccaatatgatgaaaccccgtctctactaaaaatacaaaattagtcgggtatggtggcacatgcctgtaattccagctgcttgggagcctgaggcaggagaactgcttgaacccaggaggcagaggttgcagtgagccaagatcgcgctattgcactccagcctgggtgacagagcaagactctgcctcagaaaaaaaaaaaaataataatgctgggtagtgaccttgtgattgttacagctccctttgatcaaagaaatatagctttcaggcataaacctggaagtctccctctgaatccagcagttgttttcattgatgcttgtcaggttgaagatgctttcagtgatgctctctatactcataaataagcaaatgtggcaggctttgctttctggatcccaggattaaaactaaccgtgaccactactccaaacaaaacacaatatgcctaggggcacggatgaacgtccagggagcccgggccccaggctttgttgcgtgttccctgctcctctccatctggtgtggaaacactgcccagggagaaaggaggaagctcactgtggacagtcttctttccttctgacagaccaggtcatctggcttccgagatcatcagagaagataagtctgtctctttcagctgccagtaagttttccaggatgagaggggaaaaagaaagcctccagtgacttcagttgctttgccagttgtcttgggattgttttacaccatcctttacttcccttgctcagacctctctgtttcaccattgctcaggcattcaggaaagtatctgctcactcccacttggtgagtcctcggccttgaggttgctgactctcaggcgttaggcagctggatgacttcccgcttcacgcagcaaaggccaggggcttgcgcgcctctgcagagttgttgctagggagacttgtgtcatcatccacaaccttgtttctcacttcctggttgggctcatctctgaagaacaggtctcccagcttcgctccttatcactgcattgtgaagaggaggaaaagtgaatcacggagagagaaaggaaaggatagaatcacaggctgcgtctgcacctgaaaagtgacccgcggaaactctatggcggattttttttttaactttcttcttcctgttaaaacataggtcactaactgtgatgttatttgttttctaagtggtatgtgagattttctaatgtagttagaagtttcattgtctgatggacacaatatgcccttccggttctattcaaaccagcaggatctgtcggtgcttagagatggctgcctggactggaatcaaatctaatttcagggaaatgaagatggaatttgaaggtcacttttaaaattaagtcattgatgctgctgttacagagtgtgacagaggatccatgtctgtgacacaggacggtgggaagcctgagagagagtgaaattatgtgatacactgaaatgacttttgtttttcttctaactcatacaaaactggtttggaaagtctttgctttggaagcgtcagacattagaacaggccaaactggactgtctgttcatagcgtgcctgaataagaaggcctcttagggagccagagggagcagagtggtcgtgtcctgcgtgctcttcaccctctggggcgcccctgctgcggctggcaggtgcagacagcctttgctggtccccagcacgtccagggtgggtgctcccttgcccgacagaaccatccccactgtgaggctgtgagagatttgtggcaggaactgtttatgaggctctagttgttgctgttgtggcgggaaagttaagaaacatagcccttaaggaaaccacctttatgtattttcttaaagcacgcctttaaataagcaaaaactttaaaaggcaggaaagagaattcttaggcaaattcagagaaataagtgctagttaatactaatcacctcctcctctgtctctcatcctcctttctcccatcaaagcaaaatatggcctcaccaccagccccaaatcagtgctcagaccctctctgtgtctgtgtgccctcctgggagtcagtcagcgctcaggccaggactgtgcagggccagccagcccatgcgctagtcaggagcacaggcaaggggtgcttgtggcagtggccgggcacctgagccccagctcgttgttaaacgtgctgacggcaaggggcaatggagtgagtttcccaactaagaaaccactattatatattttttcccttcagtcacatagacttcagacaactctcctattttttatggatttttcagctcatttcagatgaaggaactaagtcattgtgaactgtctcttgagatctaaaaacaagatgacttttcctggcacatattccaaagcaaagactttgttgcctgctgcttattgtctaatttacagggatatttaattttgtcaggtctatgtatatttatccagctatacttacttgcacagtggattggagagaaaggattctccagtgtgcacactcatcggtactctttctgcatttccctcgtgctgtgtcccgctcgggttccaatggacagtatcagggcttgtttgacttaggtctttcagttttcctttcggttcccttttaaaaatgtgattgttaacctgcctcttgaaagattcaaccgggtgtggtggctcacgcctgtaatcccagcacattgggaggccaaggcaggtggatcacctgaggtcagaagtttgagaccagcctggccaacatggtgaaaccccgtctctactaaaaatacaaaaagtagccaggcgtggtggcgtgtgcctgtagtcccagctacttgggaggctgaggcaggagaatagcttgaacctgggaggtggaggctgcagtgagttgagactgcaccattgcactccagcctgggtgacaaagcaggactccgtctcaaaaaaaaagaaaagattcatgatgctgctgctcccagaaggtttgctggatgtgtttacataggactctaacttgtgtgcactacagttgttcaccagggccagtgattcaccccagtgtgtggccagaccatgactgtgtagcaggaatgttttaatttgtgcttccttagtaaattgaaatatcagctgagagattatttgctgctgttattcaaaaggccatttatgaagttagtatttgagccccataagatctttaaaaagcctccaatcatttaaaggaagaaatcagagttgctataaaattcagtaaaaagctcatagccaaacggctgtgctcagatggaaagtctgagctgaggttggtctcttgccaaaccgtggctgttgtgtgttgttcttcatgtcttcgagttcattttttttcattctgcctattctggcatcagctcacttgaggagtccctcagccttcttgtatttaaggcatcgtcttagactttgtggctctaaagtacctgtctgttgagatttcaagtctcttgtcaccatcctcacacatgacaacaaaacccataatgcataagtggcctttttgaaccaagactttgcaaactgatctctcccccgtgaaggagttgagcacattagcaacaatgtacattaattttggattttcattttcatgttttattttgtaaatattatctgatgtttggagcttgagtatacagactgtaaatatagttcttgtatttgtactaattctgattcttttgctgtatagccttagatgtgcaatgcagacactatctaactgtgtgtggtaaccttgcgtcacggagctgttagtgaacgaggtaaaaataataaaggtacagccagtgcaaaaaaaaaaaaaaaaaaaaaaaaaaaaaaaaaaaaaaaaaaaa

SEQ ID NO: 13219 - DNA, 9017 bp, Homo sapiens
cccaggggctcaagccgcacgtgagaaagtctgggcatctgggattcggagagtatagcctgtgagccgctttcccctccttactgtcggttgcatcccttcgacactcccgaggccgtcgcgggccactggccctctgcagccatgaagacaaagcccgtttcccacaagaccgagaacacctaccggtttcttacatttgctgaacgactggggaatgttaatattgatattattcaccggattgatagaactgcaagctatgaggaggaggttgaaacctacttttttgagggtctgctgaaatggagagaattaaacctcacagaacacttcggaaaattttacaaagaagttattgacaaatgccaatcattcaatcagttggtgtatcaccaaaacgagatagttcagagtttgaagactcacctgcaagttaagaacagttttgcctatcaaccccttttggatttggttgtacagttggcacgagatctgcagatggatttctacccacactttccagagttttttttgactatcacctcgatcctggagactcaggacacagagttgttagaatgggctttcacctcgttatcatatctttataagtacctgtggagactgatggtgaaggacatgtccagtatatacagcatgtacagcacactcctggctcataaaaaactacatataagaaattttgctgctgaaagttttacttttttgatgagaaaggtctctgataaaaacgcacttttcaatttaatgtttcttgatcttgataaacatccagaaaaagttgaaggtgttggacagttgctctttgaaatgtgcaaaggagttagaaatatgtttcactcctgtacaggccaggcagtgaagctaattttgcgaaagctaggaccagtcactgaaacagaaactcaactaccatggatgttaattggagaaacactcaaaaacatggtcaaatccactgtatcctacatctccaaggaacattttggtacattttttgaatgtttgcaagaatcgctcttggatctacacacaaaagtaacaaaaactaactgttgtgaaagttctgaacagattaaaaggttgttggaaacataccttatacttgtaaaacatggaagtgggacaaagatacccacgcctgctgatgtctgtaaggtgttatctcaaacactgcaagtagccagtctctccacatcttgctgggagaccctcttggatgtaatttctgctttgatcctgggtgaaaatgtttccttgccggagaccctcatcaaagaaaccatagaaaaaatatttgagagcagatttgaaaaacgtttaattttcagtttttctgaagtcatgtttgccatgaagcagtttgagcagctttttctaccaagctttctgtcatatattgtgaattgcttcttaattgatgatgctgtagtcaaagatgaagctctggccattctggccaagctcattctgaacaaagcagcacctcccactgctggctcgatggcaattgaaaagtaccctctggttttctcaccgcagatggtgggattctatataaagcagaagaagactagatccaagggaagaaacgaacagtttccagtattggaccatcttttatctataattaagttacccccaaataaagatactacttacctttcacaatcttgggcagccctcgtggtgttacctcatattagacctcttgagaaagagaaggtgataccactcgtcaccggcttcatagaggcactcttcatgactgttgacaaaggaagctttgggaaaggaaacttatttgttctttgtcaagctgtaaatactctactaagtttggaagaatcttctgaacttcttcatttggttcctgtggaacgtgtgaagaatttagtattaacctttcccctggagccatctgtgttgctgttgactgatctctattatcagagattagccttgtgtggctgcaaagggccactttcccaggaggctttaatggaattatttcccaagttacaagcaaacatttcaactggtgtatccaagattcggcttttgacaataaggatcctaaaccattttgatgtccagcttccagaatcaatggaggatgatgggctctcagagcggcagtctgtctttgctatattacgccaggcagaacttgttccagcaactgtgaatgattatagagagaagcttcttcatttgagaaaactaagacatgatgtggtacagactgctgtccctgatgggccgttacaggaggtgccgcttcgttatttgttaggcatgctatatattaatttcagtgcactctgggatcctgttattgaactcataagttctcatgcacacgaaatggaaaataagcaattttggaaagtctactatgagcatctagaaaaagcagctacgcatgctgagaaggaactacagaatgatatgacagatgagaagtccgttggagatgaaagttgggagcagacccaggaaggagatgttggagctctttatcatgagcagttagcattgaaaactgactgtcaggaaagacttgaccacaccaacttcagattcctgctctggagagctctgaccaaattcccagaaagagtagagccacggtccagggagctttccccgcttttcttgagatttatcaacaatgagtattacccagcagatctgcaagttgctccaacccaggatctacggagaaaaggcaaagggatggtggcagaggaaatcgaagaggaacctgccgcaggagatgatgaagagttggaggaagaggcagtgccccaagatgaatcctcacagaagaaaaagacgaggagagctgcagcaaagcaattaattgctcatttgcaagttttctctaaattttcaaatccacgggccttatatctggaatccaaactatatgagttatatcttcagttgttgctacaccaagatcaaatggtgcaaaaaataaccttggattgcataatgacatataaacatcctcatgtcctcccttacagggaaaacttacaaaggttgcttgaagacagaagctttaaggaagagatagtgcattttagcatttcagaagataatgctgtagtgaaaacagcccaccgagcagatctatttcctattctgatgagaattttgtatgggcgaatgaagaataagactgggagtaaaactcaggggaaatctgcttcaggcacccgcatggccattgtcctgcggttcctggccgggacccaacctgaggagatccagatattcttagacctgctgtttgaacctgtgaggcatttcaagaatggagagtgccattctgcagtcattcaagcagtagaagacttggatttgtctaaagttcttcctttaggtcgtcagcacggtatcttaaacagccttgagatagtattgaaaaacattagtcatctgatcagcgcatacctgccgaagattttgcagatactgctctgtatgacagcaaccgtatcacacatccttgaccaacgagaaaagatacagctgagatttattaatccattgaaaaatttaagacgtcttggaatcaaaatggtaactgatatctttttggactgggaatcatatcagtttagaacagaagaaattgatgctgtgtttcatggtgcagtttggccccagatcagcaggcttggatctgagagtcaatattctcctactcctctgctgaaactgatcagtatctggagcagaaacgcaagatatttccctttgctggctaaacagaagcctgggcacccagaatgtgatatcctgaccaatgtttttgcaattctctcagcgaagaatctttctgatgccacagccagtattgtaatggacatagttgatgaccttcttaaccttccagatttcgagcctacagaaacagttttgaacttgctggtaactggatgtgtataccctggcatagcagaaaacatcggtgagtctatcacaataggaggaagattaattctacctcatgtacctgcaattcttcagtatctcagcaaaaccacaataagcgcagaaaaggtgaaaaagaaaaagaatagagcacaagtcagtaaagagcttggcattctttcaaagatcagcaagtttatgaaagacaaagaacaaagttctgtactcattacgcttctccttccattcctccaccgtggcaatattgctgaggatacagaggttgatattctggtgacagtacaaaacttgttaaagcattgtgtggaccctacaagcttcctcaagcctatagcaaaacttttctcagttattaagaacaaattgtcaagaaaattgctttgtacggtttttgagactctttctgattttgagagtgggttaaaatatattactgatgttgtcaagcttaacgccttcgatcaaagacatcttgatgatatcaacttcgacgttcgctttgagactttccagaccatcacctcttacattaaagaaatgcaaattgtggatgttaactacctaattccagttatgcataattgtttctataatctagagttaggagatatgagtttaagtgataatgccagcatgtgcctgatgagtatcatcaaaaagctacctgccttgaatgtcacagagaaagactatagagaaatcatccaccgttcactcctggagaaattgagaaaaggtctgaagagccagacagagagtattcagcaggattataccacaatactttcctgtttaattcaaacctttccaaaccaactggaattcaaagacttggtacaacttactcattaccatgacccagaaatggacttctttgagaacatgaagcacattcagatccacagaagagcaagagccttgaagaaacttgcaaaacaactaatggaaggcaaagttgttctgtcttctaaatctcttcagaattacatcatgccttatgccatgactccaatttttgatgagaaaatgctcaagcatgaaaatataaccactgctgccacagagattattggagccatttgcaaacatctctcttggtcagcgtatatgtattacttgaaacatttcattcatgtcttacaaacgggacagatcaatcaaaaactgggtgtcagtttgctagtaatagtgttagaagcattccactttgaccacaaaactcttgaagaacaaatgggaaaaattgagaatgaagaaaacgcaattgaagcaattgagttaccagagcctgaggccatggaattagagcgtgtggatgaggaagagaaggaatatacatgcaagagtttgtcagacaacggacaaccgggaacccctgatccagctgactctggaggaacatcagctaaagaatccgagtgtatcacaaagcctgtctctttccttcctcaaaacaaggaagaaatagagagaacaattaaaaatatccaaggaaccataaccggggatattctccccaggctacataaatgccttgcatctacgactaaaagggaagaagaacacaagcttgtcaagtcaaaggttgtgaatgatgaggaagtcgttcgagttccattagcttttgccatggttaaactaatgcagtcccttccacaagaagttatggaagctaatctgccaagtattttgctgaaagtgtgtgccctactcaagaacagagcccaagaaatcagagacattgcacgcagcactcttgcgaaaataatagaggatcttggtgtgcacttcctccaatatgttttaaaagaattacagactactcttgtccgtggataccaggtccatgtgctgactttcaccgttcacatgctgctgcaaggcctcaccaataagctgcaggtcggagatctggactcttgtttagatataatgattgagatttttaaccatgagttgtttggtgctgttgctgaagagaaggaagtaaagcagatcctctccaaagtcatggaagcacgaagaagcaaaagttacgactcttatgaaatcctcggcaagtttgtaggaaaagatcaggttacaaaactcatccttccattaaaagagatcttacaaaataccacgagtttgaaactggcccggaaagttcatgaaactttacgccgaatcacagtgggattaattgtaaatcaggaaatgacagctgaatccattctattactcagttatggtttgatcagtgaaaatcttcccctgttaacagagaaagaaaaaaatccagtagccccagcaccagatccacgtctaccaccccagagctgccttctgcttcccccaactccagttcgaggtggacagaaagctgttgtgagcaggaaaaccaacatgcacatatttattgagtccgggcttcggctgctgcatctgagtctgaagacttccaagatcaagtcttcaggtgaatgtgtcctggaaatgctggatccttttgtgtctctcctcatagactgcctgggctccatggatgtgaaggtgatcacaggtgctttacagtgcctcatctgggtcttgaggttcccgctaccttccatagaaacaaaagcagagcagctgacaaaacacctcttccttctgctgaaggactatgcaaagctcggggccgccaggggccagaacttccaccttgtggtcaattgtttcaagtgtgtgaccatacttgtcaagaaagtcaagtcttaccagataactgaaaaacagctccaagttctactggcctatgctgaggaggacatttatgatacttcaagacaagccactgcctttggtcttctgaaggcaattttatcaagaaagctgttggtcccagaaatcgatgaggtcatgcggaaagtatccaagttggcagtctctgcacaaagcgaacctgccagggtccagtgtagacaggtttttctgaaatatattcttgactatcccctgggtgacaaattgagaccaaacttggaattcatgctcgctcaactgaattacgaacatgagaccgggagagagtccaccttggaaatgatcgcctatctctttgacacgttccctcaggggctgctccatgagaactgcggaatgttctttatccctctttgtctaatgacgatcaatgatgactctgccacgtgcaaaaagatggcatccatgacaatcaagtccctacttggtaaaatcagcctcgagaaaaaagattggctgtttgatatggttaccacttggtttggagcaaaaaagcgcttaaatagacaacttgctgccctgatctgtggcttgtttgtggaaagtgaaggagttgattttgagaaaagacttggaactgtccttcctgtgattgaaaaggaaattgatcctgaaaactttaaagatatcatggaagaaactgaagaaaaagctgcagatcgccttctgtttagttttcttacactgataactaaacttatcaaggaatgtaatattattcagtttaccaaacccgctgagactttgagtaaaatctggagtcatgtgcattctcacctgagacatccacacaactgggtgtggctcacagcagcccagatttttggattactctttgcctcttgccagccagaggagcttattcaaaaatggaataccaaaaagaccaaaaaacacctcccagaacctgtagcaatcaagttcctagccagtgaccttgaccaaaagatgaaaagtatctctctcgcctcttgccatcaattgcattccaaattcttggatcagtctctaggagaacaggttgttaagaatttgttgttcgcagccaaagtcttgtatttactggaactttattgtgaggataagcaaagtaagataaaagaagacctggaagaacaagaagctttagaagatggtgtggcctgtgcagatgagaaggcggagtctgacggagaagagaaggaagaggtgaaggaagagctcggcaggccggccacgctgctgtggttgatccagaagctgtcccggattgcaaaactggaagctgcttattcgccgagaaaccccttaaagagaacatgcatctttaagttcctcggcgccgtagcaatggatcttgggatagacaaggtaaagccgtatctcccaatgatcatagctcctttgtttcgggaactcaacagcacctattcagagcaagatcctttgctgaagaatctatcccaggaaatcatagaattactcaaaaagctggttgggcttgagagcttctcattagcctttgcctctgtacagaaacaggctaatgagaaaagggcactccggaaaaagaggaaggccctggagtttgtaactaatcctgatattgctgccaagaaaaaaatgaagaaacacaaaaataaaagtgaagcaaagaagagaaagatagagttcctgcgtccaggatataaggccaagagacaaaaaagccatagcctgaaagatttagcaatggtggagtaatgtctccctgtgctgatacaagcatgaactttctggaatattctgctagtctgaaattacagcaggttgtctggggtagggggaggcgttttttttttgagacaaggtctcactctgtcacccaaggcggagtgcagtgacgacatcacagctcactgcagcctcaacctgggttcaagtgatcctctcacctcagcctcccaagtagttgtgcctcctaggcacacaacactatgcccggcaaattttttgtattttgtattttttgtagaaacaggatttcgccatgttggccaggctggtctcgaacacctgggctcaactgatccgcctgcctcggcctcccaaagtgctgggattataggtgtgagccaccctgctcaaccaggttttattatttaagttagttaaactttggatagattgtataatatatagtttaatgtaatcatgctcatattttttaaataaataaaacactatagtaaaaaaaaaaaaaaaaaaaaaaaaaaaaa

SEQ ID NO: 13220 - DNA, 2652 bp, Homo sapiens
ctaaatttatcttcagaccggcgaccgcgccagccgcgaatcggatctctatggagatggcctaggcgatatccctgagctgagagcatcaccctgtccccgaatccttctttcctctctgttttgtttttcattcccctccctctctcccctccccctccagtccacgacgactggctgttgaccctgttcaggcctcggtgaaggcttttggttactccccttcccaccccatcccttaattttattcttttgaagagtgcatttcaagctgccaaggtggagagagggattacagaaaggagaacaccttatttcagcttttatttttatgtgataatctacctttaagaaaaggtgtaccatacctgagagcaccaggaagtcgcatgagagatcacctgatacatgaacgtatgatgttccatctgcgcattgatgaataggcagcatttacaaattaactgatgtgttgctgtatatcatctctttgatgattgctcctcttctttgtatcctgtcttataatttcaacacatttgcgatactcaatgtctattctaaattaaccatgttttgtaccacaaactcattgcccatggatctgttgctgaaacaaggaagtcttaaacaagaagtggaatctttctgttatcagattgtgtctgaatcaaatgatcagaaggttggaatattacaaagtgaagataagcagttgcaaccttcagtttctaaaaaatcagaaggtgagctttccagggtcaaatttatatccaattccaacaaaataacatttagtaaaaaaccaaaaagaagaaaatatgatgaaagttatttgtcttttggatttacttacttcggaaatagagatgcacctcatgctcagtgtgtattatgtaagaaaattttatcaaatagctctttagcccctagtaagcttcgaagacatttggaaactaaacatgctgcatataaagacaaagacataagctttttcaagcaacatctcgattcacctgaaaataataaacccccaacacctaaaattgtgaatacagataatgaaagtgctacagaagcatcatacaatgtaagttaccatatagcgctgagtggagaggctcatactattggagaattgcttatcaaaccttgtgcaaaagatgtagtgatgcggatgtttgatgaacaatatagtaaaaaaatagatgcagtacagctatcaaacagtactgttgcacgtcgaattaaggatctagctgctgacattgaagaagagcttgtttgtagactgaaaatttgcgatgggttttcactgcaactagatgaatcagctgatgtttcaggacttgctgtgctgcttgtgtttgttcgttataggtttaataagtctattgaggaagacctactcctgtgtgaatctttgcaaagtaatgctaccggtgaagaaatattcaactgtatcaacagttttatgcagaaacatgaaattgaatgggaaaaatgtgttgatgtttgtagtgatgcttctagggcagtggatgggaaaattgccgaagctgtcaccttaataaaatatgtggctcccgaaagcaccagtagtcactgcctattatacagacatgcactggcagttaaaataatgcctacatctctaaaaaatgtgctagaccaggcagtacaaatcatcaattatattaaagctcgaccacatcaatccagactattaaaaattttatgtgaggaaatgggtgctcagcacacagcacttcttctaaatacagaggtgaggtggctttctcgaggtaaagttcttgtaagactttttgaacttcgtcgtgaacttttggttttcatggattctgcttttcgactatctgattgtttaacaaattcatcttggctgctaagacttgcatatcttgcagatatttttactaaattaaatgaagttaatttgtcaatgcaaggaaaaaatgtgaccgtttttacagtatttgataaaatgtcgtcattgttaagaaaattggaattttgggcctcatctgtagaagaagaaaactttgattgttttcctacactcagtgattttttgactgaaattaattctacagttgataaagatatttgcagtgccattgtgcagcacctaaggggtttgcgcgctactctgttaaaatactttcctgtaacaaatgacaataatgcttgggttagaaatccatttacagttactgttaaaccagcttcattagtagcacgggactatgagagcctgattgatttaacatctgattctcaagtgaagcaaaattttagtgaactttcactaaatgatttttggagtagcctaattcaggaatacccaagcattgcaaggcgtgcagtgcgtgtacttcttccttttgctacaatgcacctgtgtgaaacggggttttcatattacgctgcaacaaaaacaaaatataggaaaagacttgatgctgcacctcatatgcgaatccgacttagcaatattacacctaatattaagcggatatgtgataaaaagacacaaaaacactgttctcattaaaattggaggagtttgcatgtctcatgataaccaaatgtaagatgaaaataaaagatgatttacttcaaaaaaaaaaa

SEQ ID NO: 13221 - DNA, 4369 bp, Homo sapiens
gcggcggcgggcgggtactggcttctggggccaggggccaggggcggtgggcgccgggaccgcggagctgaggagcggggcccggccagggctggagactttgcgcccgggggcaccggggctgcgcgcggtcgcacacatccaccggcgcggcttccctcggcggcccgggctccgctcatcctgcggcgggcggcgccgctcaggggcgggaagaggaggcggtagacgcgaccacagaagatgtcgggccaaacgctcacggatcggatcgccgccgctcagtacagcgttacaggctctgctgtagcaagagcggtctgcaaagccactactcatgaagtaatgggccccaagaaaaagcacctggactatttgatccaggctaccaacgagaccaatgttaatattcctcagatggccgacactctctttgagcgggcaacaaacagtagctgggtggttgtgtttaaggctttagtgacaacacatcatctcatggtgcatggaaatgagagatttattcaatatttggcttctagaaatacactattcaatctcagcaattttttggacaaaagtggatcccatggttatgatatgtctaccttcataaggcgctatagtagatatttgaatgaaaaggctttttcttacagacagatggcctttgattttgccagggtgaagaaaggggccgatggtgtaatgaggacaatggctcccgaaaagctgctaaagagtatgccaatactacagggacaaattgatgcactgcttgaatttgatgtgcatccaaatgaactaacaaatggtgtcataaatgcagcatttatgcttcttttcaaagatcttatcaaactttttgcttgctacaatgatggtgttattaacttactcgaaaagttttttgaaatgaagaaaggacaatgtaaagatgctctagaaatttacaaacgatttctaactagaatgacacgagtgtctgaatttctcaaggttgcagagcaagttggtattgataaaggtgacattcctgacctcacacaggctcccagcagtcttatggagacgcttgaacagcatctaaatacattagaaggaaagaaacctggaaacaatgaaggatctggtgctccctctccattaagtaagtcttctccagccacaactgttacgtctcctaattctacaccagctaaaactattgacacatccccaccggttgatttatttgcaactgcatctgcggctgtcccagtcagcacttctaaaccatctagtgatctcctggacctccagccagacttttcctctggaggggcagcagcagccgcagcaccagcaccaccaccacctgctggaggagccactgcatggggagaccttttgggagaggattctttggctgcactttcctctgttccctctgaagcacagatttcagatccatttgcaccagaacctacccctcctactacaactgctgaaattgcaactgcctcagcttctgcctccactactacaactgttactgctgtcactgctgaagtggatctctttggagatgcctttgcagcttctcctggggaggcccctgcagcatccgaaggggccgccgcaccagctaccccaacccctgtagcagcagcacttgatgcatgttcaggaaatgacccctttgccccgtctgaaggtagtgcagaggctgcacctgagctggacctctttgcaatgaagccacctgagaccagtgttcctgtagttacccctacagctagcacagcccctccggttcccgcaactgctccttctcctgctcctgccgttgcagctgctgctgctgccactactgctgccaccgccgctgccaccaccactaccaccacctccgctgccaccgccaccactgctcctcctgctctagatatctttggtgatttatttgagtccactcctgaagttgctgcagcgcctaagccagatgctgctcctagcatagacctgtttagtacagatgctttctcctctccaccacaaggggcctctcctgtgcctgagagttctctcactgctgacctcttatctgtggatgcatttgcagcaccatctcctgcaaccactgcctcgccagcaaaggtggattcttcaggtgtcatagacctttttggggatgcatttggaagtagcgcttctgaaccccaacctgcatctcaggctgcttctagttcatcagcatcggcagacctactagctggatttgggggttctttcatggcgccttccccatctccagtgactccagctcagaataacctgctacagcccaattttgaggcagcttttgggacaacgccttcaacttccagcagcagctcctttgatccatcagtgtttgatggtctaggtgatcttttgatgccaaccatggcaccagctgggcagcctgcacctgtctcaatggtaccacccagtcctgcaatggcagccagcaaagcccttggaagtgatcttgattcatctcttgccagcttagtaggcaatcttggaatttctggtaccacaacaaaaaagggagatcttcagtggaatgctggagagaaaaagttgactggtggagccaactggcagcctaaagtagctccagcaacctggtcagcaggcgttccaccaagtgcacctttgcaaggagctgtacctccaaccagttcagttcctcctgttgccggggccccatcggttggacaacctggagcaggatttggaatgcctcctgctgggacaggcatgcccatgatgcctcagcagccggtcatgtttgcacagcccatgatgaggcccccctttggagctgccgctgtacctggcacgcagctttctccaagccctacacctgccagtcagagtcccaagaaacctccagcaaaggacccattagcggatcttaacatcaaggatttcttgtaaacaatttaagctgcaatatttgtgactgaataggaaaataaatgagtttggagacttcaaataagattgatgctgagtttcaaagggagccaccagtaccaaacccaatacttactcataacttctcttccaaaatgtgtaacacagccgtgaaagtgaacattaggaatatgtactaccttagctgttatccctactcttgaaattgtagtgtatttggattatttgtgtattgtacgatgtaaacaatgaatggatgttactgatgccgttagtgcttttttggacttcacctgaggacagatgatgcagctgttgtgtggcgagctatttggaaagacgtctgtgtttttgaaggtttcaatgtacatataacttttgaacaaaccccaaactcttcccataaattatcttttcttctgtatctctgttacaagcgtagtgtgataataccagataataaggaaaacactcataaatatacaaaactttttcagtgtggagtacatttttccaatcacaggaacttcaactgttgtgagaaatgtttatttttgtggcactgtatatgttaagaaattttattttaaaaaatataaaggttaacgtccataataaatacttctctttgaagctaccttatcaagaacgaaaaatcgtatgggaagaatcccctatttatcactgctatattaaaatatatatattttaattatatttgacaggttttgcatctaaattgacctatttattcattcttgattaaatgcactgaaaagtaaagggtctgtttgtgtcatgttcatgaaaatgcggttagagaggtgctattcaagtgattctgaaggcaccccaaggtatatctgtaatttaaagattactgcaaatatctttactttactgtgggtttttagtacatctgttaatttagtgtttctttgtgtgttttgtagactagtgttcttccatccttcaactgagctcaaagtaggttttgttgtaacattgtgattaggatttaaactaattcagagaattgtatcttttactgtacatactgtattctttaagttttaatttgttgtcatactgtctgtgctgatggcttggcttaagattttgatgcataaatgaggtcactgttgatcagtgttgctagtagcttggcagctcttcataaaagcatattgggttggaaaggtgtttgcctatttttcaaattatttaatagatgtatggtaccatttaaaagtggttgtatctgaatttactgtggggataacatacactgtaatggggaaaaattacctaaaaccaatttcaaaatggctttctttgtatttcagtttaaaaacccagtgcatgtacgccctctgagatgcaataaacaccttgaacaaag

SEQ ID NO: 13222 - DNA, 3527 bp, Homo sapiens
actgaaagctccggtgccagaccccacccccggccccggcccgggaccccctcccctcccgggatcccccggggttcccaccccgcccgcaccgccggggacccggccggtccggcgcgagcccccgtccggggccctggctcggcccccaggttggaggagcccggagcccgccttcggagctacggcctaacggcggcggcgactgcagtctggagggtccacacttgtgattctcaatggagagtgaaaacgcagattcataatgaaaactagcccccgtcggccactgattctcaaaagacggaggctgccccttcctgttcaaaatgccccaagtgaaacatcagaggaggaacctaagagatcccctgcccaacaggagtctaatcaagcagaggcctccaaggaagtggcagagtccaactcttgcaagtttccagctgggatcaagattattaaccaccccaccatgcccaacacgcaagtagtggccatccccaacaatgctaatattcacagcatcatcacagcactgactgccaagggaaaagagagtggcagtagtgggcccaacaaattcatcctcatcagctgtgggggagccccaactcagcctccaggactccggcctcaaacccaaaccagctatgatgccaaaaggacagaagtgaccctggagaccttgggaccaaaacctgcagctagggatgtgaatcttcctagaccacctggagccctttgcgagcagaaacgggagacctgtgcagatggtgaggcagcaggctgcactatcaacaatagcctatccaacatccagtggcttcgaaagatgagttctgatggactgggctcccgcagcatcaagcaagagatggaggaaaaggagaattgtcacctggagcagcgacaggttaaggttgaggagccttcgagaccatcagcgtcctggcagaactctgtgtctgagcggccaccctactcttacatggccatgatacaattcgccatcaacagcactgagaggaagcgcatgactttgaaagacatctatacgtggattgaggaccactttccctactttaagcacattgccaagccaggctggaagaactccatccgccacaacctttccctgcacgacatgtttgtccgggagacgtctgccaatggcaaggtctccttctggaccattcaccccagtgccaaccgctacttgacattggaccaggtgtttaagccactggacccagggtctccacaattgcccgagcacttggaatcacagcagaaacgaccgaatccagagctccgccggaacatgaccatcaaaaccgaactccccctgggcgcacggcggaagatgaagccactgctaccacgggtcagctcatacctggtacctatccagttcccggtgaaccagtcactggtgttgcagccctcggtgaaggtgccattgcccctggcggcttccctcatgagctcagagcttgcccgccatagcaagcgagtccgcattgcccccaaggtgctgctagctgaggaggggatagctcctctttcttctgcaggaccagggaaagaggagaaactcctgtttggagaagggttttctcctttgcttccagttcagactatcaaggaggaagaaatccagcctggggaggaaatgccacacttagcgagacccatcaaagtggagagccctcccttggaagagtggccctccccggccccatctttcaaagaggaatcatctcactcctgggaggattcgtcccaatctcccaccccaagacccaagaagtcctacagtgggcttaggtccccaacccggtgtgtctcggaaatgcttgtgattcaacacagggagaggagggagaggagccggtctcggaggaaacagcatctactgcctccctgtgtggatgagccggagctgctcttctcagaggggcccagtacttcccgctgggccgcagagctcccgttcccagcagactcctctgaccctgcctcccagctcagctactcccaggaagtgggaggaccttttaagacacccattaaggaaacgctgcccatctcctccaccccgagcaaatctgtcctccccagaacccctgaatcctggaggctcacgcccccagccaaagtagggggactggatttcagcccagtacaaacctcccagggtgcctctgaccccttgcctgaccccctggggctgatggatctcagcaccactcccttgcaaagtgctcccccccttgaatcaccgcaaaggctcctcagttcagaacccttagacctcatctccgtcccctttggcaactcttctccctcagatatagacgtccccaagccaggctccccggagccacaggtttctggccttgcagccaatcgttctctgacagaaggcctggtcctggacacaatgaatgacagcctcagcaagatcctgctggacatcagctttcctggcctggacgaggacccactgggccctgacaacatcaactggtcccagtttattcctgagctacagtagagccctgcccttgcccctgtgctcaagctgtccaccatcccgggcactccaaggctcagtgcaccccaagcctctgagtgaggacagcaggcagggactgttctgctcctcatagctccctgctgcctgattatgcaaaagtagcagtcacaccctagccactgctgggaccttgtgttccccaagagtatctgattcctctgctgtccctgccaggagctgaagggtgggaacaacaaaggcaatggtgaaaagagattaggaaccccccagcctgtttccattctctgcccagcagtctcttaccttccctgatctttgcagggtggtccgtgtaaatagtataaattctccaaattatcctctaattataaatgtaagcttatttccttagatcattatccagagactgccagaaggtgggtaggatgacctggggtttcaattgacttctgttccttgcttttagttttgatagaagggaagacctgcagtgcacggtttcttccaggctgaggtacctggatcttgggttcttcactgcagggacccagacaagtggatctgcttgccagagtcctttttgcccctccctgccacctccccgtgtttccaagtcagctttcctgcaagaagaaatcctggttaaaaaagtcttttgtattgggtcaggagttgaatttggggtgggaggatggatgcaactgaagcagagtgtgggtgcccagatgtgcgctattagatgtttctctgataatgtccccaatcataccagggagactggcattgacgagaactcaggtggaggcttgagaaggccgaaagggcccctgacctgcctggcttccttagcttgcccctcagctttgcaaagagccaccctaggccccagctgaccgcatgggtgtgagccagcttgagaacactaactactcaataaaagcgaaggtggacaaaaaaaaaaaaaaaa

SEQ ID NO: 13223 - DNA, 3579 bp, Homo sapiens
gatgacgtaggctgcgcctgtgcatgcgcagggaggggagaccttggcggagcggcggaggcgcccagcggaggtgaaagtattggcggaaaggaaaatacagcggaaaaatgcagagctggagtcgtgtgtactgctccttggccaagagaggccatttcaatcgaatatctcatggcctacagggactttctgcagtgcctctgagaacttacgcagatcagccgattgatgctgatgtaacagttataggttctggtcctggaggatatgttgctgctattaaagctgcccagttaggcttcaagacagtctgcattgagaaaaatgaaacacttggtggaacatgcttgaatgttggttgtattccttctaaggctttattgaacaactctcattattaccatatggcccatggaaaagattttgcatctagaggaattgaaatgtccgaagttcgcttgaatttagacaagatgatggagcagaagagtactgcagtaaaagctttaacaggtggaattgcccacttattcaaacagaataaggttgttcatgtcaatggatatggaaagataactggcaaaaatcaagtcactgctacgaaagctgatggcggcactcaggttattgatacaaagaacattcttatagccacgggttcagaagttactccttttcctggaatcacgatagatgaagatacaatagtgtcatctacaggtgctttatctttaaaaaaagttccagaaaagatggttgttattggtgcaggagtaataggtgtagaattgggttcagtttggcaaagacttggtgcagatgtgacagcagttgaatttttaggtcatgtaggtggagttggaattgatatggagatatctaaaaactttcaacgcatccttcaaaaacaggggtttaaatttaaattgaatacaaaggttactggtgctaccaagaagtcagatggaaaaattgatgtttctattgaagctgcttctggtggtaaagctgaagttatcacttgtgatgtactcttggtttgcattggccgacgaccctttactaagaatttgggactagaagagctgggaattgaactagatcccagaggtagaattccagtcaataccagatttcaaactaaaattccaaatatctatgccattggtgatgtagttgctggtccaatgctggctcacaaagcagaggatgaaggcattatctgtgttgaaggaatggctggtggtgctgtgcacattgactacaattgtgtgccatcagtgatttacacacaccctgaagttgcttgggttggcaaatcagaagagcagttgaaagaagagggtattgagtacaaagttgggaaattcccatttgctgctaacagcagagctaagacaaatgctgacacagatggcatggtgaagatccttgggcagaaatcgacagacagagtactgggagcacatattcttggaccaggtgctggagaaatggtaaatgaagctgctcttgctttggaatatggagcatcctgtgaagatatagctagagtctgtcatgcacatccgaccttatcagaagcttttagagaagcaaatcttgctgcgtcatttggcaaatcaatcaacttttgaattagaagattatatatatttttttctgaaatttcctgggagcttttgtagaagtcacattcctgaacaggatattctcacagctccaagaatttctaggactgaattatgaaacttttggaaggtatttaataggtttggacaaaatggaatactcttatatctatattttacataaatttagtattttgtttcagtgcactaatgtgtaagacaaaaagctacttattgtagcatcctggaatatctccgtcaactcatattttcatgctgttcatgaaagattcaatgcccctgaatttaaatagcttttttctctgatacagaaaagttgaattttacatggctggagctagaatttgatatgtgaacagttgtgtttgaagcacagtgatcaagttatttttaatttggttttcacattggaaacaagtcagtcattcagatatgattcaaatgtctataaaccgaactgatgtaagtaaacggtctctcacttgttttatttaacctctaaattctttcattttaggggtagcatttgtgttgaagaggttttaaagcttccattgttgtctgcaactctgaagggtaattatatagttacccaaattaagagagtctatttacggaactcaaatacgtgggcattcaaatgtattacagtggggaatgaagatactgaaataaacgtcttaaatattcatttactggttatcatgagtacgtgttgagatggtcatagttttttttatgactacttctagtgtatattctaatttcttttctaggcctgaatgtatctttattttcatgttataggacaatattaaggcattttaaaggtcatcatcctttcatctattttagatacacctactaaatgtttaatatatacttttggagaagtacaacataagggagtctttaatctgtgttttccttggctgggttaatgactgtttatttaaagagtgttgtaaaattggatgtgtggtgtttaaaatggccatgtcctgaggaaacttaagtaacaaagtactaaatgctaagtaggcttttgcatattgtaactaaatttaagaataattcagattaagtagttctgaaatttggtatagatagcatagattgtctcatgctcatgagtgacataatgaccctggattctgttacatacttctaaagaaaattgattgttgtcttaggaggcagttaacttggctgaacaccaactccacactctgtcttgtttgtaggtggcagcagctgaaatctcttctcagttgttttagctttagctatgctgctggaagtctttcccatgcaagtgtgtagttcaggggtcaaccagagtttgggcagaaggaagtctgccccttctgtgcctcctgttttttgggggtttcccctttatgttccagctgttgtggttgccccatattctgccttctgatccttaaccaataaaacttggcttttgtttccccctcaagtgagaacccgttaaaaatgagacattgagccagtgctgttcactttttaagtgccaacttccctctactttccacttgtttatagttgtttccagtgcctttagttttttctaaaatatatttgttcagagtttgcagttgctatcagcaggagggttggtctgatatctgtgtgctactttgccattattggaagtgaactctgcatctttttaaaaatttgaaatcccggtatcatgtgaagtgctgtttatgtaaatctcaacatatcccttactcagggaaaaaaaagtttttagttagggaatagtgaaatataatttaatatggaattctagctgtagagttaaatccatctttaagtgtttacattcagtatgagaatgcaaatttatctgtatggggaataaagtcctaggaataaaacaagttttaagtgttca

SEQ ID NO: 13224 - DNA, 2886 bp, Homo sapiens
tctgcgctgaaggagcacttccggggcagtaggaacgccgagtcggctgccgtggctgtgctgagggtggcggccggatagctgatgttctaatcatgtcagataaagatgatattgagactccactgctaactgaagcagcccccatccttgaagatggaaactgtgagccagccaagaattctgagtctgttgaccaaggtgccaaaccagagagtaaatcagaacctgtagtttccactcggaaaagaccagagaccaaaccttccagtgaccttgagacttcaaaagttctccctattcaggataatgtttccaaagatgtaccccagaccagatggggttattgggggagctggggcaagtccatactctcctcagcctcggctacagtagctacagtaggacaaggcatttcaaatgtcatcgagaaggcagagacttcccttggaatccctggtcccagtgaaatttcaactgaagtcaagtatgtagcaggagagacaaatgccaaagagaatgaaaactcctccccagtggctggggcatttggtgtattctctaccatctctactgctgttcagagcacaggaaagagtgttataagtgggggtttggatgccttagaattcattggaaaaaagacaatggatgtgatagcagaaggggatcctggatttaaaagaaccaagggtctgatgaaccgaaatgctacactatctcaggttttacgagaggcgaaggagaaagaagagatacggacctccaatgaggttaccgtggaaacagacaagaaaactcattatgggctactctttgatgaatttcaaggcctttcacatctagaagctctggagatgctttcccaagaaagtgaaataaaggtgaaatctatccttaattctctgagtggagaagaattagagactctaaaagttgaattagagcaactcaaagaaacattttctctagcagaattttgtgaagaagaggaagaagagaaaaaaggggatgaagattttaccaaggacataacagagctgttttcccagctgcacgtttcctccaaaccagagaaacttgccagggcaagaaataccgcccacgaatggatcaggaagtctctgaccaagccattagcagagaatgaagaaggagaaaaacagtcggaagcagaaaatactgagcaagtcaacaaaaattcaatagaggatatccatgcgtttgcaatccggagcctggctgaactgactgcctgctcaattgaactattccacaaaacagctgcattggttctgcatggcaggaagcaggaagtgacagccatagaaaggagccaaactctttcccagatgacaattgtgttgtgtaaagagttgtcctctctgtctaaagagttcactacctgcctaacaactgctggggtcaaagaaatggcagatgtccttaacccattaatcactgcagtatttctagaggcatcaaacagtgcctcctacatccaggacgcctttcagctactcttacctgtgctagagatctctctcattgagaacaagattgaatcacacagacatgagctgcagggccagaaacctttgttagaacattgaagaatggagacgttttgacctgggacttgtgacggccaaggaatgccaccttattctggctactcctgcagaaatgaaggagtggggttattttagtatataaaaattcaggcaggagagatggtttaaagaggaagattgttgccttcagtgtttgattgaagtattcaggttctcacagtattctttccagttgttgtaattcataaattatttgaaaagaaacttttgtagaaagtccaagaataataactctagataaagattagtgggacactcaggcaaaaatgttggtctttctttgacatgttgcaaaatgttatcaattttgtcatggatataatttgcagcccatggatataactggttgataagccagagaaaaataatttagtgttctaaaattcatggcatgtgtggtttattaatgccatgtactttctcctttctggaataaaatctatggctttaagaaaactgagcatatgtaaactctgtgatgattaccctttatcacatgaattcttggaaatagaaagtttcatctgcttttttaaattcttagtagatatttggcattgaggagaaacttgtagactattatagccatgtgaattaactgtagcaaagtgccctttttcttcaaattgctccccctccccaggatgacacacttcatgtcatagctgaaccctactctactggattcaaggccagtaaatgcaatttagagaagcagttttatgtttgcagatattctgagtctcttcaggatgtgtttcgtgtctaccatatatgcaggataaattctttaacagcaaactccaaaggaatgttgaagctgttttagcaatgaggatttttttgtttgagtgttgaagtgggccatagtcctttagaaatgatgttcatttatgataggatttaacttctaaggcatagtttattttttcctctttcctttttgtttgttttaatgtattctttagcatgtttttgatataacttttatcctccagatcttaagctttcttttgctctcttcagcaatttaagagactattaagctgtcgtcttcctaaaagctattttggtatccactctttttaaaaaaattctccaactttgtggttttttaatgattaaggtaatttgttagctctgcccctcatcttctaaaacctttgtaataaaatgtattaatcatgttatttgatcctttcatttacttttgtaaacacgagccctaatatcttacttagaccaaaaaaaa

SEQ ID NO: 13225 - DNA, 3591 bp, Homo sapiens
ggcttccggtccgcgagccctgagagctaacttggggtcttttcccaaggtggatgtagaagcgggctccggcgtcccactctcccttccatatgggcttagcgtctgggtcactgagaacgacgtctgaatagggccctgggtccttgccatggatgaatgtggttcccgcatccgccggcgggtgtctctccccaaaaggaaccgtccaagcttggggtgtatttttggcgctcccaccgcggccgagctcgagcccggagatgaggggaaagaggaggaggaaatggtggctgagaacaggaggcggaaaaccgcgggcgtactgccggttgaggtacagccccttctactctcagattccccggaatgtctcgtccttggaggtggtgatacaaacccggacctcctacgtcacatgcccactgacagaggggtgggagaccagcctaatgacagtgaagtggacatgtttggtgactatgatagctttactgaaaactcctttatagctcaagttgacgacctggaacaaaaatatatgcaactccctgaacataagaaacatgctacagactttgccactgaaaatctttgctcggaaagtatcaaaaacaaactcagcattactaccataggcaaccttactgaattacaaactgataagcacacagagaaccagagtggatatgaaggtgtcactattgaacctggagctgatcttttgtatgatgtaccttcctcacaggctatatactttgaaaatttgcagaactcttcaaatgatttgggtgatcattctatgaaagaaagggattggaagtcatcctctcacaacactgtgaatgaggaactgccccataattgcatagagcaaccccagcaaaatgatgagtcctcttccaaagtcagaactagttcagatatgaacaggagaaaaagtattaaagatcatctaaaaaatgccatgactggaaatgcgaaggcccagacaccaatattttctagaagtaaacagctcaaagacactctcctatctgaggaaattaatgttgctaagaaaacaattgagtcatcatcaaatgaccttggtcctttttattcattacccagcaaagtgagagacctttatgcccaattcaagggaattgaaaaattatatgaatggcaacatacttgtttaacactgaattctgtgcaagaaagaaaaaatttaatatattccttgccaacaagtggtggaaaaaccctcgtggctgagattttaatgctgcaagaactgctttgctgtcggaaagatgttttaatgattcttccatatgtggcaattgtccaagaaaagatttcaggtttgtcaagttttggtatagaactcggtttctttgttgaagaatatgctggaagcaaaggaagatttcctccaactaaaagaagggaaaagaaatcactctatattgccactattgaaaaaggacatagcttggtgaactccttgattgaaactggaagaattgacagtctgggtctggttgttgtagacgagttgcacatgattggtgaaggaagccgtggagctacactggaaatgaccctagcaaaaatcctctacactagcaaaacgactcaaattatcggtatgagtgcaacattaaacaatgttgaagacctacaaaagtttcttcaagcagaatattataccagtcaatttagaccagttgagttaaaagaatatctgaaaataaatgatacaatatatgaagttgacagcaaagctgagaatggcatgactttttcacgtcttcttaattataagtattctgataccctaaaaaagatggatcctgatcacttggtagcattggtgacagaagttattcccaattattcctgcttagttttttgtcctagtaagaagaactgtgaaaatgtagcagaaatgatatgcaaatttttaagcaaggaatatctgaaacataaggagaaagaaaaatgtgaggtgattaagaacttgaagaatattggcaatggcaacctgtgtcctgttttaaagcgcactatcccatttggagttgcctatcaccacagtggcttaacaagtgatgaaaggaaactcttggaggaggcctactccacaggagtgctctgtctttttacctgcacatctaccctagcggcaggtgtcaacctaccagctcgaagagttattttaagagctccctatgttgctaaggaatttttaaagaggaatcaatataaacagatgattggcagagctggtcgtgctggaatagatactattggggagagtatcctcatattgcaagaaaaagacaaacaacaggtattggagttaataactaaaccattggaaaactgttacagccatcttgttcaggaattcaccaagggaatccaaacattatttctctctttgattggtttgaagattgcaacgaatcttgatgacatctatcatttcatgaatggtacattttttggtgttcagcaaaaggttttattgaaagaaaaaagtctctgggaaataactgttgaatcacttagatacctgacagaaaaaggactcctacaaaaagacactatttataagtctgaagaagaggtccaatataattttcatattacaaagttgggacgtgcttcatttaagggaactatagatttagcttattgtgacattctgtacagagacttgaagaaaggtcttgaaggacttgtgcttgaaagccttcttcatctaatctacctaacaaccccctatgatctggtttcacagtgtaaccctgattggatgatatacttcaggcagtttagccaactcagtccagcagaacaaaatgtagctgccattcttggagtctctgaaagctttattgggaagaaagcatcaggccaagccatcggaaagaaggtggacaagaacgttgtcaacaggctatatctgtcttttgttctttataccttgctcaaagagaccaacatttggactgtatctgaaaaatttaatatgcctcgaggatatatacaaaatcttctcactggaactgcctcattctcatcttgtgtgttacatttctgtgaggagcttgaggagttttgggtttacagagcccttttggtagaacttaccaagaagctgacttactgtgtaaaggcagaattaatccctctcatggaagttactggagttttagagggtcgagcaaaacagttatacagtgcaggttacaaaagtctaatgcacttagctaatgcaaatcctgaagtgctcgtaaggacaattgatcatttatcaagacgccaagccaagcaaattgtttcatcagcaaagatgctgttgcatgaaaaagcagaagccctgcaagaagaggtagaagagttactaagattgccttctgatttccctggtgctgtggcttcttccactgacaaagcatgaagctatctgatgagaattttcatatatgaattatttattgtacatgtgtgttattaaagataacttatactttataaatgaaaaaatacatttcagttatacagcaaaaaaaaaaaaaaaaaaaaaaaaaaaaa

SEQ ID NO: 13226 - DNA, 4844 bp, Homo sapiens
gagaacagctggaatccttcgcccccggcgcgcagccttcgcccgccggaatcgctgccttatccaccagcgggatgcttacctcgcccgccctctcgggtcaggcgggcccgggaggatgggagggtggctgctgagcgggagccgccacgtcttccacccgacatattgcctagagcttgctgtgacttagatctcgattcagagatggagaaatcaggcccatcttctaccatctctgagcagcagctgcagaggcaagagggatggattaacaccaaaacagacttggctgagcagagtctcatttcatctgagaaatggcttcaactgcatgggcttaagagcaacaaattgaccttgaaacagattttgtcacagatcggattcccacattgtgaagattatgtggcgtctctggggaggcctgtggcttctcggtatgctgatggtctgtttccacagctctacagagcagaagatggcagagtatacaatctgacagctaaatcagaactgatttatcagtttgtggaacatttaacacaagctgtggagagctacaagcagcgaatggactggctcaccagcaagagccggcagatttttggtgtcatcttggaacagtgcgtcaccatagtgctggattttggcggcattctggagggggagcttgatctgtgccgagaggctctaacaatggttctccaggagcaggtggctcacataaccgagttcaatatcatacgggtttctcaagagcctgtgaagtggcaggaaaatgctactcctgtgaccgaacagtccatagctactgccatcagttgggttgagaaactgacggttgagctgactgtgagcgaggctggccgcctggatgctctgctggaagccgggagagacaagactattgaatccatttactactttgtggtgggggatgttcctgaagaatccaaggagcttctcctccagagggccttggagatcccgtgtccagtctacacagtgtccttcaacgccagaggagaaggcactatagcttttctaaaggatctgagtgccaagacccacagcagattccacgcatttgccgagagaacagagtgtgtagaatttcctgcattctccacaaaggatggtgacaatgtgatgacttggaattcaaggaaactgaaaggaaaactccctccaggagctggagtcagagaggacgtgtttctcgtttggcaagagatggaggaagcccgcagcacgctggcccagatccagaggctggtggccgagcctcccaagcccgacgtggccactgtggactgcgagtcagaaacaacctctgttgagattgcatcgaatccagaagacacctgggactctaagacatggctgcagaaatatggcttgaaggcccagaagctatccttgtatgatgtgcttgccgactgctctttctgccacgctgatggggttgtggatataaaagccaaaccggagaatgagtccgtgcagaccagtgcggagacgaacaagaagacagtccatgcaaaatattgcagcaggtttgtccatgctccctggaaggatgggagcttggtccacgtcaacattaccaaagagaagtgcaagtggtacagtgagagaatccacacagccctggcccggatccgaaggaggattaaatggctacaggatgggagtcaaagcctctttggaagattgcataatgattgcatctacattctcattgacacgtctcactcaatgaagagcaaactggacttggtgaaggacaagatcattcagttcatacaggaacagctgaaatataaaagtaagtttaactttgtgaagtttgatggtcaagcagttgcttggcgggaacaacttgctgaagtcaatgaagataatttggaacaggctcagtcctggattagagacataaagattggaagctccacaaacaccctgagtgccctgaaaactgcttttgctgataaagaaacacaggcaatctaccttctgaccgatgggagacctgatcagccacctgaaacagttatagaccaggtcaaacgttttcaggaaattcctatttataccatctccttcaattacaatgatgagattgcaaacaggtttttgaaagaggttgctgctttgactggaggagagttccatttttataattttggttgcaaggatcccacccccccagaggctgttcagaatgaagatgtgactcttttagttaaggaaatggaacagggtcacagtgatctggagaagatgcaagacctttattctgagtccttgatcatggactggtggtacaatgcagaaaaggatggagacagcaagcatcaaaaggaaatctgttctatgatttcaaccccagaaaggtgtgcaaagcctcaatctgatgtcgattcaacacaaacttcatctctgaatatgttgaagggaccatggggcctttcagatcaaaaggttcagaaaaagaaagtccttcacgcagaatcaaccaaaaccagcctgctcagaagccagatgtcctccctcaggagctcagcttgcagtgaaaggaaggatggcctctccaatgccagcagccggaggactgctctaagtgacaaagaaatgagcatcttgctggctgaggagtggctggatgacaaatcgtcagaaaaggtgacgcgagaaggaagccaggtttatgaccacgattcttcagatgtgtcttcagaaaactggctgaagacctatggcttggtcgccaagaaactcaccctcatggatgccttgtcagtggcagcagtcccgcacagctccacctatgttcccgtcctggacaagcatgtcatgtctaaggttcttgatgaggtgttccctctggcacatgtgtgcaacgacacaaataagatgacattaattaacccccaaggagccaaactcaatatctacaagcgaaaagtggaacaggcaattcaatcctatgaaaagcgcttgaataaaattgtttggcgagcattatctcaagaggaaaaagaaaagttagatgcaaacaaaccaatacagtacttggaaaacaaaacagttttaaaccaggctttagaacggttgaattggcccatttcactgaaagagctgtcgatgctggaaagtgaaatcctagctgggaaaatgtacatccagcaggccatggaactccaggaggctgccaagaagaattatgcaaacaaggccccgggagagcaacagaaattgcaaggaaatccaacaaagaaaaccaaatcaaaaagaccagatcccctcaaaggacagaaggttattgcaagatgtgatgaaaatggcttttattttccaggtagttttttttttttaatttcgtgaggcttttgttaaataatttgatactagggacaagaagtttcaacctgtgcttttgctagaacactgacatttcatgagctggcctgagctagtccacttttcacagagaagaagtggaatatctctggccagctcatgaaatgagcgtatttgggccccccaaaaaagtagccagaaaaatgcacttattttaatttctcattttttagtagacaaatttttattacccatttactgcgttgcatgtatgtaatattttgaaagtactggtctaatggtatgagcaaaaaggtgaacattcttgctttttggagattacatcttaaaggagacagacaagcaatgaaataaacagataaaatatgtggtgtgtcagatacagtgccatagagaaaaatcaagccacaaatggggttgagaatgttggggtgagggttttgattctatatttggtggttaatgaagagctcctggggaaggtgacatatgaataaggacttaaaggaggtggggcaagccatgagattggggaagggagttctaagcagaaacaacagcggtgcccaggcctcagggtggagtgcacacgtgtgttggaggaagggccatgagactgggatagctgggcctcagaggtttgccccagacttcctgggggatgtgatccctgaaggaatcagccagctgcaattcagcaaggggtggaggtatgaagggagtttcatggatggtgacaataatacgtgtgaagacttagaaatgaagaaagacatctatgtctggagaaataaaattgattctggctggaacataaaatgagaaggaagggtggaaataataaagctcttcagagaggtgagcatggggctatgcataaagggtcatattaaggatttgcactttaccctgagggcaatgagagccacatttaaagcagtgagaaacacaatcacatttgaagttttcaaaagctctctcccactgctgtgtgaagattggataccaaggggttaggatgtctctggtccctggcttcgggtggtagatagatagtggtacctacaggagatggtggtgtggatggaaagacaatgagatgtgtctgcaacatgatgaattgcaggtgcctgcaagatgcccagatgaagatatcagagaagcaattggagatgtgggtctagagtctggagacagagatttgggagacataactacagaagtcatcactgaaatcatgggaagggtctgtagggaaaagggaactgggagaaaaccctgaggaagctctgtcaggcaaaaagattacattgcagggcgggtgtggtgggtcacacctgtaatcccagcactttgagaggccgaggctggtggatcacttaaggtcaggagttcaagaccagcctggccaacatggtgaaacctcatctctactaaaaaaaaaaaaaaaaaaaaaa

SEQ ID NO: 13227 - DNA, 1508 bp, Homo sapiens
gggcgtcttcggctcccaccccggggcgtgggcctgggggtccctcttcactgcgcagccacctctagcccgccgctttcgggactctcagccttcttttcccttccctgagggccggccggcaccacaacggggccaaaggcagtaactcggttgaaaggcgcgccctgggacaggtcagcgggctccgccatgcgcggcacgcatcccgcaggagcgggtgccagagcagggtaggccgggagttagcagcccagccaggccgctggactcgggctaggggcggggccagcgcagggggcgcaggcgcacaccgcctccgcggcagcatggcggacgcagctcctcaactaggcaagaggaagcgcgaattggacgtggaggaggcccacgccgccagcacagaggaaaaggaggcaggagttggaaatggtacctgtgctcctgtccgcttaccgttctccggcttcagactgcagaaggtgctgagggagtctgcgcgggacaaaatcattttcctacacgggaaggtgaatgaggcctctggggatggggatggagaggatgccgttgtgatcctggagaagacgccatttcaggtggaacaggtggctcagctcctgacgggcagccctgagctccaattgcagttctccaatgatatctacagcacctatcacttgttccctccaagacaactgaatgatgtaaagacgaccgtggtttaccctgccacagagaaacacctgcagaagtacctgcgccaggacctccgcctgatccgagagacgggagatgactacaggaatattactttaccccacctggagtcccagagcctcagcatccagtgggtgtataacattctcgacaagaaggctgaagcggaccggattgttttcgagaacccagatccctctgatggttttgtcctcatccctgacctcaagtggaaccaacagcagctcgatgacttgtacttgatcgccatctgccatcgccggggcatcagatccctacgcgaccttactccggagcacttgccgctgctcaggaacatcctccaccaggggcaggaggccatcctgcagcgctaccggatgaagggagaccatctgcgagtatacctgcactacctgccctcctactaccacctgcatgtgcacttcaccgccctgggcttcgaggcccccggctcaggcgtggagcgggcccacctgctggctgaggtgatcgagaacttggagtgtgaccctaggcactaccagcagcgcacgctcaccttcgccctcagggctgacgaccccctgctcaagctcttgcaggaggctcagcaaagctgaattaactcaggcagaagagcacagatgtgtgggattgggggaggagtggggacaagattttttatctccaagtgaattttctaaaaatgtattttataccggcttattcctagtattgaataaactagcgggctcaaaaaaaaaaaaaaaaaaaaaaaaaaaaaa

SEQ ID NO: 13228 - DNA, 2512 bp, Homo sapiens
gcctgaggagctgctgcgagggtccgcttcgtctttcgagagtgactcccgcggtcccaaggctttccagagcgaacctgtgcggctgcaggcaccggcgtgttgagtttccggcgttccgaaggactgagctcttgtcgcggatcccgtccgccgtttccagcccccagtctcagagcggagcccacagagcagggcaccggcatggccaaagccgcggcgatcggcatcgacctgggcaccacctactcctgcgtgggggtgttccaacacggcaaggtggagatcatcgccaacgaccagggcaaccgcaccacccccagctacgtggccttcacggacaccgagcggctcatcggggatgcggccaagaaccaggtggcgctgaacccgcagaacaccgtgtttgacgcgaagcggctgatcggccgcaagttcggcgacccggtggtgcagtcggacatgaagcactggcctttccaggtgatcaacgacggagacaagcccaaggtgcaggtgagctacaagggggagaccaaggcattctaccccgaggagatctcgtccatggtgctgaccaagatgaaggagatcgccgaggcgtacctgggctacccggtgaccaacgcggtgatcaccgtgccggcctacttcaacgactcgcagcgccaggccaccaaggatgcgggtgtgatcgcggggctcaacgtgctgcggatcatcaacgagcccacggccgccgccatcgcctacggcctggacagaacgggcaagggggagcgcaacgtgctcatctttgacctgggcgggggcaccttcgacgtgtccatcctgacgatcgacgacggcatcttcgaggtgaaggccacggccggggacacccacctgggtggggaggactttgacaacaggctggtgaaccacttcgtggaggagttcaagagaaaacacaagaaggacatcagccagaacaagcgagccgtgaggcggctgcgcaccgcctgcgagagggccaagaggaccctgtcgtccagcacccaggccagcctggagatcgactccctgtttgagggcatcgacttctacacgtccatcaccagggcgaggttcgaggagctgtgctccgacctgttccgaagcaccctggagcccgtggagaaggctctgcgcgacgccaagctggacaaggcccagattcacgacctggtcctggtcgggggctccacccgcatccccaaggtgcagaagctgctgcaggacttcttcaacgggcgcgacctgaacaagagcatcaaccccgacgaggctgtggcctacggggcggcggtgcaggcggccatcctgatgggggacaagtccgagaacgtgcaggacctgctgctgctggacgtggctcccctgtcgctggggctggagacggccggaggcgtgatgactgccctgatcaagcgcaactccaccatccccaccaagcagacgcagatcttcaccacctactccgacaaccaacccggggtgctgatccaggtgtacgagggcgagagggccatgacgaaagacaacaatctgttggggcgcttcgagctgagcggcatccctccggcccccaggggcgtgccccagatcgaggtgaccttcgacatcgatgccaacggcatcctgaacgtcacggccacggacaagagcaccggcaaggccagcaagatcaccatcaccaacgacaagggccgcctgagcaaggaggagatcgagcgcatggtgcaggaggcggagaagtacaaagcggaggacgaggtgcagcgcgagagggtgtcagccaagaacgccctggagtcctacgccttcaacatgaagagcgccgtggaggatgaggggctcaagggcaagatcagcgaggcggacaagaagaaggttctggacaagtgtcaagaggtcatctcgtggctggacgccaacaccttggccgagaaggacgagtttgagcacaagaggaaggagctggagcaggtgtgtaaccccatcatcagcggactgtaccagggtgccggtggtcccgggcctgggggcttcggggctcagggtcccaagggagggtctgggtcaggccctaccattgaggaggtggattaggggcctttgttctttagtatgtttgtctttgaggtggactgttgggactcaaggactttgctgctgttttcctatgtcatttctgcttcagctctttgctgcttcacttctttgtaaagttaagttgtaacctgatggtaattagctggcttcattatttttgtagtacaaccgatatgttcattagaattctttgcatttaatgttgatactgtaagggtgtttcgttccctttaaatgaatcaacactgccaccttctgtacgagtttgtttttttttttttttttttttttttttgcttggcgaaaacactacaaaggctgggaatgtatgtttttataatttgtttatttaaatatgaaaaataaaatgttaaacttt

SEQ ID NO: 13229 - DNA, 2383 bp, Homo sapiens
gctgctgcgacagtccactacctttttcgagagtgactcccgttgtcccaaggcttcccagagcgaacctgtgcggctgcaggcaccggcgcgtcgagtttccggcgtccggaaggaccgagctcttctcgcggatccagtgttccgtttccagcccccaatctcagagccgagccgacagagagcagggaaccggcatggccaaagccgcggcgatcggcatcgacctgggcaccacctactcctgcgtgggggtgttccaacacggcaaggtggagatcatcgccaacgaccagggcaaccgcaccacccccagctacgtggccttcacggacaccgagcggctcatcggggatgcggccaagaaccaggtggcgctgaacccgcagaacaccgtgtttgacgcgaagcggctgatcggccgcaagttcggcgacccggtggtgcagtcggacatgaagcactggcctttccaggtgatcaacgacggagacaagcccaaggtgcaggtgagctacaagggggacaccaaggcattctaccccgaggagatctcgtccatggtgctgaccaagatgaaggagatcgccgaggcgtacctgggctacccggtgaccaacgcggtgatcaccgtgccggcctacttcaacgactcgcagcgccaggccaccaaggatgcgggtgtgatcgcggggctcaacgtgctgcggatcatcaacgagcccacggccgccgccatcgcctacggcctggacagaacgggcaagggggagcgcaacgtgctcatctttgacctgggcgggggcaccttcgacgtgtccatcctgacgatcgacgacggcatcttcgaggtgaaggccacggccggggacacccacctgggtggggaggactttgacaacaggctggtgaaccacttcgtggaggagttcaagagaaaacacaagaaggacatcagccagaacaagcgagccgtgaggcggctgcgcaccgcctgcgagagggccaagaggaccctgtcgtccagcacccaggccagcctggagatcgactccctgtttgagggcatcgacttctacacgtccatcaccagggcgaggttcgaggagctgtgctccgacctgttccgaagcaccctggagcccgtggagaaggctctgcgcgacgccaagctggacaaggcccagattcacgacctggtcctggtcgggggctccacccgcatccccaaggtgcagaagctgctgcaggacttcttcaacgggcgcgacctgaacaagagcatcaaccccgacgaggctgtggcctacggggcggcggtgcaggcggccatcctgatgggggacaagtccgagaacgtgcaggacctgctgctgctggacgtggctcccctgtcgctggggctggagacggccggaggcgtgatgactgccctgatcaagcgcaactccaccatccccaccaagcagacgcagatcttcaccacctactccgacaaccaacccggggtgctgatccaggtgtacgagggcgagagggccatgacgaaagacaacaatctgttggggcgcttcgagctgagcggcatccctccggcccccaggggcgtgccccagatcgaggtgaccttcgacatcgatgccaacggcatcctgaacgtcacggccacggacaagagcaccggcaaggccaacaagatcaccatcaccaacgacaagggccgcctgagcaaggaggagatcgagcgcatggtgcaggaggcggagaagtacaaagcggaggacgaggtgcagcgcgagagggtgtcagccaagaacgccctggagtcctacgccttcaacatgaagagcgccgtggaggatgaggggctcaagggcaagatcagcgaggccgacaagaagaaggtgctggacaagtgtcaagaggtcatctcgtggctggacgccaacaccttggccgagaaggacgagtttgagcacaagaggaaggagctggagcaggtgtgtaaccccatcatcagcggactgtaccagggtgccggtggtcccgggcctgggggcttcggggctcagggtcccaagggagggtctgggtcaggccccaccattgaggaggtagattaggggcctttccaagattgctgtttttgttttggagcttcaagactttgcatttcctagtatttctgtttgtcagttctcaatttcctgtgtttgcaatgttgaaattttttggtgaagtactgaacttgctttttttccggtttctacatgcagagatgaatttatactgccatcttacgactatttcttctttttaatacacttaactcaggccattttttaagttggttacttcaaagtaaataaactttaaaattcaa

SEQ ID NO: 13230 - DNA, 7555 bp, Homo sapiens
ggagccagaggaggcgccggtcgctggcagctgagcggcggaacccttcgctggcgggagcgcggttcggggccgcagaggggacattgaataaacctgagtattgtgtgcctgtattttgactgcgacctatcagatgagatcaggtcaagagacaactgcctttgaaagagagtgagtgactgtttccaaaacagcaagcatagggagagccgccggaagtattgacggaaagcttgaattacctacatgattgatgatggtctccagctgtcaaagaagattgtggttgccaagagaaaggtaaccatttctcatccccttgagtggaattggatgcctctaggagcccacattggctggcagtagacatggccgaatttacaagctacaaggagacggcctccagccgccacttgcggtttaagctacagagtctaagccgccgccttgatgagttggaggaagccacaaaaaacctccagaaagcagaggatgaactcctggatctccaggacaaggtgattcaggcagaaggtagcaactccagcatgttggcggagattgaagtgctgcgccagcgggtgctgagaattgaaggcaaagacgaggaaattaagagagcagaggatctgtgtcgtctgatgaaggagaaacttgaagaggaagaaaacctcacccgggagctgaaatctgagattgagcggcttcagaaacgaatggctgaattagagaagctagaagaggccttcagcaggagtaagaatgactgtacccagctgtgtctgagcctgaatgaggagagaaatctgaccaagaaaatctcctctgagctggaaatgctcagagtcaaagtgaaagaactagaatcttctgaggaccgcctggataaaactgagcagagtttagcgtcagagttagaaaagctgaaatcattaactctgagctttgtaagtgagagaaaatacttgaatgaaaaggagaaagaaaatgagaaattgataaaagaactcactcaaaaactagagcagaacaaaaaaatgaaccgagattatacaaggaatgcttctaatctggaaagaaatgacctacggattgaggatggcatctcttccacactgccgtccaaagaatcaagaaggaagggtggtctggactacctaaagcaggtagagaatgaaacaagaaacaaatcagaaaatgaaaagaaccgcaatcaggaagacaacaaagtcaaagaccttaaccaagagattgagaaacttaagacgcaaatcaaacactttgaatcgttggaagaagagcttaagaaaatgaagtccaaaaataacgaccttcaggataattacctaagtgaacaaaataaaaacaaattattagccagccaactggaggagataaagctacaaatcaagaaacagaaagagttagaaaatggagaggtagaaggggaagatgctttcctgtccagcaaaggcagacatgagaggactaagtttagaggccacggaagtgaagcttctgtgtccaagcacacagcgcgggaactgtctcctcagcataagcgggaacgactccggaacagggagtttgctctcaacaatgaaaactattctctgagcaacaggcaggtttcttctcccagtttcaccaacaggagggcagcaaaagcttctcacatgggggtgagtacagacagtgggactcaggagacaaagaaaactgaagaccggtttgtacccagctcctccaagagcgaagggaagaagtctagggagcagccctcagtgctgagtcgctaccccccggctgctcaggagcacagtaaagcgtggaaggggacttccaagccaggcaccgagagtggactgaagggaaaagtggagaagacaacacgaacgtttagtgacaccacccatggatctgttcccagtgacccattgggtagagctgacaaggcttctgacacctcctctgagactgtctttggcaagaggggacacgtgcttggcaacggaagtcaagtaactcaggctgcaaactctggctgttctaaggccattggagccctggcctcatctcgaagatcctcctcagaagggctctctaaaggcaaaaaggctgccaatggccttgaggctgataacagttgcccgaattccaaggctcctgttctatcgaagtatccttatagctgtagaagccaagagaacatccttcagggattttcaacctcacataaagaaggggttaatcaacctgcagcagttgtgatggaagacagcagtccgcatgaagccttgaggtgtcgagtcatcaaatccagtggcagagagaagccagactcagatgatgacttggacatagcatctcttgttactgccaagttggtaaatacaaccatcactccagagccagagcccaaaccacagcctaactctagagaaaaggctaaaacccgaggggcacctagaacctccctatttgagaatgataaagatgctggaatggagaatgaatctgtgaaatctgtcagagcctccaccaataccatggagctcccagataccaatggtgctggggtaaaaagccaaaggccctttagccccagagaggcgttgcggtctagagccatcatcaaacctgttattgttgataaggatgtgaaaaaaatcatgggaggatctggaacagagactacgttggagaaacagaaacccgtctccaaaccagggccaaacaaagtgacaagtagcattactatatatccatctgacagcagcagccccagagctgctccgggtgaggccctgagggagaggcacacatccactagcaatatccaggtggggctggcagagctcacatcagttagcaaccatgtcagctccccttttgagctctccattcacaaacatgacatcaccctgcagcttgcagaagcggagagaatggcagatgggcccctgaagaacaggccagaaacagtggtctctcggagcagcattataatcaagccatcggatcctgtggagaggaatagccatgcacctccagcggagacaatcaggtggaaaagccatagtgccccttcagaagtgggcttctcagatgccagacatgttactgtgcggaatgcctggaagagtaggcgagacttgaaatctttagaagaccccccaactcgaataggtaaaaacgtggaatctaccaatagcaatgcctacacccagaggtcttccacagacttctcagaactcgaacagcccaggtcctgcctttttgagcagggcactcgaagggtaggaccaagttcaggggatgcccctgagccctcctccagaaggacccaaagtagcctcactgtgtcagaggtgcttacccgtcggaatcgggtaggagacaccatcactgtcgcagcctggaaccactcagcaagcatggaggaagaaggggaagactgtacactcagtgtctacaggcaactgcacaactccctggatccgtctgaactgcctgggaagcaggggctgccagagtctgggcgagtacgggccgaggaacgattacggccaaccaggccctgtgctgaggagaactgagcccgctgggtgtctgttgtctgccctctgctcctgcttctcagctcttccaccgtcctgccccacgaaggatccaaggccagttaaccaggcaagacacaagccttggctggaaaactgtggtagagccgggctgtggctcaggtaatttttgccatttggccagagggaatcagagactacaagctggacagtcacccaggcccaaccttccccaatgcacgagtcctctctctctccttgtccctgtccaccaagtagttggaccattctggcccccaaacaggggaagataaagtccccagcacacagcaggagtcaaaaattcttctcggctccttggtgggttgtttctggatcctagggcagcctctgtctgtgtggttaatgttctggtttctcagtctcctcactatatccacttcactcctcatttgcccaatgggctcaagtaccccataagatttaccagccatcagctctatctagggggctttcatttctttccccttggagttcttttcttcagacttaaagcagaaaggggtctgtgctgcctctaaaggattatgagactaccctttaggttgaagtttgacctggctcctggcttaccagtctcctggaagcagagcatgcagatactcatgcggatacccattggaatgacatcatccctccccaaccccagctctctctgctcaccttccaaaggcacctggaggtgcaagcctcatgcatctcctttcctgagcaccagtaatgctgctggcatcgcctgctttctctccagtggctggagacttcaagctgacttcattgtttccaccttgggaaaatccctaggctaagctgggcctgacccagcatcctctgccttctaggaagtgcccagcaagagggaaagcagacccctttagtcactccacaagcaatagctccatgagaggcatggactgtgagactactccctcctgttcctccttctccatcccccatggaggaggcatcgcactttaccaagctgatgcattcctacagaagtgggccccggatttctgcaagtcgactatcatgatgacttcgctggaggaaaggtgatacgtacatacgcattgagggcctcagctttatatagttcaaaatgcagcaaacttttcagaaagccacgtaaataaattggttaggttccttataccagtcacatggggaagttgaaaagaattgtatattcttggcagtgctttttctttagcattctgtcaattcaaagaagggatcctctttcaaaggctacctttatgaagtagacactattgccctcagaatgagagaacattaaactaccagtctggtaagctggatttttttccccatggctttacttccttgctgtgtgaccttgggtgagtcattgtcttcttggagcctcagtttccctgtctgtaaaatgagttctttgaaatggatgatctctaagggcaccaaatctggtattctaaggttctcctgttttcaccatctataatagtatgggatgatttttgcttgtggaaggtatcatccgtgtgggttcttccctcctgccctcaattgtttttctgggccttgttttttagtttctgtatgttttaatctcatggggatgagctcagagaagctccgtgggcctgtttcccagtctgcaaagtgtgaagggattagatgggatggtctctgaggctctttgtggcatcagccttgcccagtgccacacagtatctcctggcgttctaggagtctaggtattatggaaagtacccaagtctgtgtatctcctgttcctgtgcatctcctatgaatttcctggcaagaggaagactcaagacttcctccagaggaatttgtcttctctgccttcactcagcatgggaaccagtgttcatcctgcccttgtctgtatcagatttggcagtgaggaggcttggggagcacctaccttactttcagggacaggaatctattgctcatacttctgcttcccagagttttgccaatctaaaggcattgtcatgtggcctgcctttcctgtccacatccccacctctgatgctcaagatgctatttccaagatctcttactgctgcttctcctggcttactggccagaaactagctcactcaaggctgccatccttcacttgcagcctccctgccattctccttcactggttggcaaccttgagagttcaaagaaaatcaacctctgtggtggtcaactaaaggtattaggaaactaagtctgtggctcttctctgctgatggaaacagaagggcgccaagccatgcctaaaaagatctcgccaataattcttgtctttgggtgttggagccctggattctggtgctatagctcctggtgccaaagtctggatctttccacatttcagcagcaccaacatctgctgctactcaaaatgtcctgttgaagagggacagctgtgatgcccttttgctggggctgccatcttgaaatctgagtgcaataggatttgcttgtaacagttatttcaggatattttgtttctttaatctgcacactttctagatagattttatttttaagtgtcctcagcattgcagaaaataacattgtaatagcaagtaaaggctggaggctgtttctctgggcttcaaatggctggcaaggctggctctcaaatcccaaagttgggaggcatgtttctgaaaagcaactgaggtgtgactgtttggacccaggcctcatcatcaggggtcctggaggaagcctccaagtagaggggagacctggtagttgaatagttgtttaatcaagccaaatagtcccactgcccccggtcaacaaacccacttttatgacagttttcttccgcagcttggctcttaaattttactggcaggtgtatggttgttggagggttcctagtgagttgggggacctggcaatagagctgcttggttggaggaagtgaagctggcttagtaccagcagctgatctcttccacgtgctgctgctttttttgccactctgatactaaaccagagaaagctgcaggtggataaagaagctgtggctgttttttgcttttgggtggcaatgagaaagagtcacagtgtgggttaaagggatctgcagtggggccaaggatgccaccccaccctcagctgtaggcaagcttgcacataaataacccccgtcagtggagtgttcgggatgcagggggcactatagtgttcttggacttgtcgtcctggggcagttttagttctttatatttagtgggtcagtgccaagtgctaccacttcccaataaaggaatggggacccagaggctgggtccctggctaccttgttatgaggttttgttatttctctgacaagattgctttggaaagagctgcttttagggattattttttgaataccccgagtggggagcagggttctcctcaaagcctcacaaccataggatcataggaaaggggccctattttcctgctgcttcccagctcagaacatatactgaatggaatgtatttttaagagaataaagtctatttttttgtattttaaagattgagagggctaagaaagtagccctcaaataaactgttattgcattataggcccctttgttgggggcagcctgttggtccacacctacttgctcaggcaggtgctctggtctctctcacccctgccccttagagtctaggtgcagcagctccaagcatgggaccaaggaggccagaacctgtcgctggaaaccagggcaaagcagtggctcagggctccttgggtgcatgtgtatcattggagctgcctgtctgcatgtatcctctggcgcgaatgctctctgttggctctgcagtacaatatgtaaccaataaagctccctcgtttccgtatactctgaaaaaaaaaaaaaaaa

SEQ ID NO: 13231 - DNA, 2176 bp, Homo sapiens
gatcaatcttcatcaggctacatttccaatcacctaaacaaccgagcaagacaagccactccgacaaggttggctgcccggcgggtctctgtgagagatccaggtagatggtgaacggccccggcagctgagggcaggccaggcccccagacgcatcagaccctgaaggactgcgtggtgggagccctgcaccgctcctggccccgggccccctggatccgtcggggcgcctccacccagctgttagcatgatgtcttacctcaaacaacccccatacggcatgaacgggctgggcctggccgggcccgccatggacctcctgcacccatccgtgggctatccggccactccgcggaagcagcggcgggagcgcaccaccttcacgcgttcacagctggacgtgctcgaggcgctcttcgccaagactcgctaccctgacatcttcatgcgggaggaggtggcgctcaagatcaacctgccggagtctagagtccaggtctggttcaagaaccgccgcgccaaatgccgccagcagcagcagagcgggagcggaaccaagagccgcccagccaagaagaagtcctctccagtgcgggagagctcgggctccgaaagcagtggccaattcacgccgccagctgtgtccagctctgcctcgtcctctagctcggcgtccagctcttccgccaacccagcggctgcagcggctgcgggactaggtgggaacccggtggcggccgcgtcgtcgctgagtacaccagctgcctcatctatctggagcccggcctccatctcgccaggctcagcgcccgcgtccgtgtcggtgccggagccattggccgcgcctagcaacacctcgtgtatgcagcgctccgtagctgcaggcgccgccaccgcagcagcctcttatcccatgtcctacggccagggcggcagctacggccaaggctaccctacgccctcctcttcctactttggcggcgtggactgcagctcatacctagcgcccatgcactcacatcaccacccgcaccagctcagccccatggcaccctcctccatggcgggccaccatcatcaccacccacatgcgcaccacccgttgagccagtcctcaggccaccaccaccaccatcaccaccaccaccaccaaggctacggtggctctgggcttgccttcaactctgccgactgcttggattacaaggagcctggcgccgctgctgcttcctccgcctggaaactcaacttcaactcccccgactgtctggactataaggaccaagcctcatggcggttccaggtcttgtgagcccaggaatgaaagaggagaagaaacgcaactacctgcgccctccgtggtcccgatcctgttgctgctgctgcaccgcccgcctttgcctcgtcttctccaaaactgaattttcaccccccaaaaagatgtccattgcctgcactgccgcccccatttttgtgccacttgcttggggggatgtgcaaacccaccctgccccttggatggggggaccggtgcttcggcttggcctacacattctatacaggagagatgtattatttccccccttcagcccctactaaactcttaagcctccccttccagtctttctggacagctattaagcacttgcagccttcggaggctctgcgctctgatccgctgtttgagcccaacactttaatttattctttctggacactggagtcactaactggcgtgtttctgcccattggagcacccgcacactactccaaatcaaaaccactaagagttcctcccgcgcagactgctgccccttcagctgccctcgattttgctccacgcctgccggccagagcctcccggcgtttcttccgccccagcggagtgcgctggggcgcgccagggctaggcccgccggaggagcgcgtccccagccttccgcgcacagagccgcatcccgccccgccctgcgctggactggttcaagcttccgcctcggcgggaacgctgtacatagtcaggtccgttccagggaccacttaaactttttagttgctgttggttggttgaactgaacatatcttgtcttagcacccaggaaacagaactttaagatatatacagcacatatatatatatatacatatatatatacacatatataaaaaacaaaa

SEQ ID NO: 13232 - DNA, 4838 bp, Homo sapiens
agtgtaagggagtgggagctggtccgtgccgcggcggccgcgcagggagctctcgaggcaacgccggggcgcccgaggtctggaaggcgcagaaatggagcaagagccacaaaatggagaacctgctgaaattaagatcatcagagaagcatataagaaggcctttttatttgttaacaaaggtctgaatacagatgaattaggtcagaaggaagaagcaaagaactactataagcaaggaataggacacctgctcagagggatcagcatttcatcaaaagagtctgaacacacaggtcctgggtgggaatctgctagacagatgcaacagaaaatgaaagaaactctacagaatgtacgcaccaggctggaaattctagagaagggtcttgccacttctctgcagaatgatcttcaggaggtgcccaagttatatccagaatttccacctaaagacatgtgtgaaaaattaccagagcctcagtcttttagttcagctcctcagcatgctgaagtaaatggaaacacctcaactccaagtgcaggggcagttgctgcacctgcttctctgtctttaccatcacaaagttgtccagcagaagctcctcctgcttatactcctcaagctgctgaaggtcactacactgtatcctatggaacagattctggggagttttcatcagttggagaggagttttataggaatcattctcagccaccgcctcttgagaccttagggctggatgcagatgaattgattttgataccaaatggagtacagattttttttgtaaatcctgcaggggaggttagtgcaccttcgtatcctgggtaccttcgaattgtgaggtttttggataattctctcgatacggttctaaaccgtcctcccgggtttcttcaggtttgtgactggttatatcctctagttcctgatagatctccggttctgaaatgtactgcgggagcctacatgtttcctgatacaatgctacaagcagcaggatgctttgtgggggtcgtcctgtcctctgagttaccagaggatgatagagagctctttgaggatctgttaaggcaaatgtctgaccttcggctccaggccaactggaacagagcagaagaagaaaatgaattccaaatccctggaagaactagaccctcctctgaccaactaaaagaagcctctggcactgatgtgaaacagttggaccaaggcaataaggatgtacgtcataaaggaaaacgtggaaaaagggctaaagatacttcaagtgaagaagttaacctgagtcacattgtaccatgtgagccagttccagaagaaaagccaaaagaattacctgaatggagtgaaaaagtggctcacaacattttgtcaggtgcttcctgggtgagttggggtttagtcaaaggtgctgagattactggtaaggcaatccagaaaggtgcttctaaactccgagagcggattcaaccagaagaaaaacccgtggaagttagtccagctgtcaccaagggactttatatagcgaagcaagctacaggaggagcagcaaaagtcagtcagttcctggttgatggagtttgcactgtagcaaattgcgttggaaaagaactagctccacatgtcaagaagcatggaagcaaacttgttccagaatctcttaaaaaagacaaagatgggaaatctcctctggatggtgctatggttgtagcagcaagtagtgttcaaggattttcaactgtctggcaaggattggaatgtgcagctaaatgcatcgttaacaatgtttcagcagaaactgtacaaactgtcagatacaaatacggatataatgcaggagaagctacccaccatgcggtggattctgcggtcaatgttggcgtaactgcctacaatattaacaacattggtatcaaagcaatggtgaagaaaactgcaacacaaacaggacacactctccttgaggactatcagatagttgataattctcagagggaaaatcaagaaggagcagcaaatgtcaacgtgagaggggagaaggatgagcagacgaaggaagtaaaggaggcaaagaagaaagataaatgatgaagtgctgggaatcacttataccaaagccttatgaaatggatgaaattttgttaaataggcaaatgtggaattcctcacagattaaccagtattttttaaatgtattcattcctacaaattaactttcataaattttatggcatgtcttctatttaaaaggaaaagaataagtattcttgcatctggccttagaaatgtgaagttatattctcaagtttatttttttccaagtgtagctaaaatatttttgcaggtaaaataaagctgatagtacatgtgttgttcaaaccttgttaaacctaatattgaactatttttatatctgctgtctttcagaaggcaaataggaaactatatatttgcttaaaaattggcatttagtaaccttaattctttttatagaaggaatgacttaaagtattgtcccctctttttgcactaattgtggatttttttagatgcttctcaaaattttcagtgtgtaagctaaacaaaaactaaaactaagaattctcaaaaaaacttgttcaaaacagggaaagactgatgaaaagtaaaatggactacttttgtaacttacctgtttgttaggaaatggaatggtctctttgatttaaaataaataaaaatagattattacgtcttttgtattgagactgtattgttatgagcctaggaaatttgggaacatgattgtattgtattaaaattcgaagtgattattatcagcttaattggattaaaaaagtacttcaagaaattattttatcatatctgcttctgtttttccaaaaggttaaaacttgtaaaaaaaatatatataaacaattgagtttactaatggtaaacatttttattctgggattcggtcattggaatttatattaaaagacaagttattaaaaaggaaaggttctattcataatcagggtaaagaatatgaaaaccttagacgtaatccatggtggataggcattatggtttccactttggcagaaggcagactattcacagccctatttacttacataggctaaaaaactatgtaactaaatacctaatggtatttaatttttgtttattgaatttaagagattggtattagttttcatagctgtagtccattctaataatttctgatcttctagtggctacttaattagacattatttgaagctgtctgaagaatgcactttatgaattaaaaaactgaattgcctgacctcgttatcacatgagcttatattttgggaacacatagaactgatggaggcttttcctaaggccaaggataatgtactagttgttaaaatggaaataaaagtgaagtggtaaatagcttacagacagtctatgctttgtttaagaaatggaatggcacttcatatattctcatttgtgggagctaaaaattacaataatcaaacttaaggagatagagagtagaatgatggttaccagaggctgggaggcattgaagggatggggagggaagtgaggttgattaatgggtacgaaaatatagttagaacgaatttgttgtagtatttgatagcccaacagggtgactacagtcaacaataactttatacatttaaaaataaaagagtgtaattgggacgtttgtaacacaaatgaatgcttgaagcagtagatacaccctgatgtaattattataaatcgcatacctgtatcaaaatatctcatgtatcccataaatatatacacctaccatgtacccataaaaatttaaaaagaaatggaatggcaaataatggaacataaactttaaacagttagctttgaccagaggtcagcaaatatcctccatgggctaaatccagatgtccacctgttttcataaataacgttttattggagcatagctgtacccatttgtttacatattggctatggctgctgtctagttcaacgtgagagttgaatagttgcatcagagagtatatggtccacaagcctaacttattcactctctggccctttgcagaaaaagtgtgctgccttagtctatagaaaatggacttttcccaccattcactgactcattaggagataggcatcttctaaagattttttttatattgtgtaatgattgatatatagataaaattatatattacttgtaaggtatgatgaataacaacacttaaaaactcatcacacctaaagacatggaaagctgccaattacctatatgtatgttcttcctattttcttacctctttccccatgtcattttttattgttccttgccattttttaatcacacatgtatgttctccaaacatactgtttcattttttgaagctttctacatatagtgtctgaatgtgaagtcttactcaacttgcttttttgagtttatgtttaaaattcattcttgcgcttatatgcatggatggtttacttgctctatagtattctgtgtgagtataccacaatttaagtgttcattttcctatcagttgacatttgtttttagtttttgttggtagaaacagtacactcaaaacatccttgactgtcccctggtacacatatgcaagagactttatgcgtaagagtggagttgttggcttgtcaagttttgcaaaataatgccaggtattttccaaaatgatgatattctcttgagtattacttccctttgcaatgtttttattgttaatgtagcatatataaaaaagtatctcataattttaaaaaaaaaaaaaaaaaa

SEQ ID NO: 13233 - DNA, 3846 bp, Homo sapiens
ccacgcgtccgactgaaagccggaccccaggccgccgcgctgccgcccggcctccccgccagcgcgccaccatgggcagtcccggtttccccttgtaaagatggcggtgagggatcgctgcaacctttagactaatgactgtccgaaacatcgcctccatctgtaatatgggcaccaatgcctctgctctggaaaaagacattggtccagagcagtttccaatcaatgaacactatttcggattggtcaattttggaaacacatgctactgtaactccgtgcttcaggcattgtacttctgccgtccattccgggagaatgtgttggcatacaaggcccagcaaaagaagaaggaaaacttgctgacgtgcctggcggaccttttccacagcattgccacacagaagaagaaggttggcgtcatcccaccaaagaagttcatttcaaggctgagaaaagagaatgatctctttgataactacatgcagcaggatgctcatgaatttttaaattatttgctaaacactattgcggacatccttcaggaggagaagaaacaggaaaaacaaaatggaaaattaaaaaatggcaacatgaacgaacctgcggaaaataataaaccagaactcacctgggtccatgagatttttcagggaacgcttaccaatgaaactcgatgcttgaactgtgaaactgttagtagcaaagatgaagattttcttgacctttctgttgatgtggagcagaatacatccattacccactgtctaagagacttcagcaacacagaaacactgtgtagtgaacaaaaatattattgtgaaacatgctgcagcaaacaagaagcccagaaaaggatgagggtaaaaaagctgcccatgatcttggccctgcacctaaagcggttcaagtacatggagcagctgcacagatacaccaagctgtcttaccgtgtggtcttccctctggaactccggctcttcaacacctccagtgatgcagtgaacctggaccgcatgtatgacttggttgcggtggtcgttcactgtggcagtggtcctaatcgtgggcattatatcactattgtgaaaagtcacggcttctggcttttgtttgatgatgacattgtagagaaaatagatgctcaagctattgaagaattctatggcctgacgtcagatatatcaaaaaattcagaatctggatatattttattctatcagtcaagagagtaactgaaagacctgcgggactgattcacgtggggagaatgttcacagcactgtcacccggcttctccgcaggctttcctcttccccagtggcccactaatggtatcactccgagtctcaatggtctggctgtgttagactctctccttttgtgtttttacatgcagcactactcttggttttatttcagtctgacatagagttaactgcaatcagattgtagtctgatttatatgaataacggttgctaattttaggactgggtgaaagctatgccattcattatgtctggctgtattagaatgacatttcctatgaatgtctacggtctgttttaggtgtttgctaaacttctatggcttccagggtcttcttacaatgcattcctttaacttgtccctggaagcattgctacccattttcagcttctctgcctctcttctgatacaaggacagaagaattgggtagatattcaccttttaggggtgcaagtatagctttaagtttgtgcaagtgaaaatgttgaaaagtgagtaacctcgatattaaaatcatccttgacatgaaacagggtgaagagaagctgtccgtggcggctggtgttggctggcattggcactgggctgtgctgacctagccattacaattccaggggctaagaaggctcagggcagacaaagtcaagaggaggaagtttttgtggacaatgaaaagttattttcgtacctttctaccaaaaccaagtttcaggaaaataactctatgttgtttattttcagtgacacttatgtaaggccctgtgagttgtatttatcctgtatccggcactgctaagcttttcaaggtatctttccaatcctgctgatgtggcagtcaatggctgcagggctggcaaacctccccttagccagtcagcacggcattgttccttatcaggaataacaaaggtactacatctttccagccatcagcacgttgtacaacttaactttttaacatagtccgtctgtttactgaggcactggcgagtcccagggctgatacagaaccttccctagagggaataccagagttagctgggtatagaggtggctcaaaggaagtgtccgtgggcagggggaggaatgaacaaaatggcgctgtttctttggctcagactcctagaatgcttgacaagacagaatttttttggaagaacctcatctcactatagttacttttttcacttttgttatatatgtatttattagagcatttgaatattggtacctttaaaagggtcatttggtgttttgctgttgagctggtttttgagtcatagatcttggcttcctttagaagccacttaacttccatacactataataaactgtgaacatatttttgttacctaatgcatccactgatgaacatgcaaactttgggcataatgtgaactaaaattgaaatggaaaatgttagtggccattttgcaacaatgaagaggatagcactttatctagatgaaaactggatttcttatctttgaaatatcttgaactgtttattgctcagaacttaagtaagcatgccaacatttcgtttgtttatgcttgaagtgaaatgttttacttttcactggagaagacaaaacagggtgatcttcatgttattgttttatacaagtgatggaaatgtaccttgccttgtttagaggcaatttcacatttataaatatttttttttcctccatgaaacttacgcagtaatcactacctggaaggtgagttttgatctctttttaaggagaggcactttccaactgaaggtgattgatgtagggaaatgtttgtactatatagaatccatatatttgactgcaagttacaaagttttaagaacatgatggttggtctctaatatatttggaactgattcataagaaaagttattaaaattatctttgaaacacctcttgaagctaatttattagaaaaaatatttcagttggaaggctgtagaagtaatgtttaaatgctaagtcataagttcaggatatttcttttctatttggttgtgcaaaatgtttttcccagttatttaatcgaagtaattccttttaatagaaagagtcagttaaaattcagcattcatggatagatttttggaacgaaaaagggtaagtataagaaaatattgcaaacacattaaaacagttgtatggtgcaggaaaagaagattggaaaaagaccaaaacacacttctccagcaacactccatcagctttttaaaatttagagctatctgctaattttttccctcttccttctcaataaatgaaacaaacactgggcagctgcaggtttctcccaatcatgtctctttatgtaaagacagtaacatgcaaacacttttagtttacatccctcattcacagtgtaaagcaggaaatggtgtgggagatgtgagaccattctgaggtcagcgatagcccaaaggctctgcagtattccctccaatggccaaggattccgtgtgtcatctgcaggagtgagtaggcctgctgtatttcttgtaactgctgggtgttacaaaataagttacaatgttttacactttaaaaaaaaaaaaaaa

SEQ ID NO: 13234 - DNA, 2130 bp, Homo sapiens
agcgggacgtgagctcgcgaccagcgcgggggaggcgcccacacgcccgtcccgtcttggtgtctggccccaggcggccgcgcctcccctccgaggtggtcgcatagcccctgcaccaggcggcccgcgcccgcgacctcaaggcggctgccccgcgccatggcggcccggctgggtgcgctggccgcgtcggggctgtaccggcggcgccagcaccggcagagcccgccgccagccacgggcaatatgtcggacgccttggccaacgccgtgtgccagcgctgccaggcccgcttctcccccgccgagcgcattgtcaacagcaatggggagctgtaccatgagcactgcttcgtgtgtgcccagtgcttccggcccttccccgaggggctcttctatgagtttgaaggccggaagtactgcgaacacgacttccaaatgctgtttgctccgtgctgtggatcctgcggtgagttcatcattggccgcgtcatcaaggccatgaacaacaactggcacccgggctgcttccgctgcgagctgtgtgatgtggagctggctgacctgggctttgtgaagaatgccggcaggcatctctgccggccttgccacaaccgtgagaaggccaaaggcctgggcaagtacatctgccagcggtgccacctggtcatcgacgagcagcccctcatgttcaggagcgacgcctaccaccctgaccacttcaactgcacccactgtgggaaggagctgacagccgaggcccgcgagctgaagggtgagctctactgcctgccctgccatgacaagatgggcgtccccatctgcggggcctgccgccggcccatcgagggccgagtggtcaacgcgctgggcaagcagtggcacgtggagcactttgtctgtgccaagtgtgagaagccattcctggggcaccggcactatgagaagaagggcctggcctactgcgagactcactacaaccagctcttcggggacgtctgctacaactgcagccatgtgattgaaggcgatgtggtgtcggccctcaacaaggcctggtgtgtgagctgcttctcctgctccacctgcaacagcaagctcaccctgaagaacaagtttgtggagttcgacatgaagcccgtgtgtaagaggtgctacgagaagttcccgctggagctgaagaagcggctgaagaagctgtcggagctgacctcccgcaaggcccagcccaaggccacagacctcaactctgcctgaaggccctcttgcgcagctgcctctcggcccctccgccttctcccctcctgctgtccatgcttggccccctcgtccccatccacctgtgccctccgcatcttaccctccctttctctttcctcattgccttctcccttcctgttccctcatctctgccttccccatgtctctcctctccttggccgtggcttctgtctgtgaggaggcaggagctggggagtgggagcctatgaccccacgtctgacagccatgtccacctgtgcccacagcttccgcccacagacctccagggacaggagcaaattgcaccacagctccccgcctggcctggccctccccaggcggctcagtggctcatgctgtcctgtgagagcccctgccccagagcggccccactaagcgcatgtggctcctgggctacccacagccagggcagcctgctggagccacagggccagggccatgcagatggaggcctctgggagccacctccaatccctcaccactcactcaaccagtggcacagtgtccttgtgcccacactgagccagcaagtcctgctgtccacacccacaagctacctggagggacaggacccacctccatccttcggaaggccttcctggaatcccaccttggcctccgccctcggttccgccccgcccctctccccccgaccttggggcttgtgtcgagcccttgggtggggccaggaggaggtgatggcgtcagaggaggtgtggtcagaggtgacttgttcccacctccagggaggacgcttcgtcttcggccagcgcagacctggtgtttgtttgttgggctcacgcttgcacaatgaaggcttgttcacacaaaaaaaaaaaaaaaaaaaa

SEQ ID NO: 13235 - DNA, 4498 bp, Homo sapiens
ttggcgctcagtccgcggcgcgaggacggccggccggcagggggaggcgggggggcgccgggcagccccgccttttcccgcggaggcgccgagcggccatattgcggagctgtctgcggtggcggcggcgcctctcgtctcccgcggcccagcgctcgcaccaccgcttctccctccctgtcgcagccgcgccgccgcgcagcgccccagccacacgccggcgggcagaagccgcccgctctccggaaagtgataacagaattcattgaagtggagaatttttaaagaaggtaacaaaaagagaaagaaaatgccgaaaccaatcaacgtaagagtaactacaatggatgctgagctggaatttgccattcagcccaatacaactggcaaacaactttttgaccaggtggtgaaaacagttggtttgcgtgaggtctggttttttgggctgcagtatgtagacagcaaaggttattctacatggcttaaactaaataaaaaggtaacacagcaggatgttaaaaaagagaatcctttacagttcaagtttagagctaaattctttcctgaagatgtttctgaggaattaattcaagaaataacccagagactcttcttcttgcaagttaaagaagccatcttaaatgatgagatatattgcccgccagaaactgcagttcttttggcttcctatgctgtccaagccaagtatggagattacaataaagagattcataagccaggctacctggctaatgatagactcctaccccagcgtgtattggaacaacacaaactaacaaaagaacagtgggaagaaagaatacagaactggcatgaagaacatagaggaatgttaagggaggattctatgatggaatacctgaagattgcacaagatctagaaatgtatggagtcaactattttgaaataaaaaataaaaaaggaactgaattgtggctaggtgttgatgctttgggtctgaatatttatgagcatgacgacaagttaacacctaaaattggttttccctggagtgaaatcagaaatatttcatttaatgacaaaaaatttgttataaagccaatcgacaaaaaggcacctgattttgtgttttatgcacctcgtctgagaatcaataagcggattttggccttatgtatgggaaaccatgaactatacatgcgaagaaggaagcctgatactattgaagtacaacagatgaaggctcaggctagggaggagaaacatcagaagcagttggaaagggcacaattagagaatgaaaagaagaaaagagaaatagcagaaaaggaaaaggaaagaatagaacgtgaaaaggaagagctaatggaacgtctaaaacaaattgaagagcagacaattaaagctcagaaagaactagaagaacagactcgaaaagctctagaactggatcaagaacgaaaacgagcaaaagaagaagcagaacgacttgaaaaggagcgtcgagctgctgaagaggcaaagtctgccatagcaaaacaagctgccgaccagatgaagaatcaggagcagctagcagcagaacttgctgaattcactgccaagattgcacttctagaggaagccaagaagaaaaaggaagaggaagctactgagtggcaacacaaagcttttgcagcccaggaagacttggaaaagaccaaagaagagttaaaaactgtgatgtctgccccccctccacctccaccaccaccagtcattcctccaacagaaaacgaacatgatgaacacgatgagaataatgctgaagctagtgctgaattatcaaatgaaggggtaatgaaccatagaagcgaggaagaacgtgtaaccgaaacacagaaaaatgagcgtgttaagaagcaacttcaggcattaagttcagaattagcccaagccagagatgaaaccaagaaaacacaaaatgatgttcttcatgctgagaatgttaaagcaggccgtgataagtacaagactctgcgacagattcgacaaggcaatacaaagcagcgtatcgatgagtttgaagcaatgtgagagctgttattttgcatatatgttcttcataagctgaaccaccaacagagaaaagcaggcctttgcagatatgatggaatgcatcccaccttgccaaagcacttacaccagtttgactgtgctagctaaaagacaaatttaaggggagctcttcaacattaaggcagtatgatatcatgcttggttttcttttttcttttggtccagggaatggagaatggtgttccattgcctcttttcacattttttttctttttcttttttttttctgttgaagattaacactaattatcacgtctgacaaatgtgtatgtgtggtttcagttctgtgtacattttaaaggataatggtgaacattttaatgggtttcccttgccctttccatatttaacctatttccacattctctctcactcacattttctcagtgtgcccttctcttatctgccatgtccatagccataattccaccatcatacagatcaggcagtgtttaaaatgatggtaggtagcacagtggacagtctttgatcatcatgtagaatatggctatgaatcaggaaagagattagaacatttaataatgtatgtacagctggtgcttagtttttttttaatctaaatttaattaccttattggatatttgatatttggttatttaatcacagtcatctttaacagcttacactgattggtgttttatctcctgtgatcctttgatggctttttttgcctaccatttcacagaggtttagacagcagtagtagctccctaggagagtttactgatgaaacagcctctgcaagattttaaaagttttgttcttttatagactgatttagaaaaacaaatgattagttaaaaaaagaaaatatacatttgttggtaactaatgttattttttaaaacctggaccttttctggaagggcagcatataaaaacatcagtcccgaggaggggacaacaatactacctcactactacatctgtgatgactggttgttcaaacacaatggagtgtgtaaggtatatgttttataattcataaccatagcctcgatcatcaagaaatactttcgaaatttcattttccttcagaatatcttaagagtgctaaatttttaactgcctttttgtcgagtcaaactgtgggattctgatttgtattaaaattgtaagctcctcactggtatactatcatcctggaggggtgttgtatggctgagcaagagagagagagaatgagagagagactgtgtgtgtgtgtgtgtgtgtgtgtgtgtgtactctgtgtgtgtatgagagagagaaatgctaaccttgtagcatgtgaagaatgtctgtaccttgatacgatagttacataatcagtatatttggtttctagatcactgtgcttattttgtttcaatctctgactaaaaatacttaaatttggtttgttaattcttattttagaaattataattttagtttatattaatttcggttatagcttactgaagaaatctttccagttagaaggaggttctaatattcacatgttctaatactttgtttattgtaaaacagctaaatttggagatacgtaaagccttgttttctctgtgtggttcagctactttccatttggtattacacagtcaaatttacatttatctattaaaattgccattttattaaacattttcatgcacagtagattcaagttgtgtctgaaaatatctcttgtgcttttttgattttgctgactttaaaaggattaatctgggcagacattatgtaaaagaaaggttgcgtttaatatattttttgaactttgtaggacaaaacatagctggttaaccttgaagtgactgttgtaccatggttgtgcacatgcttcagaatcctatggaagagaatattcctacttgcagtacatcaaaggaatggatggtggaccctactattcatgttttgagacataaatgttcactttaaagcaattgcataatagataaaaacctgaactttcattggatttttgttaattttcctcattttgaattatgtgcactaccatagctacatcagtttgatacagtattgaaaaattatcagttatattttgctgtttatgatctatttgtagattaggattaaaatggatttaatccatttttaaggctgtgtgaatttttctaaacaagaaccatttgcaatatggatttcttagagattaaaccaattataacttattagcagtcgcgagcacatgttcatatagtcaatgtaaaaatacactaatgagtatttggtaaatcccagtaggcttttaccattagcataattttgtgttgtacaattaagttacaattacatctctaattttggataatattcattggttaacaataaagtgacaaaagctcatgccttcaaaaaaaaaa

SEQ ID NO: 13236 - DNA, 3166 bp, Homo sapiens
ggcgcggcaggaggacgaggcagggcgggcgggcgctctaagggttctgctctgactccaggttgggacagcgtcttcgctgctgctggatagtcgtgttttcggggatcgaggatactcaccagaaaccgaaaatgccgaaaccaatcaatgtccgagttaccaccatggatgcagagctggagtttgcaatccagccaaatacaactggaaaacagctttttgatcaggtggtaaagactatcggcctccgggaagtgtggtactttggcctccactatgtggataataaaggatttcctacctggctgaagctggataagaaggtgtctgcccaggaggtcaggaaggagaatcccctccagttcaagttccgggccaagttctaccctgaagatgtggctgaggagctcatccaggacatcacccagaaacttttcttcctccaagtgaaggaaggaatccttagcgatgagatctactgcccccctgagactgccgtgctcttggggtcctacgctgtgcaggccaagtttggggactacaacaaagaagtgcacaagtctgggtacctcagctctgagcggctgatccctcaaagagtgatggaccagcacaaacttaccagggaccagtgggaggaccggatccaggtgtggcatgcggaacaccgtgggatgctcaaagataatgctatgttggaatacctgaagattgctcaggacctggaaatgtatggaatcaactatttcgagataaaaaacaagaaaggaacagacctttggcttggagttgatgcccttggactgaatatttatgagaaagatgataagttaaccccaaagattggctttccttggagtgaaatcaggaacatctctttcaatgacaaaaagtttgtcattaaacccatcgacaagaaggcacctgactttgtgttttatgccccacgtctgagaatcaacaagcggatcctgcagctctgcatgggcaaccatgagttgtatatgcgccgcaggaagcctgacaccatcgaggtgcagcagatgaaggcccaggcccgggaggagaagcatcagaagcagctggagcggcaacagctggaaacagagaagaaaaggagagaaaccgtggagagagagaaagagcagatgatgcgcgagaaggaggagttgatgctgcggctgcaggactatgaggagaagacaaagaaggcagagagagagctctcggagcagattcagagggccctgcagctggaggaggagaggaagcgggcacaggaggaggccgagcgcctagaggctgaccgtatggctgcactgcgggctaaggaggagctggagagacaggcggtggatcagataaagagccaggagcagctggctgcggagcttgcagaatacactgccaagattgccctcctggaagaggcgcggaggcgcaaggaggatgaagttgaagagtggcagcacagggccaaagaagcccaggatgacctggtgaagaccaaggaggagctgcacctggtgatgacagcacccccgcccccaccaccccccgtgtacgagccggtgagctaccatgtccaggagagcttgcaggatgagggcgcagagcccacgggctacagcgcggagctgtctagtgagggcatccgggatgaccgcaatgaggagaagcgcatcactgaggcagagaagaacgagcgtgtgcagcggcagctgctgacgctgagcagcgagctgtcccaggcccgagatgagaataagaggacccacaatgacatcatccacaacgagaacatgaggcaaggccgggacaagtacaagacgctgcggcagatccggcagggcaacaccaagcagcgcatcgacgagttcgaggccctgtaacagccaggccaggaccaagggcagaggggtgctcatagcgggcgctgccagccccgccacgcttgtgtctttagtgctccaagtctaggaactccctcagatcccagttcctttagaaagcagttacccaacagaaacattctgggctgggaaccagggaggcgccctggtttgttttccccagttgtaatagtgccaagcaggcctgattctcgcgattattctcgaatcacctcctgtgttgtgctgggagcaggactgattgaattacggaaaatgcctgtaaagtctgagtaagaaacttcatgctggcctgtgtgatacaagagtcagcatcattaaaggaaacgtggcaggacttccatctgtgccatacttgttctgtattcgaaatgagctcaaattgattttttaatttctatgaaggatccatctttgtatatttacatgcttagaggggtgaaaattattttggaaattgagtctgaagcactctcgcacacacagtgattccctcctcccgtcactccacgcagctggcagagagcacagtgatcaccagcgtgagtggtggaggaggacacttggatttttttttttgttttttttttttttgcttaacagttttagaatacattgtacttatacaccttattaatgatcagctatatactatttatatacaagtgataatacagatttgtaacattagttttaaaaagggaaagttttgttctgtatattttgttaccttttacagaataaaagaattacatatgaaaaaccctctaaaccatggcacttgatgtgatgtggcaggagggcagtggtggagctggacctgcctgctgcagtcacgtgtaaacaggattattattagtgttttatgcatgtaatggactatgcacacttttaattttgtcagattcacacatgccactatgagctttcagactccagctgtgaagagactctgtttgcttgtgtttgtttgtttgcagtctctctctgccatggccttggcaggctgctggaaggcagcttgtggaggccgttggttccgcccactcattccttctcgtgcactgctttctccttcacagctaagatgccatgtgcaggtggattccatgccgcagacatgaaataaaagctttgcaaaggcacgaaaaaaaaaaaaaaaaaaaaaaaaaaaaaaaaaaaaaaaaaaaaaaaaaaaaaaaaaaaaaaaaaaaaaaaaaaaaaaaaaaaaaaaaaaaaaaaaaaaaaaa

SEQ ID NO: 13237 - DNA, 1113 bp, Homo sapiens
ccgcgcagtcggaccggctgctgagacgaacgcttcactggggcagtctctgcatatcatggggagatagacgctgctgcctttaattggccttggtcctcacagctccaaaaagaaacaggatctcgataagctctatgagctgaagtccaaagctcggcagattatgaaccagtttggcccctcagccctaatcaacctctccaatttctcatccataaaaccggaaccagccagcacccctccacaaggctccatggccaatagtactgcagtggtaaagataccaggcactcctggggcaggaggtcgtcttagccctgaaaacaatcaggtattgaccaagaagaaattacaggacttagtaagagaagtggatcctaatgagcagttggatgaagatgtggaggagatgctgctgcagattgctgatgattttatcgagagtgtggtgacagcagcctgtcagcttgcgcggcatcgcaagtctagcaccctggaggtgaaagatgtccagctgcatttagagcgccagtggaacatgtggatcccaggatttggttctgaagaaatccgaccctacaaaaaagcttgcaccacagaagctcacaaacagagaatggcattgatccggaaaacaaccaagaaataacacacggaaaggtcagggaatggacagcaatgtatttggagatacttgagctgagaactcagccatctcatccttggatttttttttttaatgctttacagagaagcatatattttttattaacagtgcagcaatatctataatgactgagaggatctgccaaaagaataaagcctcctaccccaacttccggtcccttttccctgccatctcaaagaggagcaatgtatcttccagagaagattttatttgtggtttattatataagtgactgaatatgggacaaagcattatggtctttttgggtaagacagtattagcaggatttgtaaagggttttgtttccttctcccttcccccttttccctgtactttgtaatgtcagtgtttatatgaatatgactttcatttcatttgcttttccagaataaagaagttattaataaaaaaaaaaaaaaaaa

SEQ ID NO: 13238 - DNA, 2689 bp, Homo sapiens
cggaggagcagcgagtcaagatgagagttcagccgcggcggcagcagcagcagactggaaaagtaagaagagctttcctgcctttttaattaccaaactactctcagttttcaatgaatcagttcaaagaaagaatgcagtctttctatacctgactcaagaatgaacaatccgtcagaaaccagtaaaccatctatggagagtggagatggcaacacaggcacacaaaccaatggtctggactttcagaagcagcctgtgcctgtaggaggagcaatctcaacagcccaggcgcaggctttccttggacatctccatcaggtccaactcgctggaacaagtttacaggctgctgctcagtctttaaatgtacagtctaaatctaatgaagaatcgggggattcgcagcagccaagccagccttcccagcagccttcagtgcaggcagccattccccagacccagcttatgctagctggaggacagataactgggcttactttgacgcctgcccagcaacagttactactccagcaggcacaggcacaggcacagctgctggctgctgcagtgcagcagcactccgccagccagcagcacagtgctgctggagccaccatctccgcctctgctgccacgcccatgacgcagatccccctgtctcagcccatacagatcgcacaggatcttcaacaactgcaacagcttcaacagcagaatctcaacctgcaacagtttgtgttggtgcatccaaccaccaatttgcagccagcgcagtttatcatctcacagacgccccagggccagcagggtctcctgcaagcgcaaaatcttctaacgcaactacctcagcaaagccaagccaacctcctacagtcgcagccaagcatcaccctcacctcccagccagcaaccccaacacgcacaatagcagcaaccccaattcagacacttccacagagccagtcaacaccaaagcgaattgatactcccagcttggaggagcccagtgaccttgaggagcttgagcagtttgccaagaccttcaaacaaagacgaatcaaacttggattcactcagggtgatgttgggctcgctatggggaaactatatggaaatgacttcagccaaactaccatctctcgatttgaagccttgaacctcagctttaagaacatgtgcaagttgaagccacttttagagaagtggctaaatgatgcagagaacctctcatctgattcgtccctctccagcccaagtgccctgaattctccaggaattgagggcttgagccgtaggaggaagaaacgcaccagcatagagaccaacatccgtgtggccttagagaagagtttcttggagaatcaaaagcctacctcggaagagatcactatgattgctgatcagctcaatatggaaaaagaggtgattcgtgtttggttctgtaaccgccgccagaaagaaaaaagaatcaacccaccaagcagtggtgggaccagcagctcacctattaaagcaattttccccagcccaacttcactggtggcgaccacaccaagccttgtgactagcagtgcagcaactaccctcacagtcagccctgtcctccctctgaccagtgctgctgtgacgaatctttcagttacaggcacttcagacaccacctccaacaacacagcaaccgtgatttccacagcgcctccagcttcctcagcagtcacgtccccctctctgagtccctccccttctgcctcagcctccacctccgaggcatccagtgccagtgagaccagcacaacacagaccacctccactcctttgtcctcccctcttgggaccagccaggtgatggtgacagcatcaggtttgcaaacagcagcagctgctgcccttcaaggagctgcacagttgccagcaaatgccagtcttgctgccatggcagctgctgcaggactaaacccaagcctgatggcaccctcacagtttgcggctggaggtgccttactcagtctgaatccagggaccctgagcggtgctctcagcccagctctaatgagcaacagtacactggcaactattcaagctcttgcttctggtggctctcttccaataacatcacttgatgcaactgggaacctggtatttgccaatgcgggaggagcccccaacatcgtgactgcccctctgttcctgaaccctcagaacctctctctgctcaccagcaaccctgttagcttggtctctgccgccgcagcatctgcagggaactctgcacctgtagccagccttcacgccacctccacctctgctgagtccatccagaactctctcttcacagtggcctctgccagcggggctgcgtccaccaccaccaccgcctccaaggcacagtgagctgggcagagctgggctgccagaagcctttttcactctgcagtgtgattggactgccagccaggttaataaactgaaaaatgtgattggcttcctctcgccgtgttgtgagggcaaaggagagaagggagaaaaaaaaaaaaaaaccacacacacccatacacacataccagaaaaagaaagaaaggatggagacggaacatttgcctaattttgtaataaaacactgtcttttcaggattgcttcatggattggagaactttctaaccaaaaattaaaaaaaaaaaaaaaaaa

SEQ ID NO: 13239 - DNA, 2547 bp, Homo sapiens
agtgagctagcttctgagttttcccttctttttatactgttttctgtgctggcttttttgaatcttcctaatttttcatctctttaacaaactcctatgaagttgaaaccgggaagtttgctctaacatttccagagaaggtattaagtcatgatgcaggaatctgcgacagagacaataagcaacagttcaatgaatcaaaatggaatgagcactctaagcagccaattagatgctggcagcagagatggaagatcaagtggtgacaccagctctgaagtaagcacagtagaactgctgcatctgcaacaacagcaggctctccaggcagcaagacaacttcttttacagcagcaaacaagtggattgaaatctcctaagagcagtgataaacagagaccactgcaggaattgcttccagaaacaaaattatgtatctgtggccactcttctggtgatgggcatcctcacaacacatttgcagtgcctgtgtcagtggccatgatgactccccaggtgatcacccctcagcaaatgcagcagatccttcagcaacaagtcctgtctcctcagcagctacaagcccttctccaacaacagcaggctgtcatgctgcagcagcaacaactacaagagttttacaagaaacagcaagagcagttacatcttcagcttttgcagcagcagcagcaacagcagcagcagcaacaacagcagcaacaacagcagcagcaacaacaacaacaacagcagcaacaacagcagcagcagcagcaacagcagcagcagcagcaacagcatcctggaaagcaagcgaaagagcagcagcagcagcagcagcagcaacagcaattggcagcccagcagcttgtcttccagcagcagcttctccagatgcaacaactccagcagcagcagcatctgctcagccttcagcgtcagggactcatctccattccacctggccaggcagcacttcctgtccaatcgctgcctcaagctggcttaagtcctgctgagattcagcagttatggaaagaagtgactggagttcacagtatggaagacaatggcattaaacatggagggctagacctcactactaacaattcctcctcgactacctcctccaacacttccaaagcatcaccaccaataactcatcattccatagtgaatggacagtcttcagttctaagtgcaagacgagacagctcgtcacatgaggagactggggcctctcacactctctatggccatggagtttgcaaatggccaggctgtgaaagcatttgtgaagattttggacagtttttaaagcaccttaacaatgaacacgcattggatgaccgaagcactgctcagtgtcgagtgcaaatgcaggtggtgcaacagttagaaatacagctttctaaagaacgcgaacgtcttcaagcaatgatgacccacttgcacatgcgaccctcagagcccaaaccatctcccaaacctgtaaatctggtgtctagtgtcaccatgtcgaagaatatgttggagacatccccacagagcttacctcaaacccctaccacaccaacggccccagtcaccccgattacccagggaccctcagtaatcaccccagccagtgtgcccaatgtgggagccatacgaaggcgacattcagacaaatacaacattcccatgtcatcagaaattgccccaaactatgaattttataaaaatgcagatgtcagacctccatttacttatgcaactctcataaggcaggctatcatggagtcatctgacaggcagttaacacttaatgaaatttacagctggtttacacggacatttgcttacttcaggcgtaatgcagcaacttggaagaatgcagtacgtcataatcttagcctgcacaagtgttttgttcgagtagaaaatgttaaaggagcagtatggactgtggatgaagtagaataccagaagcgaaggtcacaaaagataacaggaagtccaaccttagtaaaaaatatacctaccagtttaggctatggagcagctcttaatgccagtttgcaggctgccttggcagagagcagtttacctttgctaagtaatcctggactgataaataatgcatccagtggcctactgcaggccgtccacgaagacctcaatggttctctggatcacattgacagcaatggaaacagtagtccgggctgctcacctcagccgcacatacattcaatccacgtcaaggaagagccagtgattgcagaggatgaagactgcccaatgtccttagtgacaacagctaatcacagtccagaattagaagacgacagagagattgaagaagagcctttatctgaagatctggaatgagaactgacttgtgaaacctcagcgtgaagggacatatcactgaccttcataaccactccacaaccatgaatatttgacaaatttttactgtgactatttattaagcatggataaaggagacagccctaaaggaacttactaagccagccctttgggattcagtaccaacaggca

SEQ ID NO: 13240 - DNA, 2472 bp, Homo sapiens
agtgagctagcttctgagttttcccttctttttatactgttttctgtgctggcttttttgaatcttcctaatttttcatctctttaacaaactcctatgaagttgaaaccgggaagtttgctctaacatttccagagaaggtattaagtcatgatgcaggaatctgcgacagagacaataagcaacagttcaatgaatcaaaatggaatgagcactctaagcagccaattagatgctggcagcagagatggaagatcaagtggtgacaccagctctgaagtaagcacagtagaactgctgcatctgcaacaacagcaggctctccaggcagcaagacaacttcttttacagcagcaaacaagtggattgaaatctcctaagagcagtgataaacagagaccactgcaggtgcctgtgtcagtggccatgatgactccccaggtgatcacccctcagcaaatgcagcagatccttcagcaacaagtcctgtctcctcagcagctacaagcccttctccaacaacagcaggctgtcatgctgcagcagcaacaactacaagagttttacaagaaacagcaagagcagttacatcttcagcttttgcagcagcagcagcaacagcagcagcagcaacaacagcagcaacaacagcagcagcaacaacaacaacaacagcagcaacaacagcagcagcagcagcaacagcagcagcagcagcaacagcatcctggaaagcaagcgaaagagcagcagcagcagcagcagcagcaacagcaattggcagcccagcagcttgtcttccagcagcagcttctccagatgcaacaactccagcagcagcagcatctgctcagccttcagcgtcagggactcatctccattccacctggccaggcagcacttcctgtccaatcgctgcctcaagctggcttaagtcctgctgagattcagcagttatggaaagaagtgactggagttcacagtatggaagacaatggcattaaacatggagggctagacctcactactaacaattcctcctcgactacctcctccaacacttccaaagcatcaccaccaataactcatcattccatagtgaatggacagtcttcagttctaagtgcaagacgagacagctcgtcacatgaggagactggggcctctcacactctctatggccatggagtttgcaaatggccaggctgtgaaagcatttgtgaagattttggacagtttttaaagcaccttaacaatgaacacgcattggatgaccgaagcactgctcagtgtcgagtgcaaatgcaggtggtgcaacagttagaaatacagctttctaaagaacgcgaacgtcttcaagcaatgatgacccacttgcacatgcgaccctcagagcccaaaccatctcccaaacctctaaatctggtgtctagtgtcaccatgtcgaagaatatgttggagacatccccacagagcttacctcaaacccctaccacaccaacggccccagtcaccccgattacccagggaccctcagtaatcaccccagccagtgtgcccaatgtgggagccatacgaaggcgacattcagacaaatacaacattcccatgtcatcagaaattgccccaaactatgaattttataaaaatgcagatgtcagacctccatttacttatgcaactctcataaggcaggctatcatggagtcatctgacaggcagttaacacttaatgaaatttacagctggtttacacggacatttgcttacttcaggcgtaatgcagcaacttggaagaatgcagtacgtcataatcttagcctgcacaagtgttttgttcgagtagaaaatgttaaaggagcagtatggactgtggatgaagtagaataccagaagcgaaggtcacaaaagataacaggaagtccaaccttagtaaaaaatatacctaccagtttaggctatggagcagctcttaatgccagtttgcaggctgccttggcagagagcagtttacctttgctaagtaatcctggactgataaataatgcatccagtggcctactgcaggccgtccacgaagacctcaatggttctctggatcacattgacagcaatggaaacagtagtccgggctgctcacctcagccgcacatacattcaatccacgtcaaggaagagccagtgattgcagaggatgaagactgcccaatgtccttagtgacaacagctaatcacagtccagaattagaagacgacagagagattgaagaagagcctttatctgaagatctggaatgagaactgacttgtgaaacctcagcgtgaagggacatatcactgaccttcataaccactccacaaccatgaatatttgacaaatttttactgtgactatttattaagcatggataaaggagacagccctaaaggaacttactaagccagccctttgggattcagtaccaacaggca

SEQ ID NO: 13241 - DNA, 1330 bp, Homo sapiens
ggtttttcgcaacccgggcggcgagatggcgctttggtgtaagcgaggaggacagtacaggacatgagtcctggtgagggacccgaggagcaggacagagaagacggcccctgaatcccatttggccccttgctggctggaggtgtgaaaaccagcggtggaggcagccttcggggcctgcatttgagaataagggtgtcactagttccaggcgtctgctgaaagatttggaacagaagatgatggccactccgaaccagaccgcctgtaatgcagagtcaccagtggccctggaggaggccaagacctctggtgccccggggagcccccaaacaccccctgagcgtcatgactctggtggttccctgcccctgacaccgcggatggagagccactcagaggatgaagatcttgctggggctgtcggtggcctgggctggaacagtaggagtccccggacccagagcccagggggctgctcagcggaggctgtgctggcccggaagaaacaccgtcggcggccatcgaagcgcaaaaggcactggcgaccctacctggagctgagctgggctgagaaacaacagcgggatgagaggcagagccagagggcctcccgggtccgcgaagagatgttcgccaaaggccagcccgtggccccctacaacaccacccagttcctgatgaatgacagggacccggaggagcccaacttggatgtgccccatgggatctcccacccaggttccagtggggagagtgaggccggggacagtgatgggcggggccgagcgcacggtgagttccagcggaaggacttctctgagacttacgaacgcttccacaccgagagcctgcagggccgcagcaagcaggagctggtgcgagactacctggagctggagaagcggctgtcgcaggcggaggaggagactaggaggctgcagcagctgcaggcgtgcaccggccagcagtcctgccgccaggtggaggagctggctgccgaggtccagaggctccggaccgaaaaccagcggcttcgtcaggagaaccagatgtggaaccgagagggctgccgctgtgatgaggagccgggtacctaggggtgcctcccagcctggtggacccaaggagaaggtcccatttcgtgcacactcaggccagctgggtctcaaggaggcaggtggcagatgaaaaccaccgtcaacaccctgtgcgccctgagaacagctaaatcggttcagactcccacctcaccgtttccatagttggctcttttgtgtcatcttaccctttacagagaaattaaatggccttggtgggaccaaatggg

SEQ ID NO: 13242 - DNA, 2816 bp, Homo sapiens
aggagacaccgccgcagttgccggtacatcggggatttctggctctttcctcttcgccttaaattcgggtgtcttttatgaataatcaaaagcagcaaaagccaacgctatcaggccagcgttttaaaactagaaaaagagatgaaaaagagaggtttgaccctactcagtttcaagactgtattattcaaggcttaactgaaaccggtactgatttggaagcagtagctaagtttcttgatgcttctggagcaaaacttgattaccgtcgatatgcagaaacactctttgacattctggtggctggtggaatgctggccccaggtggtacactggcagatgacatgatgcgtacagatgtctgcgtgtttgcagcccaagaagatctagagaccatgcaagcatttgctcaggtttttaacaagttaatcaggcgctacaaatacctggagaaaggttttgaagatgaagtaaaaaagctgctgctgttcttgaagggtttttcagagtcggagaggaacaagctagctatgttgactggtgttcttctggctaatggaacacttaatgcatccattcttaatagcctttataatgaaaatttggttaaagaaggagtttcagcagcttttgctgtgaagctctttaaatcatggataaatgaaaaagatatcaatgcagtagctgcaagtcttcggaaagtcagcatggataacagactgatggaactctttcctgccaataagcaaagtgttgaacacttcacaaaatattttactgaggcaggcttgaaagagctttcagaatatgttcggaatcagcaaaccatcggagctcgtaaggagctccagaaagaacttcaagaacagatgtcccgtggtgatccatttaaggatataattttatatgtcaaggaggagatgaaaaaaaacaacattcatttcatgaaagccttccagaaaatagtggtgcttttttataaagctgaagtcctgagcgaggagcccattttgaagtggtataaagatgcacatgttgcaaaggggaagagtgttttccttgagcaaatgaaaaagtttgtagaatggctcaaaaatgctgaagaagaatctgaatctgaagctgaagaaggtgactgaattttgaaactacaccctcagtaaagcaaacaggagttgtagataaaatgtcatgtctcatgtgtcctggttcttacatcttcctacctccctgtatcaagcatgatataagggctttcatggcaaattttattttaactgtttctatggttgctggaaatgttgggtttagtttctaaaaccatgttttaagtagctacaggagctatagatttgaatctaatgttgcattagtcttttcagttatcttctacctcctgtattttctactgtaataatgtaatttaaggccttccacaatgaacagttcactttattccctgggttttctataaacagttttaaggatatgatttggttaaaaaataatttgttataaaaattctgtttgcaaattaaactggaaaagtatccagagtctcaaaaggcaatgatttgtgagataatatggcatgcccggagccctgctcatcaatgaaaaacccatatgtaataatcgaattcatttaacatgaatcttgagtacgtggaccattgcttgcatgttaactttttgttttgttttgttttgttttgttttgcatttttaactccagatatcctaaagctcaattgtttggtctctggttttcatccttagagaagccatggagaacagacttgaaaagtttaggaaatcataatgtggcagaggtggtgggaagaagaaagttgagctttttccccttgagaaacttctgcatttagtttctatctttccaggcaaaacaaatgggtattcttttcatacaaccattttcaaatgaaccttagaaaagtcttaacatttaaggtattttatgcacagaatacacttagattgataggaaagaactcgtaatggagtttgagtaaagaaaatgactgatgtactaaacccagtaaaaattgttgaaaatgttaaaggtcagcatgttctaattgggaatctagatatagcttagatttcctattggcttagagtatttgctataacaaatgaagtgcaatgacaattatatattcctactcggtcatactggactggcttcgttctcttaatatactcagtaatgactcaagcctctggctattaacataccctagttgccgttttttaattgccatgagccaaatacttcttggtatacaattgatccatttattttaatggctgccttttcattttcatcttttcttgctgctacccatctatgtatgtagtcattggggggaaaatgtagccacattttttatgggaagactttgtgttaaaagtgaacattttgaaggtttttaactggtgaaactagcctggaataatgccaccagagactgagtggaaatcgccccttttgaaggtgccattcttatgagccaaaagtttgtcatttaaaagttcattttgagggaataacatgtaatataatttgaaataaaggtatagtaaccttaaaaagaacattataactgattgttgtgaatggggtgaatttgttaaaatgagtaactttgataaagtttttcatgcacaggcaaaatgtattcactagatttctacgtagtgatctgcttttactttgtaatttgtagttctcaaaagacttttttttaaaaaaataaagtccatacttacacttaaaaaaaaaaaaaaaaaaa

SEQ ID NO: 13243 - DNA, 2877 bp, Homo sapiens
atggaggatgggtttttgaactcggagaggaacaagctagctatgttgactggtgttcttctggctaatggaacacttaatgcatccattcttaatagcctttataatgaaaatttggttaaagaaggagtttcagcagcttttgctgtgaagctctttaaatcatggataaatgaaaaagatatcaatgcagtagctgcaagtcttcggaaagtcagcatggataacagactgatggaactctttcctgccaataagcaaagtgttgaacacttcacaaaatattttactgaggcaggcttgaaagagctttcagaatatgttcggaatcagcaaaccatcggagctcgtaaggagctccagaaagaacttcaagaacagatgtcccgtggtgatccatttaaggatataattttatatgtcaaggaggagatgaaaaaaaacaacatcccagagccagttgtcatcggaatagtctggtcaagtgtaatgagcactgtggaatggaacaaaaaagaggagcttgtagcagagcaagccatcaagcacttgaagcaatacagccctctacttgctgcctttactactcaaggtcagtctgagctgactctgttactgaagattcaggagtattgctatgacaacattcatttcatgaaagccttccagaaaatagtggtgcttttttataaagctgaagtcctgagcgaggagcccattttgaagtggtataaagatgcacatgttgcaaaggggaagagtgttttccttgagcaaatgaaaaagtttgtagaatggctcaaaaatgctgaagaagaatctgaatctgaagctgaagaaggtgactgaattttgaaactacaccctcagtaaagcaaacaggagttgtagataaaatgtcatgtctcatgtgtcctggttcttacatcttcctacctccctgtatcaagcatgatataagggctttcatggcaaattttattttaactgtttctatggttgctggaaatgttgggtttagtttctaaaaccatgttttaagtagctacaggagctatagatttgaatctaatgttgcattagtcttttcagttatcttctacctcctgtattttctactgtaataatgtaatttaaggccttccacaatgaacagttcactttattccctgggttttctataaacagttttaaggatatgatttggttaaaaaataatttgttataaaaattctgtttgcaaattaaactggaaaagtatccagagtctcaaaaggcaatgatttgtgagataatatggcatgcccggagccctgctcatcaatgaaaaacccatatgtaataatcgaattcatttaacatgaatcttgagtacgtggaccattgcttgcatgttaactttttgttttgttttgttttgttttgttttgcatttttaactccagatatcctaaagctcaattgtttggtctctggttttcatccttagagaagccatggagaacagacttgaaaagtttaggaaatcataatgtggcagaggtggtgggaagaagaaagttgagctttttccccttgagaaacttctgcatttagtttgtatctttccaggcaaaacaaatgggtattcttttcatacaaccattttcaaatgaaccttagaaaagtcttaacatttaaggtattttatgcacagaatacacttagattgataggaaagaactcgtaatggagtttgagtaaagaaaatgactgatgtactaaacccagtaaaaattgttgaaaatgttaaaggtcagcatgttctaattgggaatctagatatagcttagatttcctattggcttagagtatttgctataacaaatgaagtgcaatgacaattatatattcctactcggtcatactggactggcttcgttctcttaacatactcagtaatgactcaagcctctggctattaacataccctagttgccattttttaattgccatgagccaaatacttcttggtatacaattgatccatttattttaatggctgccttttcattttcatcttttcttgctgctacccatctatgtatgtagtcattggggggaaaatgtagccacattttttatgggaagactttgtgttaaaagtgaacattttgaaggtttttaactggtgaaactagcctggaataatgccaccagagactgagtggaaatcgccccttttgaaggtgccattcttatgagccaaaagtttgtcatttaaaagttcattttgcgggaataacatgtaatataatttgaaataaaggtatagtaaccttaaaaagaacattataactgattgttgtgaatggggtgaatttgttaaaatgagtaactttgataaagtttttcatgcacaggcaaaatgtattcactagatttctacgtagtgatctgcttttactttgtaatttgtagttctcaaaagacttttttttaaaaaaataaagtccatacttacacttaaaaaaaaaaaaaaaaaaagaatatacatagaactctttacaatggtagagtcaaatagagcagaactgattctgagatttttaagttctttgctaatatttaatactttctctagttagaataaactttgcattctttttcagctcaagttatttctcttgatatgttctaccaacctggaaaatgaagcattttaaattatgttagtaataattttactatactgtgaaacttttgccattgcctaggtgtcaaatcatttgacatctaggtatttattgagcaccagtgtgtatgtagtcattggctaaaacacaagacctcataatttaccagctttaaataggcaaaaagtgaagactgcataat

SEQ ID NO: 13244 - DNA, 3163 bp, Homo sapiens
agcgggaaagaaagcttgccccagaggacttaaacaggcaagaaggacttggttaaagactattgcaatagtcaacttccaatacaacagcagctggagatttatagctaacgggctgggtgaaggagttaaaggatgctaaattactaagaggaagtgatgggcagtaggggctgagcaaagataacttctgacatagtcaaaccaactccctctcagaagaacctgatgtttcctgactgctttctccttcctcagccctgccctgcttggatagaggcctccgaacaggagtaaagaatggctgttgaacatccacaaggcacctgcaagactatgaatcaaagttgagaccaagaaattatttctgaaaaaggatatggaaaaccttacaaaacacagcattgagtgttcaagtttcagaggtgattgggaatgtaaaaaccagtttgagagaaaacagggatctcaggaaggacatttcagtgaaatgatatttactcctgaagacatgcccactttcagtatccagcatcagagaattcatactgatgagaaactccttgaatgtaaggaatgtgggaaggattttagttttgtatcagtccttgttcgacatcagcgaattcatactggtgagaaaccttatgaatgcaaagaatgtggcaaggcctttggtagtggtgcaaaccttgcttaccatcaaagaattcatactggtgagaagccttttgaatgtaaagaatgtgggaaggcctttggtagtggctcaaaccttactcaccatcagagaattcatactggtgagaaaccctatgagtgtaaggaatgtgggaaagcctttagttttggatcaggccttattcgacatcagatcattcacagtggtgagaagccttatgagtgtaaggaatgtgggaagtcctttagttttgaatcagcccttattcggcatcacagaattcacacaggtgagaaaccttatgaatgtatagattgtggtaaagcctttggcagtggttcaaaccttactcaacatcggcggattcatactggtgagaaaccttatgaatgcaaagcatgtggaatggcctttagcagtggttcggctcttactcggcatcagagaattcataccggtgagaaaccatatatatgtaatgaatgtggtaaggcctttagttttggatcagcccttactcgacatcaaagaattcatactggtgagaaaccttatgtatgtaaggaatgtgggaaggcttttaatagtggctcagatctcactcagcatcagagaattcacactggtgagaaaccctatgagtgtaaggagtgtgagaaagcctttagaagtggttcaaaacttattcagcatcaaagaatgcatactggagagaaaccttatgaatgtaaggaatgtgggaagacctttagtagtggttcagaccttactcaacatcacagaattcatactggtgagaaaccctatgaatgtaaggaatgtgggaaggcctttggtagtggctcaaaacttatccaacaccagctaatccatactggtgaaagaccctatgaatgtaaagaatgtggaaagtcctttagtagtggttcagctcttaatcggcaccagagaatacacactggtgagaaaccctatgaatgtaaggagtgtgggaaggctttttatagtggctcaagccttactcagcatcagagaattcatacaggtgagaaactttatgaatgtaagaactgtgggaaggcttatgggagggattcagagtttcagcaacataagaaaagtcataatggtaagaaactctgcgaattggaaactataaattgaaattatgtgctgaaggaaggactctaaacatatgacttaagaaaattcatagtggtgaaaatctctacaaatagaactaaggtacaaatgccttacttatgcttcacaggttagtcagtctaagaatatttatacaggaaaaaaatcaccccaaataaaataaatatttgaagatccttatctatattcattccttcattacttttggaaaattcttacttgtgaatgttaaaaatgaaaaaaaaatcatttattatattttgcctcaactttaaacattggaaaactcatttctgggttaatcctactatattttttcaatggtcttttttttttgtattatacagaattactgattcattgaaaaattattttatttattgcaagtctaaatttatcctttttttctttcctgattatcctaacaccatttattcaataaccttgtccattttcatattttttttattgactatttgatggtaagttacatttttattcacataaagcttggatatcaggtcagtgtttttttgtttttgtttttgtttttgtttttttgagatggagtctcactgtcaccaggctggagtgcagtggtgcaatctcggttcactgcaacctccacctcccgagttcaagtgattttcctgcctcagctccccagtagctgggactacaggcgcccgccaccacgcccagctaattttttgtattttcattagagatggggtttcaccacgttggccaggatggtctcgatctcttgacctcgtgatccatctgcctcggcctcccaacgtgctggaattacaggcatgagccaccatgcctggcccagtgtttgttttttaaatttatatatatgtatctatgtctcatcctgtttatggtcaataactgttacttttaagtatcctttaatacctgtaccttttgttttagaagattgtttactttccttttataaaattatactctccattttagcaaaacagctttccctcatcataatgtagataaaaagaaaaaaaggatatggttacctgtaatcttaccaatcatagataatcactgtcaaacttttggagcaaatcctttaatactatctctcattgttttggaaacaaggtgtgattatgctatactataaccagcccttaatattttttgtctgtaaatatgttgttaccattttattggctttatagtattcacctgtctttatcaaaccccaattttgtcaaatattaaaaattttgccattataaaaaaaaaaaaaaaaaaaaaaaaaaaaaaaaagaaaaaaaaaaaaaa

SEQ ID NO: 13245 - DNA, 1605 bp, Homo sapiens
cagcgccggggcggagggtacgatggagaatttcacggcactgtttggggctcaggctgacccaccaccgcccccaaccgcactcggcttcggaccaggaaagcctccacccccgccaccgcctcctgcgggcgggggacccggcacggccccgcctcccaccgcggccacggctcctcctggcgcggacaagtcaggagctggctgtggccctttttacctcatgagggaactgccaggtagcacagagctgacaggcagcacgaatctgatcacacactacaacttggaacaagcctataataaattctgtgggaagaaggtgaaggagaagctaagtaacttcctgcctgacctgccagggatgattgatctgcctggttcccatgataacagcagcctccgctctctcattgagaagccccctattctcagtagctctttcaatcctatcacagggaccatgctggccggcttccgcctccacactggcccgttgccggagcagtgtcgtctgatgcatattcagcctcccaagaagaagaataagcacaagcacaaacagagccgtacccaggatcctgtccccccaggtaaacccagttaagttccgtatggagctctggactcctaaattcccctgaagaagaaaccaatgtactgtggtctcttgggacttgggacagggactctagcagcacctctgtatcctttctggccatttggacaaaagcagttgccccgacttgggattttcctgtagtcttcagtggttcataacagtagaggattttgagctttacaggtgataggtacctaatgtctcctacagaaacaccatctgattcagatcacaagaagaagaaaaagaaaaaagaagaggatcctgaacggaaaaggaagaagaaagagaagaagaaaaagaaggtagagtagaggcctattgccacaacccagtgagtttccccagatctcacccctgtcctaaataccctagagttctttgcctcaagttggacccaagattgaaaacccaaggcaggttgcaggtttctcctgtacagcctgatcaaagccaaggctagttcctagttgttcttaccctgcttctttctcccccagaatcgacatagtccagaccacccaggtatgggcagctcccaggccagcagcagcagcagcctacgctaataggaccactggactctttgccaggatggcttttcctgctgtactgaacctgctgataaaagctgccttccaggctcttggacactgccttgggagcatcctgcagctgggacagaggccagctcctgttgggctcagttgagactaagtaaattaggagagagagggacatgcttttgtaggctcatcccagttggttttctcatggacatctcttcctctcccaggaagcttacaattttcttctctctcttttgtgcaatttgtctgatttaggacttgttctgtgttttctttaaaaaaaaaaaaattacatttatcaaaaaaaaaaaaaaaaaaaaaaaaaaaaaaaaaaaaaaaaaaaaaaaaaaaaaaaaaaaaaaaaaaaaaaaaaaaaaaaaaaaaaaaaaaaaa

SEQ ID NO: 13246 - DNA, 907 bp, Homo sapiens
agcgtcgggacaaaccagccagcctctccagagcaggcgtgtgatctctgtacccccgcagtggtcagaatatggagaacttctcactcctcagcatctctggacctccaatctcttcctccgccctgagtgcttttcccgacattatgttctctcgtgccaccagcctgccagacattgcaaagacagcagtacccactgaggcatccagcccagctcaggccctgccaccccagtaccaaagcatcattgtcaggcaagggatacagaacacagtgctctcaccagactgcagcttgggggacacccagcacggagagaagctgaggcggaactgcactatctaccggccctggttctccccctacagctacttcgtgtgtgcagacaaagagagccagctggaggcctatgacttcccagaggtgcagcaggatgagggcaagtgggacaactgcctttctgaggacatggctgagaacatctgttcgtcctcttcctccccagagaacacttgccctcgagaagccaccaagaaatccaggcatggcctggactccatcacatcccaggacatcctaatggcttccagatggcacccagcacagcagaatggctacaagtgcgtggcctgctgccgcatgtaccccaccctggacttcctcaagagccacatcaagaggggcttcagggagggcttcagctgcaaggtgtactaccacaagctcaaagccctctggagcaaggagcagaaggcccggctgggagacaggctctcctccggcagctgccaggccttcaatagtcctgctgaacaccttaggcaaattggcggtgaagcctacttatgtctctagagagatgccaataaagttagtcacagccttcaagaaaaaaaaaaaaaaaa

SEQ ID NO: 13247 - DNA, 396 bp, Homo sapiens
actccgccttccacgtgcacccactgcctcttcccttctcgcttgggaactctagtctcgcctcgggttgcaatggaccccaactgctcctgtgccgctggtgtctcctgcacctgcgccagctcctgcaagtgcaaagagtgcaaatgcacctcctgcaagaagagctgctgctcctgctgccctgtgggctgtgccaagtgtgcccaaggctgcatctgcaaaggggcatcggagaagtgcagctgctgcgcctgatgtcgggacagccctgctcccaagtacaaatagagtgacccgtaaaatctaggattttttgttttttgctacaatcttgacccctttgctacattcccttttttctgtgaaatatgtgaataataattaaacacttag

SEQ ID NO: 13248 - DNA, 1867 bp, Homo sapiens
agttgtggccaccttccccaggccatggatctctccaacaacaccatgtcactctcagtgcgcacccccggactgtcccggcggctctcctcgcagagtgtgataggcagacccaggggcatgtctgcttccagtgttggaagtggttatgggggaagtgcctttggctttggagccagctgtgggggaggcttttctgctgcttccatgtttggttctagttccggctttgggggtggctccggaagttccatggcaggaggactgggtgctggttatgggagagccctgggtggaggtagctttggagggctggggatgggatttgggggcagcccaggaggtggctctctaggtattctctcgggcaatgatggaggccttctttctggatcagaaaaagaaactatgcaaaatcttaatgatagattagcttcctacctggataaggtgcgagctctagaagaggctaatactgagctagaaaataaaattcgagaatggtatgaaacacgaggaactgggactgcagatgcttcacagagcgattacagcaaatattatccactgattgaagacctcaggaataagatcatttcagccagcattggaaatgcccagctcctcttgcagattgacaatgcgagactagctgctgaggacttcaggatgaagtatgagaatgaactggccctgcgccagggcgtagaggccgacatcaatggcctgcgccgggtgctggacgagctgaccctgaccaggaccgacctggagatgcagatcgagagcctgaacgaggagctggcctacatgaagaagaaccacgaggatgagctccaaagcttccgggtgggcggcccaggcgaggtcagcgtagaaatggacgctgcccccggagtggacctcaccaggctcctcaatgatatgcgggcgcagtatgaaaccatcgctgagcagaatcggaaggacgctgaagcctggttcattgaaaagagcggggagctccgtaaggagattagcaccaacaccgagcagcttcagtccagcaagagcgaggtcaccgacctgcgtcgcgcctttcagaacctggagatcgagctacagtcccagctcgccatgaagaaatccctggaggactccttggccgaagccgagggcgattactgcgcgcagctgtcccaggtgcagcagctcatcagcaacctggaggcacagctgctccaggtgcgcgcggacgcagagcgccagaacgtggaccaccagcggctgctgaatgtcaaggcccgcctggagctggagattgagacctaccgccgcctgctggacggggaggcccaaggtgatggtttggaggaaagtttatttgtgacagactccaaatcacaagcacagtcaactgattcctctaaagacccaaccaaaacccgaaaaatcaagacagttgtgcaggagatggtgaatggtgaggtggtctcatctcaagttcaggaaattgaagaactaatgtaaaatttcacaagatctgccccatgattggttccttaggaacaagaaatttacaagtagaaattattcctttcagagtaacatgctgtattacttcaatccctatttttgtctgttccattttctttggattccctattcacattgaatcctttttgcccttctgaaacaatattcagtcacaagtcattttggtcatgttggtctttgtaacaaatcaaaattaccttatatccttctggacctggagtagtcttttaacgaactttcttctggtaacccggaatattttttaatcatagagctttactcaagtagtattgttttaatagagttaattgtaataaaagatgaatggtaa

SEQ ID NO: 13249 - DNA, 3390 bp, Homo sapiens
caagccagagcaatcgaacggttctgagtcatctgccggaagccttgccctcaatcaaggcggacgtgaagcatctacaaaggaggaatagtcaaagcagcagcggcggcggcggcggcggcagcagcagcagcagcaggagaccttctctgatggatgacctctgtgaagcaaatggcacttttgccatcagcttatttaaaatattgggggaagaggacaactcaagaaacgtattcttctctcccatgagcatctcctctgccctggccatggtcttcatgggggcaaagggaagcactgcagcccagatgtcccaggcactttgtttatacaaagacggagatattcaccgaggtttccagtcacttctcagtgaagttaacagaactggcactcagtacttgcttagaactgccaacagactctttggagaaaagacgtgtgatttccttccagactttaaagaatactgtcagaagttctatcaggcagagctggaggagttgtcctttgctgaagacactgaagagtgcaggaagcatataaatgactgggtggcagagaagactgaaggtaagatttcagaggtactggatgctgggacagtcgatcccctgacaaagctggtccttgtgaatgccatttatttcaagggaaagtggaatgagcaatttgacagaaagtacacaaggggaatgctctttaaaaccaacgaggaaaaaaagacagtgcagatgatgtttaaggaagctaagtttaaaatggggtatgcggatgaggtacacacccaggtcctggagctgccctatgtggaagaggagctgagcatggtcattctgcttcccgatgacaacacggacctcgccgtggtggaaaaagcacttacatatgagaaattcaaagcctggacaaattcagaaaagttgacaaaaagtaaggttcaagttttccttcccagattaaagctggaggagagttatgacttggagcctttccttcgaagattaggaatgatcgatgcttttgacgaagccaaggcagacttttctggaatgtcaactgagaagaatgtgcctctgtccaaggttgcccacaagtgcttcgtggaggtcaatgaggaaggcacagaggctgccgcagccactgctgtggtcaggaattcccggtgcagcagaatggagccaagattctgtgcagaccacccttttcttttcttcatcaggcaccacaaaaccaactgcatcttgttctgtggcaggttctcttctccgtaaagaggagcaattgctgtacataccctcctttccttctacctatcttgccttaattaacattccctgtgacctagttggtgcagtggcttgaatgccaaaataaagcgtgtgcactggatagtgtgtgaaagtctttgctgaaagttccagagccattgagaataactgaggccgcagatgcatgaaatttgggcctgggaaggctatgctggttttggagtgtttggggtgcctgccattgcctctgccttcacctaagtctgtgcccattgtttcaggggatcttatggagcatctcagggcttcaggagccagccctcttccatccgcccggctctgcccaccaccactgccaggctgaacaggggactagtgcccaggtgacactgcacacaaagccaagggcaaaccctatagagtaaagctgcagccaccctgtgtctcatgtgcagctgaaatagtgatctgcttctgtcactgtcacatagacagccctgcatgccccctgtctcacacagtttgtaatgaagacagctccttctcatctttccataagcctgagatacaagttcagggactcagcaatgcactttaggactgagctaggaggcaaatatctgaagcttgctatgctgttctttccattccttttccctctgaaacacacaaaataccaaaggaacttacgcaacacaccactgagtcctctaactaatcatatgtgctcagacacagctcaagcacaccccttagttaagaaagaacctccatatacattaatttttttctgcctaaaaataaaattgcgttgtggcagcaatttggaaactacagcaaagtctccaaaaaaattgaagtcacccacaattccaacacacagcaatcactgctgttaatagtgatatacatccttccctattatgtgtatgcaaatagaaatttataagcattttactacaagttaatcatatccttcagtagcttatttcttcccttatgaaaaacctcccttaagatctttccaggtcatcaatttgatgtgcatagtattccactgtgtggctggatttctataattgaatctaattttagacagtttgagtaattaaaattatttctattaacaaataatagattgctaataatatatattatgctgttttggatatactaaatatttgctcacatccttaatatattttttaaaattcctaacaatagtactgttgagataaaagttgagcacattttgagacttcttccaaattggtccctagaaagttacactggtttgtactctcacttatgtcactgtttataccaccactgactgctgcctgctttattatttctttaatgagttggactgaacagtggttaatcctgactctgtttttgactgacagttaacagttacatgaaccattcatattacagctcttacttaaatttgaccaagccaggatatatctgttaggccacattcatttagggatcatgttttccaaagcaggtttgggcaaaattaatccacaggactgaaaggtatacatctgtgagttttgttctcacttccacctctaatttgaagaacactttaattgacacagaatacatttcacatatttaacctctacaataagttctgacacattttccatgaaacaaaccatcgctatattcaagataatgaacctatctatcatactcccaaattccttcttgcatctttgtaatttctcactcttccttctccctctccccgtcccatcccaaccactgatctgctcaggcaactaccaatcttctttctgtcactatagattaatttgcatttttaaagaaatttacatacatggaaccatacatcatctatgctttgtagtatgactcctgtcactcagtacaattattttgagattcatttatgttattgtatgtatcaatagttcatcccttttattggtaagtaacatttttttgtataggtataccatgatttgttgatgaacaaatttacctgttgatgaacatttacgttgttaccaagatttttgctattgaaaataaagtttttatgaatatttatatatataaaaaaaaaaaaaaaaaa

SEQ ID NO: 13250 - DNA, 3407 bp, Homo sapiens
caagccagagcaatcgaacggttctgagtcatctgccggaagccttgccctcaatcaaggcggacgtgaagcatctacaaaggaggaatagtcaaagcagcagcggcggcggcggcggcggcagcagcagcagcagcaggaggtgggggcctctgccagaccttctctgatggatgacctctgtgaagcaaatggcacttttgccatcagcttatttaaaatattgggggaagaggacaactcaagaaacgtattcttctctcccatgagcatctcctctgccctggccatggtcttcatgggggcaaagggaagcactgcagcccagatgtcccaggcactttgtttatacaaagacggagatattcaccgaggtttccagtcacttctcagtgaagttaacagaactggcactcagtacttgcttagaactgccaacagactctttggagaaaagacgtgtgatttccttccagactttaaagaatactgtcagaagttctatcaggcagagctggaggagttgtcctttgctgaagacactgaagagtgcaggaagcatataaatgactgggtggcagagaagactgaaggtaagatttcagaggtactggatgctgggacagtcgatcccctgacaaagctggtccttgtgaatgccatttatttcaagggaaagtggaatgagcaatttgacagaaagtacacaaggggaatgctctttaaaaccaacgaggaaaaaaagacagtgcagatgatgtttaaggaagctaagtttaaaatggggtatgcggatgaggtacacacccaggtcctggagctgccctatgtggaagaggagctgagcatggtcattctgcttcccgatgacaacacggacctcgccgtggtggaaaaagcacttacatatgagaaattcaaagcctggacaaattcagaaaagttgacaaaaagtaaggttcaagttttccttcccagattaaagctggaggagagttatgacttggagcctttccttcgaagattaggaatgatcgatgcttttgacgaagccaaggcagacttttctggaatgtcaactgagaagaatgtgcctctgtccaaggttgcccacaagtgcttcgtggaggtcaatgaggaaggcacagaggctgccgcagccactgctgtggtcaggaattcccggtgcagcagaatggagccaagattctgtgcagaccacccttttcttttcttcatcaggcaccacaaaaccaactgcatcttgttctgtggcaggttctcttctccgtaaagaggagcaattgctgtacataccctcctttccttctacctatcttgccttaattaacattccctgtgacctagttggtgcagtggcttgaatgccaaaataaagcgtgtgcactggatagtgtgtgaaagtctttgctgaaagttccagagccattgagaataactgaggccgcagatgcatgaaatttgggcctgggaaggctatgctggttttggagtgtttggggtgcctgccattgcctctgccttcacctaagtctgtgcccattgtttcaggggatcttatggagcatctcagggcttcaggagccagccctcttccatccgcccggctctgcccaccaccactgccaggctgaacaggggactagtgcccaggtgacactgcacacaaagccaagggcaaaccctatagagtaaagctgcagccaccctgtgtctcatgtgcagctgaaatagtgatctgcttctgtcactgtcacatagacagccctgcatgccccctgtctcacacagtttgtaatgaagacagctccttctcatctttccataagcctgagatacaagttcagggactcagcaatgcactttaggactgagctaggaggcaaatatctgaagcttgctatgctgttctttccattccttttccctctgaaacacacaaaataccaaaggaacttacgcaacacaccactgagtcctctaactaatcatatgtgctcagacacagctcaagcacaccccttagttaagaaagaacctccatatacattaatttttttctgcctaaaaataaaattgcgttgtggcagcaatttggaaactacagcaaagtctccaaaaaaattgaagtcacccacaattccaacacacagcaatcactgctgttaatagtgatatacatccttccctattatgtgtatgcaaatagaaatttataagcattttactacaagttaatcatatccttcagtagcttatttcttcccttatgaaaaacctcccttaagatctttccaggtcatcaatttgatgtgcatagtattccactgtgtggctggatttctataattgaatctaattttagacagtttgagtaattaaaattatttctattaacaaataatagattgctaataatatatattatgctgttttggatatactaaatatttgctcacatccttaatatattttttaaaattcctaacaatagtactgttgagataaaagttgagcacattttgagacttcttccaaattggtccctagaaagttacactggtttgtactctcacttatgtcactgtttataccaccactgactgctgcctgctttattatttctttaatgagttggactgaacagtggttaatcctgactctgtttttgactgacagttaacagttacatgaaccattcatattacagctcttacttaaatttgaccaagccaggatatatctgttaggccacattcatttagggatcatgttttccaaagcaggtttgggcaaaattaatccacaggactgaaaggtatacatctgtgagttttgttctcacttccacctctaatttgaagaacactttaattgacacagaatacatttcacatatttaacctctacaataagttctgacacattttccatgaaacaaaccatcgctatattcaagataatgaacctatctatcatactcccaaattccttcttgcatctttgtaatttctcactcttccttctccctctccccgtcccatcccaaccactgatctgctcaggcaactaccaatcttctttctgtcactatagattaatttgcatttttaaagaaatttacatacatggaaccatacatcatctatgctttgtagtatgactcctgtcactcagtacaattattttgagattcatttatgttattgtatgtatcaatagttcatcccttttattggtaagtaacatttttttgtataggtataccatgatttgttgatgaacaaatttacctgttgatgaacatttacgttgttaccaagatttttgctattgaaaataaagtttttatgaatatttatatatataaaaaaaaaaaaaaaaaa

SEQ ID NO: 13251 - DNA, 1793 bp, Homo sapiens
cgcgtccgccccgcgagcacagagcctcgcctttgccgatccgccgcccgtccacacccgccgccagctcaccatggatgatgatatcgccgcgctcgtcgtcgacaacggctccggcatgtgcaaggccggcttcgcgggcgacgatgccccccgggccgtcttcccctccatcgtggggcgccccaggcaccagggcgtgatggtgggcatgggtcagaaggattcctatgtgggcgacgaggcccagagcaagagaggcatcctcaccctgaagtaccccatcgagcacggcatcgtcaccaactgggacgacatggagaaaatctggcaccacaccttctacaatgagctgcgtgtggctcccgaggagcaccccgtgctgctgaccgaggcccccctgaaccccaaggccaaccgcgagaagatgacccagatcatgtttgagaccttcaacaccccagccatgtacgttgctatccaggctgtgctatccctgtacgcctctggccgtaccactggcatcgtgatggactccggtgacggggtcacccacactgtgcccatctacgaggggtatgccctcccccatgccatcctgcgtctggacctggctggccgggacctgactgactacctcatgaagatcctcaccgagcgcggctacagcttcaccaccacggccgagcgggaaatcgtgcgtgacattaaggagaagctgtgctacgtcgccctggacttcgagcaagagatggccacggctgcttccagctcctccctggagaagagctacgagctgcctgacggccaggtcatcaccattggcaatgagcggttccgctgccctgaggcactcttccagccttccttcctgggcatggagtcctgtggcatccacgaaactaccttcaactccatcatgaagtgtgacgtggacatccgcaaagacctgtacgccaacacagtgctgtctggcggcaccaccatgtaccctggcattgccgacaggatgcagaaggagatcactgccctggcacccagcacaatgaagatcaagatcattgctcctcctgagcgcaagtactccgtgtggatcggcggctccatcctggcctcgctgtccaccttccagcagatgtggatcagcaagcaggagtatgacgagtccggcccctccatcgtccaccgcaaatgcttctaggcggactatgacttagttgcgttacaccctttcttgacaaaacctaacttgcgcagaaaacaagatgagattggcatggctttatttgttttttttgttttgttttggttttttttttttttttggcttgactcaggatttaaaaactggaacggtgaaggtgacagcagtcggttggagcgagcatcccccaaagttcacaatgtggccgaggactttgattgcacattgttgtttttttaatagtcattccaaatatgagatgcattgttacaggaagtcccttgccatcctaaaagccaccccacttctctctaaggagaatggcccagtcctctcccaagtccacacaggggaggtgatagcattgctttcgtgtaaattatgtaatgcaaaatttttttaatcttcgccttaatacttttttattttgttttattttgaatgatgagccttcgtgcccccccttccccctttttgtcccccaacttgagatgtatgaaggcttttggtctccctgggagtgggtggaggcagccagggcttacctgtacactgacttgagaccagttgaataaaagtgcacacctta

SEQ ID NO: 13252 - DNA, 1642 bp, Homo sapiens
tttcagcctcacctgcagctgcgcctccttgcacctgcgcctgtgctttttctcccagcactgcggacgcgactcgagggtgacgctcgctccgctcgtcccgctcgtcatggcctacccgggatacggaggagggtttggaaattttagcattcaggtgccaggaatgcagatgggacagccagtgccagaaacaggcccagctatactcctcgatggatactctgggccagcatattcagacacttattcctcagctggtgactccgtgtatacttacttcagtgctgttgctggacaggatggtgaagtggatgctgaagaacttcagagatgtttgacacagtctggaattaatggaacttactctcccttcagtttggaaacctgcagaattatgattgccatgttggatagagatcacacaggaaaaatgggatttaatgcattcaaagagctatgggcagctcttaatgcctggaaggaaaacttcatgactgttgatcaagatggaagtggcacagtagaacatcatgagttgcgtcaagccattggtcttatgggttataggttgagtcctcaaacattaactactattgttaaacgttatagcaagaatggcagaattttctttgatgattatgttgcttgctgtgtgaagcttcgagcattgacagatttctttaggaaaagagaccacttgcaacaagggtctgcgaatttcatatatgacgattttttgcagggcactatggcaatttgaatgcttagaattttaaacctgaagagacactgtgaattcttttgtttggaagaagtgaactggactactttaaaacttttaagggttttctatgttcttcctacctgttaaacctcttccctttctgtgtgtttttattttagcagatagttcaaagcaataaaagatttcttttttaatttgaggtattactgcttttggaaaagttattttataaatatgtgcatattgtcataaaatattgtatgattaattgatttaaataatgcttagccttaattttagataatgtaaatttagaggaatgtactttacaagatagattgtataagaagccaaataatgaaagcctagggaaaaaactaatttatacttatctgaaggttacaaattagacttttaaattttctttgtagttggtggtgtttgagggttggctagaaatgaaagcctggattttgtgccatgtttgtaatatagtttgttccttgatcaaataatcagagaaaagaaacttaaagatctttgtctgtgaagaagaaaattatctccctagttcaatctgtagtgaaataagactacagaaggcattgttttttccttttttattttttgtattatatatttttcttaaatatgttttattgtcttctctaagcaaaaagttcttaataaacatagtatttctctctgcgtcctatttcattagtgaagacatagttcacctaaaatggcatcctgctctgaatctagactttttagaaatggcatatgtttttgatgatatgtcaacattcaaaattgtcctaattaaattgttgtttaaatgtaatgtcaactctttataaacttaaaaataaacaagtaattaaccactca

SEQ ID NO: 13253 - DNA, 1286 bp, Homo sapiens
ggcgccgcggacgctgctggagtcgcctggcaacgatgtcgcctggcaactgaataggttggccagtggcgcgggctactggaagcagaaagggctgcggaggcagtgagtggtttctgcagagcttcatttggaaaggcctctgtagttggggaaagatggcccattcccagaactccttggagcttcccattaacatcaatgccacccagattaccactgcctatggccatcgggccctgcccaagctgaaggaggagctgcagtcagaggacctccagacgaggcagaaagccctcatggccttgtgtgacctcatgcatgaccccgagtgtatctacaaggccatgaacataggctgtatggagaacctgaaagctttgctgaaggatagcaacagtatggtgcgcataaagaccaccgaggtgctccacatcacggcaagccatagcgtgggcagatacgcctttctagagcacgacatcgtccttgccctgtccttcctgctgaatgaccccagcccagtctgccgggggaacctgtacaaggcatacatgcagctggtccaggtgcctagaggggcccaagagatcatcagcaaaggtctgatttcctcactggtatggaagctgcaggtggaggtggaggaggaggagttccaggagttcatcctggacacactggtcctctgcctgcaggaggatgccaccgaggccctgggcagcaatgtggtgcttgtcctgaagcagaagctcctcagcgccaaccagaacatccgcagcaaggccgcccgtgcgctccttaatgtcagcatatctcgagagggcaagaaacaggtgtgtcattttgacgtcatccccatcctggtccatctgctgaaagacccagtggagcatgtgaagtctaacgctgccggtgccctgatgttcgccacagtgatcactgaagggaagtatgcggccctggaggcacaagccatcggcctgctcctggagctgctgcactcccccatgaccatagcgcgcctgaatgccaccaaggcccttaccatgctggcagaggcccccgagggccgcaaggccctgcagacgcacgtgcccactttccgtgccatggaggtggagacttacgaaaagcctcaagtggccgaagccttacagcgggcagcccggatcgccatcagtgtcatcgagttcaaaccctgagcccttcattcacctctgtgagtgaataaatgtgctaagtctctttaaaaaaaaaaaaaaaaaaaaaaaaaaaaaaaaaaa

SEQ ID NO: 13254 - DNA, 8056 bp, Homo sapiens
ctgctctccctgagcccgctcccgagcgctgctttcccgccgcgggtgggcttcgcagcctcaggccagccgcggcccttggcccgctgcagccccggccctccaccttccccgtgcaggggcggcccggccagtgtcgctcatcccgggacgctcccttctcccacccaggactgccccgcggagctggcttggacacccaactttgccacctcgagggtcgtctctgctgggcgcgaacctgcccacccaccggttggccgcgcgctcggggaccgtgctcgtggcccccaagccggtgcccccattctggaactcagcgagtagggggcggctctggggaagtggcagggggcggctgcagctgctgcctccacttccctagccaggtgctgaagaggatcctcggagccgctctggcccccaggcgctggatgactggcaccagcgctcctcgcacctgtgttggtgtgtgagacttgggctggagtgcccacgtggctgtggagtcagtgtgattcatgattgaggaaacgcgtcctccatcctctctctccttggcactttccacacatgaggagaagaagagcttctgtttagaagacacgtgcccagagtcagaggccccttgcccaccatgaagggaacctgtgttatagcatggctgttctcaagcctggggctgtggagactcgcccacccagaggcccagggtacgactcagtgccagagaaccgagcatccagtcatctcctataaagaaattggcccctggttacgggagttcagagcgaagaatgctgcggatttctcgcagttaacatttgacccaggacagaaagaacttgttgtaggagcaagaaactacctcttcaggttacagcttgaggatctgtctcttatccaggctgtggaatgggagtgtgatgaagctaccaaaaaggcctgttacagcaaaggcaaatcaaaggaggaatgtcagaactacatccgggtgcttctggtgggtggcgaccggttattcacctgtgggaccaatgcattcacgcctgtctgcaccaaccgctcgttgagcaacctggctgagatccatgatcagatcagtggcatggcccgctgtccctacagtccccagcacaattccacagcgctcctcacagctggtggggagctctatgctgctacagccatggattttccaggacgtgatcctgccatttaccgaagcctaggcattttacctcctctccgcacggcgcagtacaactccaaatggctcaatgagccaaactttgtgtcatcttatgacatcggaaattttacctacttctttttccgagaaaatgcagtagagcatgactgtgggaaaacagtgttctccagagctgcccgggtgtgcaagaacgatattggtgggcgcttcctgctggaagacacctggaccacattcatgaaggctcgcctgaactgctcccgtcctggggaagtccccttttactacaacgaattgcagagtactttcttcctgcctgagctggatttgatctatggcatctttaccaccaatgtgaacagcattgcggcctcagctgtgtgcgtcttcaacctgagcgccatcgcgcaggccttctctgggcccttcaagtaccaagaaaactcgcgctcggcctggctaccgtatcccaacccaaacccccacttccagtgtggcaccgtggaccagggcctgtacgtgaacctgaccgagagaaatctgcaggatgctcagaagttcattctggtgcatgaggtggtacagccagtgaccacagtgccctccttcatggaggacaatagccgcttttcccacgtggcagtcgacgtggtgcagggcagagaagcgctcgtccacatcatctatttggccacagattacggaaccattaagaaagtgcgggtacccctgaatcagacctcaagcagctgtttgctggaagagattgagctcttccctgagaggcggagggagcccatcaggagcctgcagatcctgcacagccagagtgtcctgttcgtggggctgcgggagcacgtggtcaagatccccctgaagaggtgccagttctaccgcacacgcagcacctgcattggggcccaggacccttactgtggctgggatgtggtaatgaagaaatgcacaagcctggaggagagcctgagcatgacgcagtgggaacagagcatctctgcgtgtccgaccaggaatctcaccgtggatgggcactttggtgtgtggtctccgtggacgccttgcacgcacacagatggcagcgccgtgggatcctgcctctgtcgaacccgctcctgcgacagcccggccccgcagtgtggtggctggcagtgcgagggccctggcatggagatcgccaactgttccaggaacggaggctggactccctggacctcgtggtctccctgcagcactacctgtgggatcggcttccaggtgcggcagcgctcctgcagcaaccccactcccaggcacgggggccgggtgtgcgtgggacagaaccgcgaggaaagatactgcaatgaacatttgctatgtcccccacacatgttctggacaggctggggtccttgggaacggtgcacagcccaatgcgggggtggcattcaagctcgccgcaggatctgtgagaatgggcctgactgtgcaggctgcaatgtggagtaccagtcttgcaacaccaacccgtgtcctgagctgaagaagaccacgccctggacaccctggacacctgtcaacatctctgacaacggcgaccactatgagcaacgattccgatacacatgcaaagcccgcctggctgatccgaatttgctggaagtgggaagacagagaatcgaaatgcggtactgttctagcgacggcaccagtggctgctccacagatgggctttctggggatttcctgcgtgctgggagatactctgcccacacggtcaacggggcttggtcagcctggacgtcgtggtcacagtgcagccgtgactgcagcaggggcattcggaaccggaagcgtgtttgcaacaaccccgaacccaagtatgggggaatgccttgccttggcccatctctggaataccaggaatgcaacactttgccctgcccagtggatggcgtgtggtcttgctggtccccctggacaaaatgttcagcaacatgcggcggtggacactatatgaggacccgctcttgctccaatccagccccggcctatggaggggacatctgcctggggctgcacacagaagaggcactctgcaacacgcagccctgcccagagagctggtcggagtggtcggactggtctgagtgtgaagcctctggcgtccaagtccgcgcccgccagtgcatcctcctgttccccatgggcagccagtgctccgggaacaccacggagagccggccgtgtgtgtttgactctaatttcatcccagaagtatctgtggcaagatccagtagcgtagaagagaaaaggtgtggagagttcaacatgttccacatgatcgccgtggggctgagcagctccatcctcggctgcctcctcaccctgctcgtctatacttactgccagcggtaccagcagcaatcccacgatgcgactgtcatccaccccgtctcacctgccccccttaataccagcataaccaaccacatcaacaaactggacaagtacgactcggtggaggccatcaaggcatttaacaaaaacaacttgatcctagaggaaagaaacaaatacttcaacccacatctcactgggaagacctattctaatgcctactttacagatctcaataattatgatgagtactaacagctttcatgttttgggcttcttgtaaatccccagttcctcaaggcctgtgccccatgactgcccatgtttctgaggcttcagagtcgaagtttggatacatttcaagtgcatttcaagccaccagagtgtcccattggtgccaaaaatacacgtctttaaaagcaacaaaaattgaaataagacatcgtgaaaatcttgaccattgttgattgagccagggtggtgaagtttttaattggtgttcatcctatttttctgacaagtccattggtttgttttttgagcattattttataaatgtgccacccacattggaaggagtctttctttagaactttggagtgtaaatcttcatgatgttgtaaattcaagaaaataggcactttctctgaaagacctgctccttccacaagaagtgcataggtccataatatttcataaaatgaagaaaaagaatgtggccaaacaattattcaccatggattgcccaactttccaaatctggataaagctgtgggattcttggaagcagcttgagtgttttcatcttgcctgggaagcccaggaattccacctggtccacaccggcagaagttacagtagactgtgaggcaccccaccttgctcctgatgcagtttctgtgccattgctggtgctggtggaggcagcggagcagaggctcaggcacaatgaagcgtggatgtgttctgcaggttgctgcaaaactcaccttattctgacttttggatttcatggcattccaggaagctccttgccatgctgttggcctggaagtccacctgtctggtccatagtgacgtcctgaagagccagtctgtaaaataaccaaccacttacttagcgtttggatagactccatgccttctctctccctgcaaagaaaaatcttgaacatttatgatgtcaattagtgaaagtattgaaaatactaaattataactaaaagcaactttttatgttattgaaaatattgaaagaactgatattaatgataatcattttatttttcatctctctgatatacccaatgtgtggcaatcagcccctaccatgagcattaatgccatgtaaagctggctttctggagtctgccaggtccacacgaagtgctacccccagtttctgctgttacttgctgcctccaggccaggggagcaggagatgctcagctctggtgccttttcttttatttcagtgctgccttcccacccacccagtccattcaccctcacctctccctgcatggaggcaacagcatttccaagatgtaccttgggaagtcaggatagctggaagtaagggtttttggggatccctgtggtctcttcactgatcatcgataagcatttaagagtgtgctaacaccattcacagaggtccctggaaaaaaatatataattttctcacaaacaaccaatacataacctatggcagttggttgaataattattgaaaaaaagaacacgactgaaaaagttcatctgatgcctctgagcatgtgataaagtcctgggtagacatggaaacgtgttcttacaaatgaaccttcggatctatgaaagaaaatatagtagggggactaaggaacatagaattttattagcatatgtgattttacccttatctttgtttctaatttaaagaaacaatttcagaaagtgttagaagaattctatgtttaataatgaatattgttgagttcaaaatattctcatatacccagatttacagagatgacacagtattgaaatggcaggtgggctctgtaagttatttggggattaatgaaatccagggtcttggcaggggggactcaatgtggccctctcactcatccctcatatgtcaagagtccttcctgtcttatatgcacatgctccaaggtccatactcagtagggggaaatctagccggatggttccccaattgttcctcggctggattttcatcatcagaaatttccaactcatctcatcagttttcttgtaagaaaaaaacatttttcactttgtagcacaattttagttatttttgagtcttcttccctaatagtttgtaagcttaaagggacaattttaattttcccctggttaaagagggattctaatatttccaagaatgttttccactggaattgatgggaaatggtttctaaatggcatcgaagctggtctttaatgatcttttgcaatgacttgggaaaaacaccctccctcactacaggatcttcatgttgttaataatataaacaaacctttgaaattagcattgcaaaagaatcccatttttgtttcgtaccacactgttcaaaggaaaattgtttatctctcttcctttctctctctctcttatttgacagaatagcaagtgtttagataatttcagatatattcctaagtattttaccagctgtggaataagttgtgtttgtccatcactgtgtagctaccgttcacatgttctggctctgtactccacgcttatcgcgtgaaccctcacatgttggactttcacagtgtgatctctcacctgtcttggaaactccttcataaagccgctcttccttaggcctgggctgtttggaagtcctggtgaaactttgcggttcacattttaaattcctgaatgaccttttcattctctctttctttatctttgtttttgtccttcattccctccttttgttcttccttcctgcctttcacgtcacctacttatccgactatttcctccatttgcttcttttctatttgccatcacctgtgacccgagtggaacaaaaaccaacacatagttttaagctacacctttctgcacctgatgtaaaatgacattaatccactatttaacttctaaaattatttctgaatacagttgcagataggctggttttcatgaggaagctcgcttggctttagtcttacatttaaattctttgaaagtggctcccagtgctattcagggtcctttcttgaggccagactcatcaccatctactattgattttacagtgcactgacagtttacaggaaggagaagaacagaatttctgcacactacacaacatgtgggcttcctgtagctccagggacatgtagctttggtgaaactggggttttgtaacctctgaatgatatggacttagtgaattctaaggaactcagggggcacgtggtcaggctccaccgcacagaagagccacagtctccagactcatggcgttccctccagaactccccattcccctctgagcatatttctatgctgctgcttcttgtgacttacatgaggcatctcagcttcttcatgtttgtagggatggttccctaagcctgttcaagtaggctctcactagagttaccattcatatttgagaagaaaagaacatttattaaatgtatgtgtggggctgaggttctaaaggaattgaaaagagacgataaacattgaatgagggtgagggcatccctgctggggagaaacctctgtcccctaggaagagtccgttcatgtcatgtggtttgggatgaaccaggggtctgcccccatcgggtcacaggtgatgccaaatagaaaagaagcaaatggaggaaatagtcggataagtaggtgacgtgaaaggcaggacctggtcaccccagcaagtgctatggacagttcccggaaacggttgcccacttcacaggtccatgggtctgacccttggactctgccaggatcaactgcccagagtgccagagttttagccaaaggtgtacttacttccttatttatctccaaaaggatggaaactgtgggagtcaaagcctattttgctgagtgttcccactggatcctctgtagaattagcaggtcatgctgtcaaaatcatggacaaaggctgggtgcagtggctcatgcctataatcccagcactttgggaggccaaggtgggcggatcacctgagctcaggagtttaagaccagcctgggcaacatggggaaactccatctctacaaaatatacaaaatattagccagccatcgtggtgcgtgcctgtggtcccagtttcttgggaggctgaggcgggagtatcatttgagccaggaggttgaggttgcagtgagctgagatcacatcactgcactccatcctgggtgacagagagagaccctgtctcaaaaaaaaa

SEQ ID NO: 13255 - DNA, 3721 bp, Homo sapiens
atggctccactccgcgcgctgctgtcctacctgctgcctttgcactgtgcgctctgcgccgccgcgggcagccggaccccagagctgcacctctctggaaagctcagtgactatggtgtgacagtgccctgcagcacagactttcggggacgcttcctctcccacgtggtgtctggcccagcagcagcctctgcagggagcatggtagtggacacgccacccacactaccacgacactccagtcacctccgggtggctcgcagccctctgcacccaggagggaccctgtggcctggcagggtggggcgccactccctctacttcaatgtcactgttttcgggaaggaactgcacttgcgcctgcggcccaatcggaggttggtagtgccaggatcctcagtggagtggcaggaggattttcgggagctgttccggcagcccttacggcaggagtgtgtgtacactggaggtgtcactggaatgcctggggcagctgttgccatcagcaactgtgacggattggcgggcctcatccgcacagacagcaccgacttcttcattgagcctctggagcggggccagcaggagaaggaggccagcgggaggacacatgtggtgtaccgccgggaggccgtccagcaggagtgggcagaacctgacggggacctgcacaatgaagcctttggcctgggagaccttcccaacctgctgggcctggtgggggaccagctgggcgacacagagcggaagcggcggcatgccaagccaggcagctacagcatcgaggtgctgctggtggtggacgactcggtggttcgcttccatggcaaggagcatgtgcagaactatgtcctcaccctcatgaatatcgtagatgagatttaccacgatgagtccctgggggttcatataaatattgccctcgtccgcttgatcatggttggctaccgacagtccctgagcctgatcgagcgcgggaacccctcacgcagcctggagcaggtgtgtcgctgggcacactcccagcagcgccaggaccccagccacgctgagcaccatgaccacgttgtgttcctcacccggcaggactttgggccctcagggtatgcacccgtcactggcatgtgtcaccccctgaggagctgtgccctcaaccatgaggatggcttctcctcagccttcgtgatagctcatgagaccggccacgtgctcggcatggagcatgacggtcaggggaatggctgtgcagatgagaccagcctgggcagcgtcatggcgcccctggtgcaggctgccttccaccgcttccattggtcccgctgcagcaagctggagctcagccgctacctcccctcctacgactgcctcctcgatgacccctttgatcctgcctggccccagcccccagagctgcctgggatcaactactcaatggatgagcagtgccgctttgactttggcagtggctaccagacctgcttggcattcaggacctttgagccctgcaagcagctgtggtgcagccatcctgacaacccgtacttctgcaagaccaagaaggggcccccgctggatgggactgagtgtgcacccggcaagtggtgcttcaaaggtcactgcatctggaagtcgccggagcagacatatggccaggatggaggctggagctcctggaccaagtttgggtcatgttcgcggtcatgtgggggcggggtgcgatcccgcagccggagctgcaacaacccctccccagcctatggaggccgcctgtgcttagggcccatgttcgagtaccaggtctgcaacagcgaggagtgccctgggacctacgaggacttccgggcccagcagtgtgccaagcgcaactcctactatgtgcaccagaatgccaagcacagctgggtgccctacgagcctgacgatgacgcccagaagtgtgagctgatctgccagtcggcggacacgggggacgtggtgttcatgaaccaggtggttcacgatgggacacgctgcagctaccgggacccatacagcgtctgtgcgcgtggcgagtgtgtgcctgtcggctgtgacaaggaggtggggtccatgaaggcggatgacaagtgtggagtctgcgggggtgacaactcccactgcaggactgtgaaggggacgctgggcaaggcctccaagcaggcaggagctctcaagctggtgcagatcccagcaggtgccaggcacatccagattgaggcactggagaagtccccccaccgcattgtggtgaagaaccaggtcaccggcagcttcatcctcaaccccaagggcaaggaagccacaagccggaccttcaccgccatgggcctggagtgggaggatgcggtggaggatgccaaggaaagcctcaagaccagcgggcccctgcctgaagccattgccatcctggctctccccccaactgagggtggcccccgcagcagcctggcctacaagtacgtcatccatgaggacctgctgccccttatcgggagcaacaatgtgctcctggaggagatggacacctatgagtgggcgctcaagagctgggccccctgcagcaaggcctgtggaggagggatccagttcaccaaatacggctgccggcgcagacgagaccaccacatggtgcagcgacacctgtgtgaccacaagaagaggcccaagcccatccgccggcgctgcaaccagcacccgtgctctcagcctgtgtgggtgacggaggagtggggtgcctgcagccggagctgtgggaagctgggggtgcagacacgggggatacagtgcctgctgcccctctccaatggaacccacaaggtcatgccggccaaagcctgcgccggggaccggcctgaggcccgacggccctgtctccgagtgccctgcccagcccagtggaggctgggagcctggtcccagtgctctgccacctgtggagagggcatccagcagcggcaggtggtgtgcaggaccaacgccaacagcctcgggcattgcgagggggataggccagacactgtccaggtctgcagcctgcccgcctgtggaggaaatcaccagaactccacggtgagggccgatgtctgggaacttgggacgccagaggggcagtgggtgccacaatctgaacccctacatcccattaacaagatatcatcaacggagccctgcacgggagacaggtctgtcttctgccagatggaagtgctcgatcgctactgctccattcccggctaccaccggctctgctgtgtgtcctgcatcaagaaggcctcgggccccaaccctggcccagaccctggcccaacctcactgccccccttctccactcctggaagccccttaccaggaccccaggaccctgcagatgctgcagagcctcctggaaagccaacgggatcagaggaccatcagcatggccgagccacacagctcccaggagctctggatacaagctccccagggacccagcatccctttgcccctgagacaccaatccctggagcatcctggagcatctcccctaccacccccggggggctgccttggggctggactcagacacctacgccagtccctgaggacaaagggcaacctggagaagacctgagacatcccggcaccagcctccctgctgcctccccggtgacatgagctgtgccctgccatcccactggcacgtttacactctgtgtactgcccc

SEQ ID NO: 13256 - DNA, 3730 bp, Homo sapiens
atggctccactccgcgcgctgctgtcctacctgctgcctttgcactgtgcgctctgcgccgccgcgggcagccggaccccagagctgcacctctctggaaagctcagtgactatggtgtgacagtgccctgcagcacagactttcggggacgcttcctctcccacgtggtgtctggcccagcagcagcctctgcagggagcatggtagtggacacgccacccacactaccacgacactccagtcacctccgggtggctcgcagccctctgcacccaggagggaccctgtggcctggcagggtggggcgccactccctctacttcaatgtcactgttttcgggaaggaactgcacttgcgcctgcggcccaatcggaggttggtagtgccaggatcctcagtggagtggcaggaggattttcgggagctgttccggcagcccttacggcaggagtgtgtgtacactggaggtgtcactggaatgcctggggcagctgttgccatcagcaactgtgacggattggcgggcctcatccgcacagacagcaccgacttcttcattgagcctctggagcggggccagcaggagaaggaggccagcgggaggacacatgtggtgtaccgccgggaggccgtccagcaggagtgggcagaacctgacggggacctgcacaatgaagcctttggcctgggagaccttcccaacctgctgggcctggtgggggaccagctgggcgacacagagcggaagcggcggcatgccaagccaggcagctacagcatcgaggtgctgctggtggtggacgactcggtggttcgcttccatggcaaggagcatgtgcagaactatgtcctcaccctcatgaatatcgtagatgagatttaccacgatgagtccctgggggttcatataaatattgccctcgtccgcttgatcatggttggctaccgacagtccctgagcctgatcgagcgcgggaacccctcacgcagcctggagcaggtgtgtcgctgggcacactcccagcagcgccaggaccccagccacgctgagcaccatgaccacgttgtgttcctcacccggcaggactttgggccctcaggtatgcaagggtatgcacccgtcactggcatgtgtcaccccctgaggagctgtgccctcaaccatgaggatggcttctcctcagccttcgtgatagctcatgagaccggccacgtgctcggcatggagcatgacggtcaggggaatggctgtgcagatgagaccagcctgggcagcgtcatggcgcccctggtgcaggctgccttccaccgcttccattggtcccgctgcagcaagctggagctcagccgctacctcccctcctacgactgcctcctcgatgacccctttgatcctgcctggccccagcccccagagctgcctgggatcaactactcaatggatgagcagtgccgctttgactttggcagtggctaccagacctgcttggcattcaggacctttgagccctgcaagcagctgtggtgcagccatcctgacaacccgtacttctgcaagaccaagaaggggcccccgctggatgggactgagtgtgcacccggcaagtggtgcttcaaaggtcactgcatctggaagtcgccggagcagacatatggccaggatggaggctggagctcctggaccaagtttgggtcatgttcgcggtcatgtgggggcggggtgcgatcccgcagccggagctgcaacaacccctccccagcctatggaggccgcccgtgcttagggcccatgttcgagtaccaggtctgcaacagcgaggagtgccctgggacctacgaggacttccgggcccagcagtgtgccaagcgcaactcgtactatgtgcaccagaatgccaagcacagctgggtgccctacgagcctgacgatgacgcccagaagtgtgagctgatctgccagtcggcggacacgggggacgtggtgttcatgaaccaggtggttcacgatgggacacgctgcagctaccgggacccatacagcgtctgtgcgcgtggcgagtgtgtgcctgtcggctgtgacaaggaggtggggtccatgaaggcggatgacaagtgtggagtctgcgggggtgacaactcccactgcaggactgtgaaggggacgctgggcaaggcctccaagcaggcaggagctctcaagctggtgcagatcccagcaggtgccaggcacatccagattgaggcactggagaagtccccccaccgcattgtggtgaagaaccaggtcaccggcagcttcatcctcaaccccaagggcaaggaagccacaagccggaccttcaccgccatgggcctggagtgggaggatgcggtggaggatgccaaggaaagcctcaagaccagcgggcccctgcctgaagccattgccatcctggctctccccccaactgagggtggcccccgcagcagcctggcctacaagtacgtcatccatgaggacctgctgccccttatcgggagcaacaatgtgctcctggaggagatggacacctatgagtgggcgctcaagagctgggccccctgcagcaaggcctgtggaggagggatccagttcaccaaatacggctgccggcgcagacgagaccaccacatggtgcagcgacacctgtgtgaccacaagaagaggcccaagcccatccgccggcgctgcaaccagcacccgtgctctcagcctgtgtgggtgacggaggagtggggtgcctgcagccggagctgtgggaagctgggggtgcagacacgggggatacagtgcctgctgcccctctccaatggaacccacaaggtcatgccggccaaagcctgcgccggggaccggcctgaggcccgacggccctgtctccgagtgccctgcccagcccagtggaggctgggagcctggtcccagtgctctgccacctgtggagagggcatccagcagcggcaggtggtgtgcaggaccaacgccaacagcctcgggcattgcgagggggataggccagacactgtccaggtctgcagcctgcccgcctgtggaggaaatcaccagaactccacggtgagggccgatgtctgggaacttgggacgccagaggggcagtgggtgccacaatctgaacccctacatcccattaacaagatatcatcaacggagccctgcacgggagacaggtctgtcttctgccagatggaagtgctcgatcgctactgctccattcccggctaccaccggctctgctgtgtgtcctgcatcaagaaggcctcgggccccaaccctggcccagaccctggcccaacctcactgccccccttctccactcctggaagccccttaccaggaccccaggaccctgcagatgctgcagagcctcctggaaagccaacgggatcagaggaccatcagcatggccgagccacacagctcccaggagctctggatacaagctccccagggacccagcatccctttgcccctgagacaccaatccctggagcatcctggagcatctcccctaccacccccggggggctgccttggggctggactcagacacctacgccagtccctgaggacaaagggcaacctggagaagacctgagacatcccggcaccagcctccctgctgcctccccggtgacatgagctgtgccctgccatcccactggcacgtttacactctgtgtactgcccc

SEQ ID NO: 13257 - DNA, 1685 bp, Homo sapiens
agttcagggccggacagcgagcggcggcgacttgccagtaagggtttggagtcatcagcaggtttaattttggaggaactttacaggtttggctccagcagctgctgttgccaccaccactagttcaagcaccatgcagtttacctcaatatcaaattctttgacctccactgctgctattgggctctcatttacaacttcaacgactaccaccgccactttcaccaccaacactactaccacaatcaccagtggctttactgtgaaccaaaaccaactgttatcaagagggtttgaaaaccttgtaccttatacttcaactgttagtgtagtagcaactcctgtgatgacatatggtcatctggagggtcttataaatgagtggaaccttgagctggaagatcaagagaagtactttcttctccaggccactcaggtcaatgcttgggaccatacattgattgagaatggtgagatgattcgtattttacatggagaagtgaacaaagtgaaactggatcagaaaagattggaacaagaattggattttatcctgtcacagcagcaggaactagaatttctgttgacttatttagaggagtctacgcgcgaccagagtggacttcattatctgcaggatgcagatgaggagcatgtggagacctccaccagatctgcagaattctgaatgcccatatggactccctgcagtggattgatcggaattcaggcatgctgcgaaggaaggtagaagtggtaacacgggttttcgaggattatcgtcacgaggagcatgcacacaatgtcaacactgctttttagtgaatgaccatatcttcagcatgtcgtttctggattattacctacaaattctgatgttaaatagagtagtatttatacttaatatttcatcttgatcataatgaattgtgcatcctttttttcatttaagtattgtactgttgagaattataccttagttttgtttttagtattagaaaatcaaaattatactagcccctttgtccagacagcaacctcttagatgctgactctatatgtgtaatttatgtcttactctccctggcatcagtacacatcatcctcctcactccagttgaatcatagggtgatgtctgccaaaagtacatgccaacctatatagtgctagatactgtaaagtctcttcttctcaaaggaacctactgtctagtttgagatataattaatgcttgtctgcataaaaacaatatagataatataaagaagtgcagtatgaattatagaaagtgtgttatagagattcagagcagggaggaaaagttagggtagattattattaaagggttaaggaaaggtaagtttcaaggaatttggttatttttaatgtatggatatactggcattttatttggttttagcatatgatttatagttggtgatttccgtatatttgtttgtttttctttttttttgtttgtttgttttgttttgttttaaataagccttgttcttaggtttggaacagtctggtctcctgtgtttcatgtttcacctaagtcataaataaaggtaatgtcctaaaaaaaaaaaaaaaaaaaaaaaaaaaaaaaaaaaaaaaaaaaaaaaaaaaaaaaaaaaaaaaaaaaaaaaaaaaaaaaaaaaaaaaaaaaaaaaaaaaaaaa

SEQ ID NO: 13258 - DNA, 1733 bp, Homo sapiens
atgtaaagtttttccagtgaaacaaaacgtaagaatctgagtttgtttttcaaagatcactaaattttagttatgattatatcacattttccaaaatgtgtggcagtttttgccctccttgctctgagtgttggtgcactggacacttttattgctgcagtatatgagcatgcggtgatattaccaaacagaacagaaacacctgtttcaaaagaagaagctttgctcctgatgaacaagaacatagatgttttggagaaagcagttaagctggcagcgaagcagggtgcacatatcattgtgaccccagaagatggaatctatggttggatcttcaccagggagagcatttacccctatctagaggatataccagaccctggagtgaactggattccatgtagagacccctggagattcggcaacacaccagtgcaacaaagactcagctgcctggccaaggacaactctatctatgtcgtggctaatattggggacaagaagccatgcaatgccagtgactctcagtgtccccctgatggccgttaccaatacaacactgatgtggtgtttgattctcagggaaaactgttggcacgctaccataagtacaatctttttgcacctgaaattcagtttgatttccccaaggattcagaacttgtgacttttgacactccctttgggaagtttggcatttttacttgctttgacattttttctcatgacccagctgtggtggtggtggatgagtttcaattgacagcattctctaccccacagcatggtacaacacgctgcccctcctctcggctgttcccttccattcagcatgggccaaggccatgggagtcaatctacttgctgcaaatacccacaacaccagcatgcacatgacagggagtggaatctacgccccagaagcagtcaaggtgtaccactatgacatggaaacagagagtggtcagctgttgctatcagaactgaagtctcggccccgccgtgagcccacctaccctgcagctgttgactggcatgcgtatgccagcagtgtcaagccattttcctctgaacagtcagattttctggggatgatttattttgatgagtttaccttcaccaagcttaagagaaatacaggaaattacacagcttgccagaaagatctgtgttgtcacttaacttacaagatgtctgagaagcgaacagacgagatctatgccctaggtgcttttgatggactgcacacagtagaaggccaatattacttacagatatgtgcattactgaagtgtcaaaccactgacctggaaacgtgtggagaacctgtggggtcagcttttaccaagtttgaagacttctccctcagtggcacatttggaacgcgttatgttttcccacagatcattctaagtgggagtcagcttgcccctgaaagacattatgagatttcaagagatggacgcttgaggagccgaagtggagcccctttgcctgtcttagttatggccctgtatggaagagtgtttgagaaggaccctccacgcttagggcagggatctgggaaattccagtgatctcctttagcagagcccttttaggattagcctggctaagaaaggaagaaaaaaaagagatccgttagtgtctgtttagaaaagatgttataaacttacagaaacaaatataataaactgaagcagatttgaaaagcaaaaaaaaaaaaaaaaaaa

SEQ ID NO: 13259 - DNA, 3271 bp, Homo sapiens
atggagaaccaagggacacgcactcagcagataaggcaagtcctgcttctctttgttttgctcggaatgtctcaggcgggctctgaaacctggagcttttctgtggcagaagaaatgcagagcgggagttttgtaggcaatctggcaaaggacctggggctgaaggtgagagaactgtcctcacggggggctcgggtggtctctaatgataagaaacagcgtttgcagctggacataaacactggggatttgctcttaagtgaaacactagacagggaggagctctgcggttccatcgagccttgcgtgctacatttgcaggtgttaatgcaaaaccccacgcagtttttacaaattgagcttcaggtcagggatataaatgatcactctcccatcttctcggaaaaacaaatgctcctagaaatcccagagaacagtcccgttggtgctgtgttcttactagaaagtgcgaaggatttagatgtaggaatcaatgctgtaaaaagctacacaataagccccaactctcattttcacattaaaatgagagtcattccagacaataggaaataccccgagttagttctggacaaggcgctggattatgaagagctcccggagctcagtttcatcctctctgctctggatggtgggtcccctcccaggtctggaactgccttggtcagggtggtggttgtggacattaatgacaactcccctgaatttgagcaggctttttatgaggtgaagattcgggagaatagcatccttggctcgctgattttgattgtctcagcttgggatttagactctggaacaaatggtgaaatatgctataccttttcccatgcctcagaagatattcgcaagacatttgaaattaatcaaaagtctggagaaattactttaagagcacctctggattttgaaacgattgagtcatactcaataatcattcaagccacagatgggggaggactttttggaaaatctacagtcataattcacgtgatagatgtaaatgacaatgctcctgaaatcactgtgtcatcaattaccagtccaatcccagaaaatacgccagagaccgtggttatggtttttagtatccaagatatagactctggggacaacggaagaattgtttgttccattccggaagacctcccattcgtgctaaaatcttcagttgagaattactacacgttggaaacagagagaccactggacagagagagcacagccgagtacaatatcaccatcaccgtcaccgacttggggatacccaggctgaaaaccgagcacaacacaactgtgttggtctctgacgtcaatgacaacgcccccaccttcacccaaacctcctacaccctgttcgtccgcgagaacaacagccccgccctgcacatcggcagtgtcagcgctacagacagagactcaggcaccaacgcccaggtcaactactcgctactcccgccccaggacctgcacctgcccctcgcctccctggtctccatcaacacagacaacggccacctgttcgccctcaggtcgctggactacgaggccctgcaggctttcgacttccgcgtgggcgccacagaccgcggctccccggctttgagcagcgaggcgctggtgcgcgtgctggtgctggacgccaacgacaactcgcccttcgtgctgtacccgctgcagaacggctccgcgccctgcaccgagctggtgccccgggcggccgagccgggctacctggtgaccaaggtggtggcggtggacggcgactcgggccagaacgcctggctgtcgtaccagctgctcaaggccacggagcccgggctattcggcgtgtgggcgcacaatggcgaggtgcgcaccgccaggctgctgagcgagcgcgacgcggccaagcacaggctggtggtgctggtcaaggacaatggcgagcctccgcgctcggccaccgccacgctgcaagtgctcctggtggacggcttctcccagccctacctgccgctccctgaggcggcaccggcccaggcccaggccgactcgctcaccgtctacttggtggtggcgttggcctcggtgtcttcgctcttcctcttctcggtgctcctgttcgtggcggtgcggctgtgcaggaggagcagggcggcctcggtgggaagctgctcggtgcctaagggcccctttccagggcatctggtggacgtgagcggcaccgggaccctttcccagagctaccagtacgaggtgtgtctgacgggaggttccgagacaaatgaattcaagttcctaaaaccggttatccctaatatccaggcaaaaggtcttgggaagaatagtgaagaaaactccacctttcgaaatagctttggatttaatttttagtaagaatgctatttacatttgcatgtacttttttagttttatgtaaccatatcaatattatttagtcttaaactagttacgttattatgcaatacgactaattgtatttttaattttttcttttctcccccaattttttttttttttttgagaccgagtctcattctgtcgccctggctggagtgcaatggtgtgatctcagctcactgcaccctccgcctctcgggttcaagcaattctcctgcatcagcctcccgagtagctggcattacaggcgcccaccaccacgctcggctaaattttttttttttttatctttagtagagacggggtttcaccacgttggccgggcaggttttaaactcttgacctcatgttccacccgccacggcctcccaaagtgctgtgattaccggtgtgagccactgcgcccggccttttttttttcttttcttttcttttttttgatacagagtcttagtcacccagactagaggtcagtggcaggatctcagctcactgcaacctctgcctcctgggctcaagagaccagcccacctccgcctccaagtagctgggactacaggcgtgcgccaccatgcccggctacttcttgtattttttgtagagacggatcgtcaccatatttcttaggctggcctttaacttctgagctcaagagatgcactcccctcagcctcccaaagtgctgggattacaggcggccaggcctattttcaattttcaagtattgcatatcattgtgaataacattgtaaatcctttttatattaagtaacaggtagttaatccatttctaatgaataattttaaggttttaatcctttccaagtgtacaataatttactgattatta

SEQ ID NO: 13260 - DNA, 2674 bp, Homo sapiens
cacacacgggcgcacgcacacggcagccgggccagggacgaccctgtcagctgcagccccagaggtccggggcgcgcagccgggtcccctcgagggcgcagccggccgccccgccccgcccctcgaagcagccgggccgggcgcgcagtgggctacaaactttcgcagcgcgagtccgccaaggcagcgcgccgactcgggctcggctcggctctgcgctgctccggacggctgtgaccgctggccgggggctcgggccgccggtacccacggaccgcgcgcccgggtgcctgctccgctaagcccctcgccccgcgcggacctcggtatccagcgccctgctgcccgggctctccccgcgcgccctactgccgcgaggtcagtccgcagcctccggtgcgccagcgctcgccttcctcctcctggacttcggccctttgccgccctcaccacgccatggctcatgtccccgctcggaccagcccgggacccgggccccagctgctgctgctgctgctgccgttgtttctgctgttgctccgggatgtggccggcagccacagggcccccgcctggtccgcactgcccgcggccgccgacggcctgcagggggacagggatctccagcggcaccctggggacgcggccgccacgttgggccccagcgcccaggacatggtcgctgtccacatgcacaggctctatgagaagtacagccggcagggcgcgcggccgggagggggcaacacggtccgcagcttcagggccaggctggaagtggtcgaccagaaggccgtgtatttcttcaacctgacttccatgcaagactcggaaatgatccttacggccactttccacttctactcagagccgcctcggtggcctcgagcgctcgaggtgctatgcaagccgcgggccaagaacgcttcaggccgcccgctgcccctgggcccgcccacacgccagcacctgctcttccgcagcctctcgcagaacacggccacacaggggctactccgcggggccatggccctggcgcccccaccgcgcggcctgtggcaggccaaggacatctcccccatcgtcaaggcggcccgccgggatggcgagctgctcctctccgcccagctggattctgaggagagggacccgggggtgccccggcccagcccctatgcgccctacatcctagtctatgccaacgatctggccatctcggagcccaacagcgtggcagtgacgctgcagagatacgaccccttccctgccggagaccccgagccccgcgcagcccccaacaactcagcggacccccgcgtgcgccgagccgcgcaggccactgggcccctccaggacaacgagctgccggggctggatgagaggccgccgcgcgcccacgcacagcacttccacaagcaccagctgtggcccagccccttccgggcgctgaaaccccggccagggcgcaaagaccgcaggaagaagggccaggaggtgttcatggccgcctcgcaggtgctggactttgacgagaagacgatgcagaaagcccggaggaagcagtgggatgagccgagggtgtgctcccggaggtacctgaaggtggacttcgcagacatcggctggaatgaatggataatctcaccgaaatcttttgatgcctactactgcgcgggagcatgtgagttccccatgcctaagatcgttcgtccatccaaccatgccaccatccagagcattgtcagggctgtgggcatcatccctggcatcccagagccctgctgtgttcccgataagatgaactcccttggggtcctcttcctggatgagaatcggaatgtggttctgaaggtgtaccccaacatgtccgtggacacctgtgcctgccggtgagaccactccagggtggaaagaagccacgcccagcagagctgccttctcggagccttctgcaaccaggacttgtggtgcagctgcagacacagagcacagctcatgggcaacatcactggggcccagagagagctgtccgccagtgcatcattagggggtctttcattgctagtgactagccccttaaatgccagcctgagtacctgaaggaatctgggaattagccctggcctgaaagtggcccatcattcatacccactgttctgaaggcttgaaaacaaaacatatccacaacattggcttgatgtgatcatcatctcataactgagcaagaagactatgcaaatcttagggcgctcgctccctgcacacggaaagaactctgtttaaatgctcagttcagaacactttgggccacatagtgattttggaaaacaggataatcgtggtgtaaatgagtgtttcctttcaaagtccactgcagagcttttatccatatggtatgcacatgtagccaatattggtttctttttcttaatatatatattttattttaaaacaacaaaaagggagggcgttgacaccattccccacagagatagtcatgctgagtgtgggttgtttaaacatgcatattgaaataacacatatagtaacgtgggaatactaaaaaataaccaagattttatatttttgtaaattatactttctatactgtagattgtgtatgttatgtgtttttatggaaagctaataaattaaaggtacagtggtatcttga

SEQ ID NO: 13261 - DNA, 5515 bp, Homo sapiens
gccctgccctcacctggctatcccacacaggtgagaataaccagaactcacctccggtaccagtgttcacttggaaacatggctctcagcctctggcccctgctgctgctgctgctgctgctgctgctgctgtcctttgcagtgactctggcccctactgggcctcattccctggaccctggtctctccttcctgaagtcattgctctccactctggaccaggctccccagggctccctgagccgctcacggttctttacattcctggccaacatttcttcttcctttgagcctgggagaatgggggaaggaccagtaggagagcccccacctctccagccgcctgctctgcggctccatgattttctagtgacactgagaggtagccccgactgggagccaatgctagggctgctaggggatatgctggcactgctgggacaggagcagactccccgagatttcctggtgcaccaggcaggggtgctgggtggacttgtggaggtgctgctgggagccttagttcctgggggcccccctaccccaactcggcccccatgcacccgtgatgggccgtctgactgtgtcctggctgctgactggttgccttctctgctgctgttgttagagggcacacgctggcaagctctggtgcaggtgcagcccagtgtggaccccaccaatgccacaggcctcgatgggagggaggcagctcctcactttttgcagggtctgttgggtttgcttaccccaacaggggagctaggctccaaggaggctctttggggcggtctgctacgcacagtgggggcccccctctatgctgcctttcaggaggggctgctccgtgtcactcactccctgcaggatgaggtcttctccattttggggcagccagagcctgataccaatgggcagtgccagggaggtaaccttcaacagctgctcttatggggcgtccggcacaacctttcctgggatgtccaggcgctgggctttctgtctggatcaccacccccaccccctgccctccttcactgcctgagcacgggcgtgcctctgcccagagcttctcagccgtcagcccacatcagcccacgccaacggcgagccatcactgtggaggccctctgtgagaaccacttaggcccagcaccaccctacagcatttccaacttctccatccacttgctctgccagcacaccaagcctgccactccacagccccatcccagcaccactgccatctgccagacagctgtgtggtatgcagtgtcctgggcaccaggtgcccaaggctggctacaggcctgccacgaccagtttcctgatgagtttttggatgcgatctgcagtaacctctccttttcagccctgtctggctccaaccgccgcctggtgaagcggctctgtgctggcctgctcccaccccctaccagctgccctgaaggcctgccccctgttcccctcaccccagacatcttttggggctgcttcttggagaatgagactctgtgggctgagcgactgtgtggggaggcaagtctacaggctgtgccccccagcaaccaggcttgggtccagcatgtgtgccagggccccaccccagatgtcactgcctccccaccatgccacattggaccctgtggggaacgctgcccggatgggggcagcttcctggtgatggtctgtgccaatgacaccatgtatgaggtcctggtgcccttctggccttggctagcaggccaatgcaggataagtcgtgggggcaatgacacttgcttcctagaagggctgctgggcccccttctgccctctctgccaccactgggaccatccccactctgtctgacccctggccccttcctccttggcatgctatcccagttgccacgctgtcagtcctctgtcccagctcttgctcaccccacacgcctacactatctcctccgcctgctgaccttcctcttgggtccaggggctgggggcgctgaggcccaggggatgctgggtcgggccctactgctctccagtctcccagacaactgctccttctgggatgcctttcgcccagagggccggcgcagtgtgctacggacgattggggaatacctggaacaagatgaggagcagccaaccccatcaggctttgaacccactgtcaaccccagctctggtataagcaagatggagctgctggcctgctttagtcctgtgctgtgggatctgctccagagggaaaagagtgtttgggccctgcagattctagtgcaggcgtacctgcatatgcccccagaaaacctccagcagctggtgctttcagcagagagggaggctgcacagggcttcctgacactcatgctgcaggggaagctgcaggggaagctgcaggtaccaccatccgaggagcaggccctgggtcgcctgacagccctgctgctccagcggtacccacgcctcacctcccagctcttcattgacctgtcaccactcatccctttcttggctgtctctgacctgatgcgcttcccaccatccctgttagccaacgacagtgtcctggctgccatccgggattacagcccaggaatgaggcctgaacagaaggaggctctggcaaagcgactgctggcccctgaactgtttggggaagtgcctgcctggccccaggagctgctgtgggcagtgctgcccctgctcccccacctccctctggagaactttttgcagctcagccctcaccagatccaggccctggaggatagctggccagcagcaggtctggggccagggcatgcccgccatgtgctgcgcagcctggtaaaccagagtgtccaggatggtgaggagcaggtacgcaggcttgggcccctcgcctgtttcctgagccctgaggagctgcagagcctagtgcccctgagtgatccaacggggccagtagaacgggggctgctggaatgtgcagccaatgggaccctcagcccagaaggacgggtggcatatgaacttctgggtgtgttgcgctcatctggaggagcggtgctgagcccccgggagctgcgggtctgggcccctctcttctctcagctgggcctccgcttccttcaggagctgtcagagccccagcttagagccatgcttcctgtcctgcagggaactagtgttacacctgctcaggctgtcctgctgcttggacggctccttcctaggcacgatctatccctggaggaactctgctccttgcaccttctgctaccaggcctcagcccccagacactccaggccatccctaggcgagtcctggtcggggcttgttcctgcctggcccctgaactgtcacgcctctcagcctgccagaccgcagcactgctgcagacctttcgggttaaagatggtgttaaaaatatgggtacaacaggtgctggtccagctgtgtgtatccctggtcagcctattcccaccacctggccagactgcctgcttcccctgctcccattaaagctgctacaactggattccttggctcttctggcaaatcgaagacgctactgggagctgccctggtctgagcagcaggcacagtttctctggaagaagatgcaagtacccaccaaccttaccctcaggaatctgcaggctctgggcaccctggcaggaggcatgtcctgtgagtttctgcagcagatcaactccatggtagacttccttgaagtggtgcacatgatctatcagctgcccactagagttcgagggagcctgagggcctgtatctgggcagagctacagcggaggatggcaatgccagaaccagaatggacaactgtagggccagaactgaacgggctggatagcaagctactcctggacttaccgatccagttgatggacagactatccaatgaatccattatgttggtggtggagctggtgcaaagagctccagagcagctgctggcactgacccccctccaccaggcagccctggcagagagggcactacaaaacctggctccaaaggagactccagtctcaggggaagtgctggagaccttaggccctttggttggattcctggggacagagagcacacgacagatccccctacagatcctgctgtcccatctcagtcagctgcaaggcttctgcctaggagagacatttgccacagagctgggatggctgctattgcaggagtctgttcttgggaaaccagagttgtggagccaggatgaagtagagcaagctggacgcctagtattcactctgtctactgaggcaatttccttgatccccagggaggccttgggtccagagaccctggagcggcttctagaaaagcagcagagctgggagcagagcagagttggacagctgtgtagggagccacagcttgctgccaagaaagcagccctggtagcaggggtggtgcgaccagctgctgaggatcttccagaacctgtgccaaattgtgcagatgtacgagggacattcccagcagcctggtctgcaacccagattgcagagatggagctctcagactttgaggactgcctgacattatttgcaggagacccaggacttgggcctgaggaactgcgggcagccatgggcaaagcaaaacagttgtggggtcccccccggggatttcgtcctgagcagatcctgcagcttggtaggctcttaataggtctaggagatcgggaactacaggagctgatcctagtggactggggagtgctgagcaccctggggcagatagatggctggagcaccactcagctccgcattgtggtctccagtttcctacggcagagtggtcggcatgtgagccacctggacttcgttcatctgacagcgctgggttatactctctgtggactgcggccagaggagctccagcacatcagcagttgggagttcagccaagcagctctcttcctcggcaccctgcatctccagtgctctgaggaacaactggaggttctggcccacctacttgtactgcctggtgggtttggcccaatcagtaactgggggcctgagatcttcactgaaattggcaccatagcagctgggatcccagacctggctctttcagcactgctgcggggacagatccagggcgttactcctcttgccatttctgtcatccctcctcctaaatttgctgtggtgtttagtcccatccaactatctagtctcaccagtgctcaggctgtggctgtcactcctgagcaaatggcctttctgagtcctgagcagcgacgagcagttgcatgggcccaacatgagggaaaggagagcccagaacagcaaggtcgaagtacagcctggggcctccaggactggtcacgaccttcctggtccctggtattgactatcagcttccttggccacctgctatgagcctgtctctacagtagaaggagattgtggggagagaaatcttaagtcataatgaataaagtgcaaacagaagtgcatcctgattattttcagaagctgatgaggaata

SEQ ID NO: 13262 - DNA, 2385 bp, Homo sapiens
gttagtcgtcgccgtctgaggtgttccctggctttgtctcgccgtcgttgccgccccgtccctgccttcgtgccccccgccttggcccctgcccagccgctctccctgtcctcctccccttaaccacccccacggtttctgccgtcggggcccgggggccgggcggatgatgccgtcggagagcggagctgagcgcagggaccgggcggctgctcaggtggggacggctgcggccacggcggtggccacggcagccccggcaggcggcggccccgacccggaggccttatcggccttccccggacggcacctgagtgggctgagctggccacaggtgaagcgactggacgctcttctgagcgagccgattcccattcacgggcgcggcaacttccccacgctgagcgtgcagccccggcagatcgtgcaggtggtccgcagcaccctggaggagcagggactacatgtgcacagtgtgcggctgcatggttcagctgccagccacgtgctgcaccctgagagtggcctgggctacaaggatctggacctggtgttccgggtggacctgcgcagtgaggcatccttccagctgaccaaggcagtggtgctggcctgcctactagacttcctgccggccggtgtgagccgggccaagatcacgccactgacactcaaggaggcatacgtgcagaagctggtgaaagtgtgcacagactcggaccgctggagcctcatctcactgtccaacaagagcggcaagaacgtggagctcaagtttgtggactcggtgagacgccagtttgaattcagcatagactccttccagatcatcctggactccctgttgctctttggccagtgctcgtccactcccatgtctgaggccttccacccaacggtcacaggcgaaagcctgtacggggacttcaccgaggccctggagcacctgcggcaccgtgtcatcgccacgcgcagtcccgaggagatccgaggtggtggcctcctcaagtactgccacctcctggtgcggggcttccggccccggcccagcaccgatgtgcgcgccctgcagcgctacatgtgctcccgcttcttcatcgactttccagacctggtggagcagcggcgcaccctagagcgctacctggaggcccacttcggtggggcagatgcagcccgccgttacgcctgcctggtgacactgcaccgggtggtcaacgagagcaccgtgtgcctcatgaaccacgagcgccgccagacgctggacctcattgccgcactggcgctgcaggcactggctgagcagggcccagctgccactgccgccctggcctggcgccctccaggcactgacggggttgtgccagccactgtcaattactacgtgacccccgtgcaacctctcctggctcacgcctatcccacctggctgccttgtaactgactcagaccctggccagaagggaagggactgggcctcacggggtggggtggggcctccaagagtgtgtggaggacatgaccagaggcgcagaatgtgccaggaggcccagcactgcagggttgggcctttgattgaacagaccagactttcccgagcacgaggcccctgtgggcttaatgccagcctggggctctcagcaggaggaccctttggttattgcatcacacttttggaccagcatgccggtggggtgcaggcgccatttgtcttggaagtcaatttccttcaggagacaaagcaagtttggggtggtagccttaatgcccagcaccttggattgattcccatggtctaagagggtctttttgactaaggccagcctgtggtgatcccagcagctttggagggcctgcagcccacacactgactgatacatggtatgttacagggacttgtcactttggatcaggctgggccactacagggcctgatgggccaacttgggtaatcactgggaggagggaaactgaggcccgaggcagatacctgggtttggggagggctgggtttagcccggttctctgaactacatacccccagctgtgaagccttcctcttgaggggttgaggtgggcagtatacaggagccaagcagcccagggtgggtcgcagcccaggccccttccagggtgccactcctttcccccttgtgttgcaaggagccctcctgcctgggagcttgttctttggaaggtgctgagcctgaatttgccacagtcaagtcaacgttcccaccccactggcttggttacagggctctcacatggggtaggggagccatactcccacccccttgcgtattcccctgggtttgttgatattttgcactcttaacacctgccaataaagacggtctacactgaaaaaaaaaaaaaaaaaaa

SEQ ID NO: 13263 - DNA, 6222 bp, Homo sapiens
gggggcggcagcggtggtagcagctggtacctcccgccgcctctgttcggagggtcgcggggcaccgaggtgctttccggccgccctctggtcggccacccaaagccgcgggcgctgatgatgggtgaggagggggcggcaagatttcgggcgcccctgccctgaacgccctcagctgctgccgccggggccgctccagtgcctgcgaactctgaggagccgaggcgccggtgagagcaaggacgctgcaaacttgcgcagcgcgggggctgggattcacgcccagaagttcagcaggcagacagtccgaagccttcccgcagcggagagatagcttgagggtgcgcaagacggcagcctccgccctcggttcccgcccagaccgggcagaagagcttggaggagccaaaaggaacgcaaaaggcggccaggacagcgtgcagcagctgggagccgccgttctcagccttaaaagttgcagagattggaggctgccccgagaggggacagaccccagctccgactgcggggggcaggagaggacggtacccaactgccacctcccttcaaccatagtagttcctctgtaccgagcgcagcgagctacagacgggggcgcggcactcggcgcggagagcgggaggctcaaggtcccagccagtgagcccagtgtgcttgagtgtctctggactcgcccctgagcttccaggtctgtttcatttagactcctgctcgcctccgtgcagttgggggaaagcaagagacttgcgcgcacgcacagtcctctggagatcaggtggaaggagccgctgggtaccaaggactgttcagagcctcttcccatctcggggagagcgaagggtgaggctgggcccggagagcagtgtaaacggcctcctccggcgggatgggagccatcgggctcctgtggctcctgccgctgctgctttccacggcagctgtgggctccgggatggggaccggccagcgcgcgggctccccagctgcggggccgccgctgcagccccgggagccactcagctactcgcgcctgcagaggaagagtctggcagttgacttcgtggtgccctcgctcttccgtgtctacgcccgggacctactgctgccaccatcctcctcggagctgaaggctggcaggcccgaggcccgcggctcgctagctctggactgcgccccgctgctcaggttgctggggccggcgccgggggtctcctggaccgccggttcaccagccccggcagaggcccggacgctgtccagggtgctgaagggcggctccgtgcgcaagctccggcgtgccaagcagttggtgctggagctgggcgaggaggcgatcttggagggttgcgtcgggccccccggggaggcggctgtggggctgctccagttcaatctcagcgagctgttcagttggtggattcgccaaggcgaagggcgactgaggatccgcctgatgcccgagaagaaggcgtcggaagtgggcagagagggaaggctgtccgcggcaattcgcgcctcccagccccgccttctcttccagatcttcgggactggtcatagctccttggaatcaccaacaaacatgccttctccttctcctgattattttacatggaatctcacctggataatgaaagactccttccctttcctgtctcatcgcagccgatatggtctggagtgcagctttgacttcccctgtgagctggagtattcccctccactgcatgacctcaggaaccagagctggtcctggcgccgcatcccctccgaggaggcctcccagatggacttgctggatgggcctggggcagagcgttctaaggagatgcccagaggctcctttctccttctcaacacctcagctgactccaagcacaccatcctgagtccgtggatgaggagcagcagtgagcactgcacactggccgtctcggtgcacaggcacctgcagccctctggaaggtacattgcccagctgctgccccacaacgaggctgcaagagagatcctcctgatgcccactccagggaagcatggttggacagtgctccagggaagaatcgggcgtccagacaacccatttcgagtggccctggaatacatctccagtggaaaccgcagcttgtctgcagtggacttctttgccctgaagaactgcagtgaaggaacatccccaggctccaagatggccctgcagagctccttcacttgttggaatgggacagtcctccagcttgggcaggcctgtgacttccaccaggactgtgcccagggagaagatgagagccagatgtgccggaaactgcctgtgggtttttactgcaactttgaagatggcttctgtggctggacccaaggcacactgtcaccccacactcctcaatggcaggtcaggaccctaaaggatgcccggttccaggaccaccaagaccatgctctattgctcagtaccactgatgtccccgcttctgaaagtgctacagtgaccagtgctacgtttcctgcaccgatcaagagctctccatgtgagctccgaatgtcctggctcattcgtggagtcttgaggggaaacgtgtccttggtgctagtggagaacaaaaccgggaaggagcaaggcaggatggtctggcatgtcgccgcctatgaaggcttgagcctgtggcagtggatggtgttgcctctcctcgatgtgtctgacaggttctggctgcagatggtcgcatggtggggacaaggatccagagccatcgtggcttttgacaatatctccatcagcctggactgctacctcaccattagcggagaggacaagatcctgcagaatacagcacccaaatcaagaaacctgtttgagagaaacccaaacaaggagctgaaacccggggaaaattcaccaagacagacccccatctttgaccctacagttcattggctgttcaccacatgtggggccagcgggccccatggccccacccaggcacagtgcaacaacgcctaccagaactccaacctgagcgtggaggtggggagcgagggccccctgaaaggcatccagatctggaaggtgccagccaccgacacctacagcatctcgggctacggagctgctggcgggaaaggcgggaagaacaccatgatgcggtcccacggcgtgtctgtgctgggcatcttcaacctggagaaggatgacatgctgtacatcctggttgggcagcagggagaggacgcctgccccagtacaaaccagttaatccagaaagtctgcattggagagaacaatgtgatagaagaagaaatccgtgtgaacagaagcgtgcatgagtgggcaggaggcggaggaggagggggtggagccacctacgtatttaagatgaaggatggagtgccggtgcccctgatcattgcagccggaggtggtggcagggcctacggggccaagacagacacgttccacccagagagactggagaataactcctcggttctagggctaaacggcaattccggagccgcaggtggtggaggtggctggaatgataacacttccttgctctgggccggaaaatctttgcaggagggtgccaccggaggacattcctgcccccaggccatgaagaagtgggggtgggagacaagagggggtttcggagggggtggaggggggtgctcctcaggtggaggaggcggaggatatataggcggcaatgcagcctcaaacaatgaccccgaaatggatggggaagatggggtttccttcatcagtccactgggcatcctgtacaccccagctttaaaagtgatggaaggccacggggaagtgaatattaagcattatctaaactgcagtcactgtgaggtagacgaatgtcacatggaccctgaaagccacaaggtcatctgcttctgtgaccacgggacggtgctggctgaggatggcgtctcctgcattgtgtcacccaccccggagccacacctgccactctcgctgatcctctctgtggtgacctctgccctcgtggccgccctggtcctggctttctccggcatcatgattgtgtaccgccggaagcaccaggagctgcaagccatgcagatggagctgcagagccctgagtacaagctgagcaagctccgcacctcgaccatcatgaccgactacaaccccaactactgctttgctggcaagacctcctccatcagtgacctgaaggaggtgccgcggaaaaacatcaccctcattcggggtctgggccatggcgcctttggggaggtgtatgaaggccaggtgtccggaatgcccaacgacccaagccccctgcaagtggctgtgaagacgctgcctgaagtgtgctctgaacaggacgaactggatttcctcatggaagccctgatcatcagcaaattcaaccaccagaacattgttcgctgcattggggtgagcctgcaatccctgccccggttcatcctgctggagctcatggcggggggagacctcaagtccttcctccgagagacccgccctcgcccgagccagccctcctccctggccatgctggaccttctgcacgtggctcgggacattgcctgtggctgtcagtatttggaggaaaaccacttcatccaccgagacattgctgccagaaactgcctcttgacctgtccaggccctggaagagtggccaagattggagacttcgggatggcccgagacatctacagggcgagctactatagaaagggaggctgtgccatgctgccagttaagtggatgcccccagaggccttcatggaaggaatattcacttctaaaacagacacatggtcctttggagtgctgctatgggaaatcttttctcttggatatatgccataccccagcaaaagcaaccaggaagttctggagtttgtcaccagtggaggccggatggacccacccaagaactgccctgggcctgtataccggataatgactcagtgctggcaacatcagcctgaagacaggcccaactttgccatcattttggagaggattgaatactgcacccaggacccggatgtaatcaacaccgctttgccgatagaatatggtccacttgtggaagaggaagagaaagtgcctgtgaggcccaaggaccctgagggggttcctcctctcctggtctctcaacaggcaaaacgggaggaggagcgcagcccagctgccccaccacctctgcctaccacctcctctggcaaggctgcaaagaaacccacagctgcagagatctctgttcgagtccctagagggccggccgtggaagggggacacgtgaatatggcattctctcagtccaaccctccttcggagttgcacaaggtccacggatccagaaacaagcccaccagcttgtggaacccaacgtacggctcctggtttacagagaaacccaccaaaaagaataatcctatagcaaagaaggagccacacgacaggggtaacctggggctggagggaagctgtactgtcccacctaacgttgcaactgggagacttccgggggcctcactgctcctagagccctcttcgctgactgccaatatgaaggaggtacctctgttcaggctacgtcacttcccttgtgggaatgtcaattacggctaccagcaacagggcttgcccttagaagccgctactgcccctggagctggtcattacgaggataccattctgaaaagcaagaatagcatgaaccagcctgggccctgagctcggtcgcacactcacttctcttccttgggatccctaagaccgtggaggagagagaggcaatggctccttcacaaaccagagaccaaatgtcacgttttgttttgtgccaacctattttgaagtaccaccaaaaaagctgtattttgaaaatgctttagaaaggttttgagcatgggttcatcctattctttcgaaagaagaaaatatcataaaaatgagtgataaatacaaggcccagatgtggttgcataaggtttttatgcatgtttgttgtatacttccttatgcttctttcaaattgtgtgtgctctgcttcaatgtagtcagaattagctgcttctatgtttcatagttggggtcatagatgtttccttgccttgttgatgtggacatgagccatttgaggggagagggaacggaaataaaggagttatttgtaatgactaaaa

SEQ ID NO: 13264 - DNA, 3038 bp, Homo sapiens
agcgtgagtggccgaggcggttgggcggaggcggagcaggcgccatgtcagcccgggaagtggccgtgctgctgctgtggctgagctgctatggctccgccctttggaggtattccactaacagcccaaactatcgcatttttagtaccagaagtactattaagttagagtatgaaggaacattatttactgagtggagtgtgccagaaacttgttttgtgctaaataaaagctcacccacgacagaattgcgttgttcctcacctggtgttcacgctataaaaccaattgttactggcccagatgaagaagaacgctatttatttgtggaaagttctcatacttgctttctgtggtactatagagttagacatttctttaacaactttacccagcttatcactgtgtgggcatatgatccagaaagtgcagatcctgatgagttgctggggaatgcagaagaaccttcaataaattccatagtactcagcacacagatggccacattgggacagaagcctgtcatacatacagttctgaagagaaaagtttattcttcaaatgagaaaatgagaaggggtacctggcgtattgtagtaccaatgacaaaagatgatgcactaaaggagattagaggaaaccaagttacttttcaggattgctttattgcagattttcttattctgttgacttttcctttgttgaccatacctgaaattcctggttatttaccaatctcctcaccacgtggtagtcaattaatggcttcctgggatgcttgtgtagttgcatctgctgttttggtgacagatatggagacctttcacacaactgattcattcaaatcttggaccagaatcagagtgcctccagacattctgagtgatgatgaaagacggagtgtggctcatgtgatcttatcgcgggatggaatcgtttttcttataaatggtgttctttacataaagagttttcgtggatttataagactgggaggaattgtaaatcttcctgatggtggaattactggcatttcatcaagaaaatggtgttgggtcaattatttattaaaggctaaaggaagaagaagcacctttgcagtctggacagaaaatgaaatttacctcggatccattcttcttaagtttgccagattagtaactaccacagaactgaaaaacatcctaagtctatcggtgactgctactctgaccatagacagggttgagtatacaggacaccctctggagattgctgtgtttttaaattattgcactgtatgtaacgtcaccaaaaagattttcttagtgatatataatgaagatacaaaacagtgggtttcccaagactttacattagatgcccctattgacagtgttaccatgccacattttacattttcagcactgccaggattactgctatggaacaagcatagtatctactattgttaccataatttcacctttactgggattttacagacacctgcaggacatggaaatctatcaatgctatcaaatgacagcattattcatgaagttttcatagattattatggagatattttggtaaaaatggaaaataatgtaatattttattccaagattaatactagagatgcagtaaagctgcatttatggacaaattacacaacaagagcattcattttcttaagtacatctggtcaaacatatttcctgtatgctttggatgatggcacaatacaaatacaggactatcccttacatctggaagcacaaagtatagctttcacaacaaaagacaaatgcccatacatggcatttcataacaatgttgctcatgttttttactttttggacaagggagaggctctgacagtttggactcagatcgtctatccagaaaacactggtctgtatgttattgtggaatcttatggcccaaaaatattacaagagagtcatgagatttcctttgaagctgcctttggatactgcaccaaaactctgacactaacattttatcagaatgtagattatgagagaatatctgattactttgagacacaagacaagcacacgggtcttgtgctggttcagtttcgacctagtgaatattcaaaagcatgtccaatagcccaaaaggtgttccaaatagctgttggctgtgatgataaaaaattcattgcaattaaaggatttagtaaaaaaggatgtcatcaccatgatttttcatacgtgattgaaaagtcatatctgaggcatcagccatcgaaaaacttgagagtaaggtatatttggggagaatatggctgccctctgaggcttgacttcacagaaaagtttcaacctgtggttcaactatttgatgataatggctatgttaaagacgttgaagcaaatttcatagtgtgggaaatacacggcagggatgactatagctttaataatactatggcacagagtggttgtttacatgaagcacagacatggaagtcaatgattgaacttaacaagcacctcccactagaagaagtctggggacctgagtttctgtaacctaacagctatgtttgcaatagagacatttggactgattcccagtccaagtgtctacctggtagcttctttcctcttcgtcctgatgctgctcttcttcactattcttgttttgagctactttcggtacatgaggatttatagacgatatatttatgaaccacttcacaaacctcaaagaaaacgtaagaagaattaggaaaactgaaagtttgtttattacagatatatgcatatagagaaacagtgtattacatagtgatattgagagtgtgtgtttgaccaagaaatactaaatataagctcgtagtagtaggcatcaccaaattcaagatctgaaaaatattcttgaactatctccaaaatagaaatgttttcatatatattgttattaaattaatcctttgtttgccttcattttaaagatactctatgtactctcacatggcatgaaaaaataaactaaatttgactattacaaaaaaaaaaaaaaaa

SEQ ID NO: 13265 - DNA, 1279 bp, Homo sapiens
atggggaaagtgtcctgctgtggcatgaaataaatgaaacagaaaatgatggcaagactgctaagaacatcctttgctttgctcttccttggcctctttggggtgctgggggcagcaacaatttcatgcagaaatgaagaagggaaagctgtggactggtttactttttataagttacctaaaagacaaaacaaggaaagtggagagactgggttagagtacctgtacctagactctacaactagaagctggaggaagagtgagcaactaatgaatgacaccaagagtgttttgggaaggacattacaacagctatatgaagcatatgcctctaagagtaacaacacagcctatctaatatacaatgatggagtccctaaacctgtgaattacagcagaaagtatggacacaccaaaggtttactgctgtggaacagagttcaagggttctggctgattcattccatccctcagtttcctccaattccggaagaaggctatgattatccacccacagggagacgaaatggacaaagtggcatctgcataactttcaagtacaaccagtatgaggcaatagattctcagctcttggtctgcaaccccaacgtctatagctgctccatcccagccacctttcaccaggagctcattcacatgccccagctgtgcaccagggccagctcatcagagattcctggcaggctcctcaccacacttcagtcggcccagggacaaaaattcctccattttgcaaagtcggattcttttcttgacgacatctttgcagcctggatggctcaacggctgaagacacacttgttaacagaaacctggcagcgaaaaagacaagagcttccttcaaactgctcccttccttaccatgtctacaatataaaagcaattaaattatcacgacactcttatttcagttcttatcaagatcatgccaagtggtgtatttcccaaaagggcaccaaaaatcgctggacatgtattggagacctaaatcggagtccacaccaagccttcagaagtggaggattcatttgtacccagaattggcaaatttaccaagcatttcaaggattagtattatactatgaaagctgtaagtaaacttggtgaaaggacacaggtactatcattgaaaaccttgacaatgggtcttcttccattacaccttctttatattttaaaggcctgtgaatatacttataacctgcatatcacaaaataaaacatttttctctcatgttaaaaaaaaaaaaaaaaaaaa

SEQ ID NO: 13266 - DNA, 1584 bp, Homo sapiens
gaacatgacggcgccctgggtggccctcgccctcctctggggatcgctgtggcccggctctgggcgtggggaggctgagacacgggagtgcatctactacaacgccaactgggagctggagcgcaccaaccagagcggcctggagcgctgcgaaggcgagcaggacaagcggctgcactgctacgcctcctgggccaacagctctggcaccatcgagctcgtgaagaagggctgctggctagatgacttcaactgctacgataggcaggagtgtgtggccactgaggagaacccccaggtgtacttctgctgctgtgaaggcaacttctgcaacgagcgcttcactcatttgccagaggctgggggcccggaagtcacgtacgagccacccccgacagcccccaccctgctcacggtgctggcctactcactgctgcccatcgggggcctttccctcatcgtcctgctggccttttggatgtaccggcatcgcaagcccccctacggtcatgtggacatccatgaggaccctgggcctccaccaccatcccctctggtgggcctgaagccactgcagctgctggagatcaaggctcgggggcgctttggctgtgtctggaaggcccagctcatgaatgactttgtagctgtcaagatcttcccactccaggacaagcagtcgtggcagagtgaacgggagatcttcagcacacctggcatgaagcacgagaacctgctacagttcattgctgccgagaagcgaggctccaacctcgaagtagagctgtggctcatcacggccttccatgacaagggctccctcacggattacctcaaggggaacatcatcacatggaacgaactgtgtcatgtagcagagacgatgtcacgaggcctctcatacctgcatgaggatgtgccctggtgccgtggcgagggccacaagccgtctattgcccacagggactttaaaagtaagaatgtattgctgaagagcgacctcacagccgtgctggctgactttggcttggctgttcgatttgagccagggaaacctccaggggacacccacggacaggtaggcacgagacggtacatggctcctgaggtgctcgagggagccatcaacttccagagagatgccttcctgcgcattgacatgtatgccatggggttggtgctgtgggagcttgtgtctcgctgcaaggctgcagacggacccgtggatgagtacatgctgccctttgaggaagagattggccagcacccttcgttggaggagctgcaggaggtggtggtgcacaagaagatgaggcccaccattaaagatcactggttgaaacacccgggcctggcccagctttgtgtgaccatcgaggagtgctgggaccatgatgcagaggctcgcttgtccgcgggctgtgtggaggagcgggtgtccctgattcggaggtcggtcaacggcactacctcggactgtctcgtttccctggtgacctctgtcaccaatgtggacctgccccctaaagagtcaagcatctaagcccaggacatgagtgtctctccagactcagtggatctgaa

SEQ ID NO: 13267 - DNA, 3096 bp, Homo sapiens
gccagcagcctctaagagctcctagacggcctttggctttggctggcacaggggtgaaggagagccagcggcattgagtaaccaggcgaatgtgcccccaggagagttcattccaaccctcccagttcctactgctggtgggggtcccagtggcaagtgtcctccttctggcccaatgccttcgatggcactgccctagaaggctgctgggggcctgctggacactgaatggtcaagaggaaccagtgtcccagcctaccccccaactagaaaatgaggtctcaaggcagcacctgccagccacactgccagagatggttgccttctaccaggagctacacacacccactcaaggccagaccatggtccgccagttgatgcacaaactgttggtgttttcggctcgagaggtggatcaccgcggcggttgcctgatgctccaggatacaggcatctccttgctcatcccaccaggtgctgtggctgtgggccgccaggagcgggtgtctttgatcctggtgtgggacctgtcggacgccccatcgctgtcccaagcccaggggctggtaagccctgtggtggcatgtggcccccatggggcctccttcctgaagccttgcactctcacgttcaaacactgtgccgagcagcccagccatgctcgcacctacagcagcaacactaccctgctggatgccaaggtatggaggcccctggggcggccgggggcccacgcctcccgggatgagtgtcgcatccacctctcccacttcagcctctacacctgtgtgctggaggcacctgtggggcgcgaagcccgcaaatggctgcagctggccgtattctgctcaccgctggtgccaggacagtcccatctgcaactgcgtatctacttcctcaacaacacgccctgcgccctgcagtgggcactgaccaacgagcagccccatggtgggcgcctgcgtgggccctgccagctcttcgacttcaatggggctaggggcgaccagtgcctgaagctcacgtacatctcagagggttgggagaatgtggatgacagcagttgccagctggttccccatctccacatctggcatggaaagtgccccttccgctccttctgcttccggagaaaagcagccgatgagaatgaggactgttcagcactaaccaatgagatcattgtcaccatgcacaccttccaggatggcttggagaccaagtatatggaaatcctcagattccaggcatcagaggaggaatcctgggcagcgccaccacctgtttcccagccgcccccatgcaataggctgcccccagagctctttgagcagctgcggatgttattggagccaaacagcatcaccggcaatgactggcgcggactggcctcccacctggggctttgcggcatgaagatccggttcctgtcctgccagcgcagccccgcagcggccatcctggagttgtttgaggagcagaacggcagcctgcaggagctgcactacctcatgaccgtcatggagcggctagactgcgcctccgccatccagaactacctgagtgggacacacggcggcagcccaggccccgagcgcgggggcgcccgggataaccagggcctggagctggacgagaagctctgagcgcccagcgggcagggccggaggaggtgtaggggcgagaggggttgttctcctacgcctaagaggaacacagcagctgttcctggctgtgcccaccacccttcccagaaccctcggacggtgccagggccgcccgcgtcctcgccagcctcccagcagcaggcgcgcccttccggccgcgagctgtcccgcgtgcgggtcccctcctggccggcagagggcgcaggagcccaggagatggcctcagcgtggccagcctgccaaactgaccaggggacggccacggtccccgcgtgcactttagggccggtcaggccctaaagtattcactgagcacttaggaagaccgggcattgggctggtgtcatgaagaatactggaatataggaggtagggtctggagccctgacaagcacacagttcttttgcaggagtcaagatgtgctcataggagccaagggcaaactcgaaaacagccctgccctgtggttaggggaggtgggtgtggctttaggagttgagaggggaagagctgagtgcgggctggagcagcgagaatgcttcacggaggatgttggggagagaggatttgatttgccgagtggtttggagatctttaggggcgggtaggggaagagggtggctggacttaaggtaggagccgaaagtgggcatgggagcccatccccgtgggtgtgaggccggggtaggaccaggcttcccggctaggcacgcctggctggctgcctctgcctctactaacttcctttgtctctttatcctcctgcttaggccgtgtcttcctctctctctgccattttctctatcagaaaacattaaagctgagtagaaacttcaagatgatcattctggcccagcccttttatctctttatctccaatggtgtgcgttttaagtttctctgacttggtttttctgtccctgtctcccacagttgttcccgctctgcacctgtgtttcagttactctctctctctgtcttagatctttttgtttctgcctagtctctgtgccctgtctttgtgtgtttctttctctgcctgaaaccctccctcttttcccttcaggcatatgtctctaaaccaatgttatgtatcaaagactgttgaaagagacagggctactctaggaatggatgggtggggatattttccccatggatcaagatccagtttagggttgggaaataaaggatagggataaaagaggcaccccattcagtcagcagatacttattcagcacctactatgtgtttgatactgtatacaaaagacatgaatgggctgggtcctgaacagagaataaagggtttgactccaaaaaaaaaaaaaaaaaaaaaaaaaaaaaaaaaaaaaaaaaaaaaaaaaaaaaaaaaaaaaaaaaaaaaaaaaaaaaaaaaaaaaaaaaaaaaaaaaaaaaaaaaaaaaa

SEQ ID NO: 13268 - DNA, 1727 bp, Homo sapiens
aaccggcatcgccgccgccggagccgcagcgagtcctcagagcctggctgctggcggccgggagcgccgggacggggcgcgaagccggaggctccgggacgtggatacagatgaaaagaagcaaggaattgataactaaaaatcatagtcaagaggaaacaagtattcttcgttgttggaaatgtagaaaatgtatagcaagctctggttgttttatggagtatcttgagaatcaagtgattaaggataaagatgattcagttgatgctcaaaatatttgtcatgtgtggcacatgaatgtagaagcccttccagaatggataagctgcctaatccaaaaagcccagtggacagttggaaaactgaattgtcctttctgtggggcccgtttagggggctttaattttgtcagcactccaaaatgttcctgtggccagcttgcagctgtacatctctccaagagccggactgattatcagccaacacaggcaggcagactaatgagaccatcagtgaaatacttgtcacatcctagagttcagtcaggttgtgacaaggaagctctgctgacaggtggtggctctgaaaacagaaatcacaggcttttaaacatggcccgaaataataatgaccctggaagattaacagaagcactctgcctggaggtgcgaccaacatattttgagatgaagaacgaaaaactgctgtccaaagcatcagaaccaaaataccagctttttgttccccagcttgtgactggcagatgcgctacaagagcttttcatagaaaatcacatagtttggatctgaacatcagtgagaaactgactttattacccactttatatgaaatacatagtaagactactgcctattccagactaaatgaaacacagcctattgacctttcaggcttgcctttacaatctagtaaaaatagctattcctttcagaatccatccagttttgatcctagtatgctgctgcaaagattttcagtggccccccatgagacccagacacaaagaggaggagaatttcagtgtggtctagaagctgcttcagtgtattctgaccatactaatactaacaatctgactttcctgatggacctgccctcagctggcaggagcatgccggaggcctcagaccaggaagagcacctctcccctctggacttcctgcactcagccaatttttcattgggcagcattaatcagaggcttaataagagagaaaggagcaaattgaagaatctaagaaggaaacaacgaaggcgtgaaagatggctacagaagcagggtaaatactcaggagtgggattgctggatcatatggtaagtatatatttacttatatgagaaattgtcaaattgttttccagaatggctgtaccattttgcattccaagcagcaaagacttccattttctgtgcgtccttgaaagcaagcactggtattctcagtgttttaaaattttagtcattcaaatacatagacagttgtatcacatcatgactttaatttgcttttccttaaggatgctgaacatatgtgcttattttacatttgtatatattctttagttaagtgtcttcaaatcttttgggctggtgtggcagcttatgtctgtaatcccagcacttttgagaggccaaggcaggaggattgcttgagttcaggagttcaagaccggcctgggcagcatggcgaagccttatctctac

SEQ ID NO: 13269 - DNA, 3248 bp, Homo sapiens
catgcgtgtcggagaggagagagcagagagagacacaggaacaagaacagcaaagggtagagcagacctgcgccaggggcgcacaacggccgtgtccacctcccggccccaagatggtgcttcccacaggcagccacgcgtagcagccagagacagctccagacatgtggctcttcttcgggatcactggattgctgacggcagccctctcaggtcatccatctccagccccacctgaccagctcaacaccagcagtgcagagagtgagctctgggagccaggggagcggcttccggtccgtctgacaaacgggagcagcagctgcagcgggacggtggaggtgcggctcgaggcgtcctgggagcccgcgtgcggggcgctctgggacagccgcgccgccgaggccgtgtgccgagcactgggctgcggcggggcggaggccgcctctcagctcgccccgccgacccctgagctgccgcccccgcctgcagccgggaacaccagcgtagcagctaatgccactctggccggggcgcccgccctcctgtgcagcggcgccgagtggcggctctgcgaggtggtggagcacgcgtgccgcagcgacgggaggcgggcccgtgtcacctgtgcagagaaccgcgcgctgcgcctggtggacggtggcggcgcctgcgccggccgcgtggagatgctggagcatggcgagtggggatcagtgtgcgatgacacttgggacctggaggacgcccacgtggtgtgcaggcaactgggctgcggctgggcagtccaggccctgcccggcttgcacttcatgcccggccgcgggcctatccaccgggaccaggtgaactgctcgggggccgaagcttacctgtgggactgcccggggctgccaggacagcactactgcggccacaaagaggacgcgggcgtggtgtgctcagagcaccagtcctggcgcctgacagggggcgctgaccgctgcgaggggcaggtggaggtacacttccgaggggtctggaacacagtgtgtgacagtgagtggtacccatcggaggccaaggtgctctgccagtccttgggctgtggaactgcggttgagaggcccaaggggctgccccactccttgtccggcaggatgtactactcatgcaatggggaggagctcaccctctccaactgctcctggcggttcaacaactccaacctctgcagccagtcgctggcagccagggtcctctgctcagcttcccggagtttgcacaatctgtccactcccgaagtccctgcaagtgttcagacagtcactatagaatcttctgtgacagtgaaaatagagaacaaggaatctcgggagctaatgctcctcatcccctccatcgttctgggaattctcctccttggctccctcatcttcatagccttcatcctcttgagaattaaaggaaaatatgccctccccgtaatggtgaaccaccagcacctacccaccaccatcccggcagggagcaatagctatcaaccggtccccatcaccatccccaaagaagttttcatgctgcccatccaggtccaggccccgccccctgaggactcagactctggctcggactcagactatgagcactatgacttcagcgcccagcctcctgtggccctgaccaccttctacaattcccagcggcatcgggtcacagatgaggaggtccagcaaagcaggttccagatgccacccttggaggaaggacttgaagagttgcatgcctcccacatcccaactgccaaccctggacactgcattacagacccgccatccctgggccctcagtatcacccgaggagcaacagtgagtcgagcacctcttcgggggaggattactgcaatagtcccaaaagcaagctgcctccatggaacccccaggtgttttcttcagagaggagttccttcctggagcagcccccaaacttggagctggccagcacccagccagccttttcagcagggcccccggctgatgacagctccagcacctcatccggggagtggtaccagaacttccagccaccaccccagcccccttcggaggagcagtttggctgtccagggtcccccagccctcagcctgactccaccgacaacgatgactacgatgacatcagcgcagcctaggccggggccagccgaggctcctggggtggctctgaccctctggcctcctgctctacctactccctttcccctttcccaccctcccagctcacctccccatggagctgagaggcctcccttggagagatggaaggaaacgttataccttgtacccctcggtctccatccatcaagccaaacctgctgccacagccctcccccggccccagatagcagccccagggaggatgctgcctccaagaggtgtgagccctctgtctcggggatgaacaagcagagtctgggctacctcttgacagctggtggaggggagttggggagctggactggatgactctggaggccccttccaaacctcaagtgtccggcgctttgattgcctgagtttctgacacttcagggcccagaggtcctgcgaggggcagaactggacccccatgccagtgctgctgcaggagggcccatatactagggtctgctgagctgttgtcactgatcggtgggcgctgggggggtagggtagcacaccagctgtcccaggctttgctccgggcggtaactgcacttgggcagggaatatagccttcctgggcacaactagctgacaatgacaggttgactgtgtacccccaaccaaggagctggggcccaaggccagtcctgccccagagacactccaagtccgccaggggcacagaccagttctgcagtgactgtccctggacaatgggtctttattctgagtttcctatggtttacaaagagggccccagcccagccccaccacagatcccagagataggggcccagtctccatgggggcaaggagcatagagatgttttccaggaaggggctcagaagctgcactaggccccgagtccccatgtgtctccttgaattgatgaggatgctcctgggagggatgcgtgactatgtggtgttgcacccggggctgcaaacgtctccgtgcagcccccagagagaggcccatgggctcagaccaggctttgttgtcctgctctgagtatcctgagattaaactgaattgctgaatgaaaaaaaaaaaaaaaaaaaaa

SEQ ID NO: 13270 - DNA, 2397 bp, Homo sapiens
gcaagaactgaaacgaatggggattgaactgctttgcctgttctttctatttctaggaaggaatgatcacgtacaaggtggctgtgccctgggaggtgcagaaacctgtgaagactgcctgcttattggacctcagtgtgcctggtgtgctcaggagaattttactcatccatctggagttggcgaaaggtgtgataccccagcaaaccttttagctaaaggatgtcaattaaacttcatcgaaaaccctgtctcccaagtagaaatacttaaaaataagcctctcagtgtaggcagacagaaaaatagttctgacattgttcagattgcgcctcaaagcttgatccttaagttgagaccaggtggtgcgcagactctgcaggtgcatgtccgccagactgaggactacccggtggatttgtattacctcatggacctctccgcctccatggatgacgacctcaacacaataaaggagctgggctcccggctttccaaagagatgtctaaattaaccagcaactttagactgggcttcggatcttttgtggaaaaacctgtatcccctttcgtgaaaacaacaccagaagaaattgccaacccttgcagtagtattccatacttctgtttacctacatttggattcaagcacattttgccattgacaaatgatgctgaaagattcaatgaaattgtgaagaatcagaaaatttctgctaatattgacacacccgaaggtggatttgatgcaattatgcaagctgctgtgtgtaaggaaaaaattggctggcggaatgactccctccacctcctggtctttgtgagtgatgctgattctcattttggaatggacagcaaactagcaggcatcgtcattcctaatgacgggctctgtcacttggacagcaagaatgaatactccatgtcaactgtcttggaatatccaacaattggacaactcattgataaactggtacaaaacaacgtgttattgatcttcgctgtaacccaagaacaagttcatttatatgagaattacgcaaaacttattcctggagctacagtaggtctacttcagaaggactccggaaacattctccagctgatcatctcagcttatgaagaactgcggtctgaggtggaactggaagtattaggagacactgaaggactcaacttgtcatttacagccatctgtaacaacggtaccctcttccaacaccaaaagaaatgctctcacatgaaagtgggagacacagcttccttcagcgtgactgtgaatatcccacactgcgagagaagaagcaggcacattatcataaagcctgtggggctgggggatgccctggaattacttgtcagcccagaatgcaactgcgactgtcagaaagaagtggaagtgaacagctccaaatgtcaccacgggaacggctctttccagtgtggggtgtgtgcctgccaccctggccacatggggcctcgctgtgagtgtggcgaggacatgctgagcacagattcctgcaaggaggccccagatcatccctcctgcagcggaaggggtgactgctactgtgggcagtgtatctgccacttgtctccctatggaaacatttatgggccttattgccagtgtgacaatttctcctgcgtgagacacaaagggctgctctgcggaggtaacggcgactgtgactgtggtgaatgtgtgtgcaggagcggctggactggcgagtactgcaactgcaccaccagcacggactcctgcgtctctgaagatggagtgctctgcagcgggcgcggggactgtgtttgtggcaagtgtgtttgcacaaaccctggagcctcaggaccaacctgtgaacgatgtcctacctgtggtgacccctgtaactctaaacggagctgcattgagtgccacctgtcagcagctggccaagcccgagaagaatgtgtggacaagtgcaaactagctggtgcgaccatcagtgaagaagaagatttctcaaaggatggttctgtttcctgctctctgcaaggagaaaatgaatgtcttattacattcctaataactacagataatgaggggaaaaccatcattcacagcatcaatgaaaaagattgtccgaagcctccaaacattcccatgatcatgttaggggtttccctggctattcttctcatcggggttgtcctactgtgcatctggaagctactggtgtcatttcatgatcgtaaagaagttgccaaatttgaagcagaacgatcaaaagccaagtggcaaacgggaaccaatccactctacagaggatccacaagtacttttaaaaatgtaacttataaacacagggaaaaacaaaaggtagacctttccacagattgctagaactactttatgca

SEQ ID NO: 13271 - DNA, 2627 bp, Homo sapiens
actctgaggtgcattctttttttgatgagaggcatctctaggtaccatccctgacctggtcctcatgctgccgaggctgttgctgttgatctgtgctccactctgtgaacctgccgagctgtttttgatagccagcccctcccatcccacagaggggagcccagtgaccctgacgtgtaagatgccctttctacagagttcagatgcccagttccagttctgctttttcagagacacccgggccttgggcccaggctggagcagctcccccaagctccagatcgctgccatgtggaaagaagacacagggtcatactggtgcgaggcacagacaatggcgtccaaagtcttgaggagcaggagatcccagataaatgtgcacagggtccctgtcgctgatgtgagcttggagactcagcccccaggaggacaggtgatggagggagacaggctggtcctcatctgctcagttgctatgggcacaggagacatcaccttcctttggtacaaaggggctgtaggtttaaaccttcagtcaaagacccagcgttcactgacagcagagtatgagattccttcagtgagggagagtgatgctgagcaatattactgtgtagctgaaaatggctatggtcccagccccagtgggctggtgagcatcactgtcagaatcccggtgtctcgcccaatcctcatgctcagggctcccagggcccaggctgcagtggaggatgtgctggagcttcactgtgaggccctgagaggctctcctccgatcctgtactggttttatcacgaggatatcaccctggggagcaggtcggccccctctggaggaggagcctccttcaacctttccctgactgaagaacattctggaaactactcctgtgaggccaacaatggcctgggggcccagcgcagtgaggcggtgacactcaacttcacagtgcctactggggccagaagcaatcatcttacctcaggagtcattgaggggctgctcagcacccttggtccagccaccgtggccttattattttgctacggcctcaaaagaaaaataggaagacgttcagccagggatccactcaggagccttcccagccctctaccccaagagttcacctacctcaactcacctaccccagggcagctacagcctatatatgaaaatgtgaatgttgtaagtggggatgaggtttattcactggcgtactataaccagccggagcaggaatcagtagcagcagaaaccctggggacacatatggaggacaaggtttccttagacatctattccaggctgaggaaagcaaacattacagatgtggactatgaagatgctatgtaaggttatggaagattctgctctttgaaaaccatccatgaccccaagcctcaggcctgatatgttcttcagagatcctggggcattagctttccagtatacctcttctggatgccattctccatggcactattccttcatctactgtgaagtgaagttggcgcagccctgaagaaactacctaggagaactaatagacacaggagtgacagggactttgttatcagaaccagattcctgccggctcctttgaaaacaggtcatattgtgctcttctgtttacaagaggaaacaagatggaataaaagaaattgggatcttgggttggagggacagtgaagcttagagcacatgaactcaaggttagtgactctgcaggacttcacagagagagctgtgcccatcattcagtccaagtgctttctctgcccagacagcacagaactccagccccgctacttacatggatcatcgagtttccacctaaaatatgattctatttattttgagtcactgttaccaaattagaactaaaacaaagttacataaaaagttattgtgactccacttaattttagtgacgtatttttgtatatataggccaacctataccacatccaaaattatgtatctattacagcccctagaagctttataaatacagtgtgtcttcttttattcacaaaatttttgaaatcgtggtaatatggtttgaaacctgtatcttaattattttttttttaaattgagacagggtctcactctgtcactcaatctggaatgcagtggcacaatcttgcctcactgcaacgcctgcctctcaggctcaagcaaacctctcacctcagcctgctgagtagctgggactacaggcacatgccaccaaacttggccattttttgtcttacgtagagacaagatttcaccgttttgcccaggctggtctcaaactcctgggctcaagcaatgtattgaattttaaaataaccaggcactcactcttatgaattaataaacatttggaggtatataaagtaaaaagttaaagtctttcctgtaagttaacacaaatgttaactattgttaaaaactttacaggtagctctctagatatttttctatttttgtatgtatacttatgcatacatgtaagtatataaacatttagaagtgtacctatctaacaaactattatgaaatactttcaaatctgtaaatagatctattatactattttaaaaaaaaaaaaaaaaaaaaaaaaaaaaaaaaaaaaaaa

SEQ ID NO: 13272 - DNA, 1105 bp, Homo sapiens
gtcctgcgagcgacgcgcggcggggcggcgagaggaaacgcggcgccgggccgggcccggccctggagatggtccccggcgccgcgggctggtgttgtctcgtgctctggctccccgcgtgcgtcgcggcccacggcttccgtatccatgattatttgtactttcaagtgctgagtcctggggacattcgatacatcttcacagccacacctgccaaggactttggtggtatctttcacacaaggtatgagcagattcaccttgtccccgctgaacctccagaggcctgcggggaactcagcaacggtttcttcatccaggaccagattgctctggtggagagggggggctgctccttcctctccaagactcgggtggtccaggagcacggcgggcgggcggtgatcatctctgacaacgcagttgacaatgacagcttctacgtggagatgatccaggacagtacccagcgcacagctgacatccccgccctcttcctgctcggccgagacggctacatgatccgccgctctctggaacagcatgggctgccatgggccatcatttccatcccagtcaatgtcaccagcatccccacctttgagctgctgcaaccgccctggaccttctggtagaagagtttgtcccacattccagccataagtgactctgagctgggaaggggaaacccaggaattttgctacttggaatttggagatagcatctggggacaagtggagccaggtagaggaaaagggtttgggcgttgctaggctgaaagggaagccacaccactggccttcccttccccagggcccccaagggtgtctcatgctacaagaagaggcaagagacaggccccagggcttctggctagaacccgaaacaaaaggagctgaaggcaggtggcctgagagccatctgtgacctgtcacactcacctggctccagcctcccctacccagggtctctgcacagtgaccttcacagcagttgttggagtggtttaaagagctggtgtttggggactcaataaaccctcactgactttttagcaataaagcttctcatcagggttgcaaaaaaaaaaaaaaaaaaaaaaaa

SEQ ID NO: 13273 - DNA, 2943 bp, Homo sapiens
gcaactgggggcgccccggacgaccatgagagataaggactgagggccaggaaggggaagcgagcccgccgagaggtggcggggactgctcacgccaagggccacagcggccgcgctccggcctcgctccgccgctccacgcctcgcgggatccgcgggggcagcccggccgggcggggatgccggggctggggcggagggcgcagtggctgtgctggtggtgggggctgctgtgcagctgctgcgggcccccgccgctgcggccgcccttgcccgctgccgcggccgccgccgccggggggcagctgctgggggacggcgggagccccggccgcacggagcagccgccgccgtcgccgcagtcctcctcgggcttcctgtaccggcggctcaagacgcaggagaagcgggagatgcagaaggagatcttgtcggtgctggggctcccgcaccggccccggcccctgcacggcctccaacagccgcagcccccggcgctccggcagcaggaggagcagcagcagcagcagcagctgcctcgcggagagccccctcccgggcgactgaagtccgcgcccctcttcatgctggatctgtacaacgccctgtccgccgacaacgacgaggacggggcgtcggagggggagaggcagcagtcctggccccacgaagcagccagctcgtcccagcgtcggcagccgcccccgggcgccgcgcacccgctcaaccgcaagagccttctggcccccggatctggcagcggcggcgcgtccccactgaccagcgcgcaggacagcgccttcctcaacgacgcggacatggtcatgagctttgtgaacctggtggagtacgacaaggagttctcccctcgtcagcgacaccacaaagagttcaagttcaacttatcccagattcctgagggtgaggtggtgacggctgcagaattccgcatctacaaggactgtgttatggggagttttaaaaaccaaacttttcttatcagcatttatcaagtcttacaggagcatcagcacagagactctgacctgtttttgttggacacccgtgtagtatgggcctcagaagaaggctggctggaatttgacatcacggccactagcaatctgtgggttgtgactccacagcataacatggggcttcagctgagcgtggtgacaagggatggagtccacgtccacccccgagccgcaggcctggtgggcagagacggcccttacgataagcagcccttcatggtggctttcttcaaagtgagtgaggtccacgtgcgcaccaccaggtcagcctccagccggcgccgacaacagagtcgtaatcgctctacccagtcccaggacgtggcgcgggtctccagtgcttcagattacaacagcagtgaattgaaaacagcctgcaggaagcatgagctgtatgtgagtttccaagacctgggatggcaggactggatcattgcacccaagggctatgctgccaattactgtgatggagaatgctccttcccactcaacgcacacatgaatgcaaccaaccacgcgattgtgcagaccttggttcaccttatgaaccccgagtatgtccccaaaccgtgctgtgcgccaactaagctaaatgccatctcggttctttactttgatgacaactccaatgtcattctgaaaaaatacaggaatatggttgtaagagcttgtggatgccactaactcgaaaccagatgctggggacacacattctgccttggattcctagattacatctgccttaaaaaaacacggaagcacagttggaggtgggacgatgagactttgaaactatctcatgccagtgccttattacccaggaagattttaaaggacctcattaataatttgctcacttggtaaatgacgtgagtagttgttggtctgtagcaagctgagtttggatgtctgtagcataaggtctggtaactgcagaaacataaccgtgaagctcttcctaccctcctcccccaaaaacccaccaaaattagttttagctgtagatcaagctatttggggtgtttgttagtaaatagggaaaataatctcaaaggagttaaatgtattcttggctaaaggatcagctggttcagtactgtctatcaaaggtagattttacagagaacagaaatcggggaagtggggggaacgcctctgttcagttcattcccagaagtccacaggacgcacagcccaggccacagccagggctccacggggcgcccttgtctcagtcattgctgttgtatgttcgtgctggagttttgttggtgtgaaaatacacttatttcagccaaaacataccatttctacacctcaatcctccatttgctgtactctttgctagtaccaaaagtagactgattacactgaggtgaggctacaaggggtgtgtaaccgtgtaacacgtgaaggcagtgctcacctcttctttaccagaacggttctttgaccagcacattaacttctggactgccggctctagtaccttttcagtaaagtggttctctgcctttttactatacagcataccacgccacagggttagaaccaacgaagaaaataaaatgagggtgcccagcttataagaatggtgttagggggatgagcatgctgtttatgaacggaaatcatgatttccctgtagaaagtgaggctcagattaaattttagaatattttctaaatgtctttttcacaatcatgtgactgggaaggcaatttcatactaaactgattaaataatacatttataatctacaactgtttgcacttacagctttttttgtaaatataaactataatttattgtctattttatatctgttttgctgtggcgttggggggggggccgggcttttgggggggggggtttgtttggggggtgtcgtggtgtgggcgggcgg

SEQ ID NO: 13274 - DNA, 1538 bp, Homo sapiens
gaattccggaggcggcggctgcggaactcccgtggaggggccggtgggccctcgggcctgacgatggcagtggccactgcggcggcagtactggccgctctgggcggggcgctgtggctggcggcccgccggttcgtggggcccagggtccagcggctgcgcagaggcggggaccccggcctcatgcacgggaagactgtgctgatcaccggggcgaacagcggcctgggccgcgccacggccgccgagctactgcgcctgggagcgcgggtgatcatgggctgccgggaccgcgcgcgcgccgaggaggcggcgggtcagctccgccgcgagctccgccaggccgcggagtgcggcccagagcctggcgtcagcggggtgggcgagctcatagtccgggagctggacctcgcctcgctgcgctcggtgcgcgccttctgccaggaaatgctccaggaagagcctaggctggatgtcttgatcaataacgcagggatcttccagtgcccttacatgaagactgaagatgggtttgagatgcagttcggagtgaaccatctggggcactttctactcaccaatcttctccttggactcctcaaaagttcagctcccagcaggattgtggtagtttcttccaaactttataaatacggagacatcaattttgatgacttgaacagtgaacaaagctataataaaagcttttgttatagccggagcaaactggctaacattctttttaccagggaactagcccgccgcttagaaggcacaaatgtcaccgtcaatgtgttgcatcctggtattgtacggacaaatctggggaggcacatacacattccactgttggtcaaaccactcttcaatttggtgtcatgggcttttttcaaaactccagtagaaggtgcccagacttccatttatttggcctcttcacctgaggtagaaggagtgtcaggaagatactttggggattgtaaagaggaagaactgttgcccaaagctatggatgaatctgttgcaagaaaactctgggatatcagtgaagtgatggttggcctgctaaaataggaacaaggagtaaaagagctgtctataaaactgcatatcagttatatctgtgatcaggaatggtgtggattgagaacttgttacttgaagaaaaagaattttgatattggaatagcctgctaagaggtacatgtgggtattttggagttactgaaaaattatttttgggataagagaatttcagcaaagatgttttaaatatatatagtaagtataatgaataataagtacaatgaaaaatacaattatattgtaaaattataactgggcaagcatggatgacatattaatatttgtcagaattaagtgactcaaagtgctatcgagaggtttttcaagtatctttgagtttcatggccaaagtgttaactagttttactacaatgtttggtgtttgtgtggaaattatctgcctggtgtgtgcacacaagtcttacttggaataaatttactggtacaattct

SEQ ID NO: 13275 - DNA, 2668 bp, Homo sapiens
ctctctggataggaagaaatatagtagaaccctttgaaaatggatattttcacatattttcgttcagatacaaaagctggcagttactgaaataaggacttgaagttccttcctcttttttttatgtcttaagagcaggaaataaagagacagctgaaggtgtagccttgaccaactgaaagggaaatcttcatcctctgaaaaaacatatgtgattctcaaaaaacgcatctggaaaattgataaagaagcgattctgtagattctcccagcgctgttgggctctcaattccttctgtgaaggacaacatatggtgatggggaaatcagaagctttgagaccctctacacctggatatgaatcccccttctaatacttaccagaaatgaaggggatactcagggcagagttctgaatctcaaaacactctactctggcaaaggaatgaagttattggagtgatgacaggaacacgggagaacaatgctctgtttgggctggatatttctttggcttgttgcaggagagcgaattaaaggatttaatatttcaggttgttccacaaaaaaactcctttggacatattctacaaggagtgaagaggaatttgtcttattttgtgatttaccagagccacagaaatcacatttctgccacagaaatcgactctcaccaaaacaagtccctgagcacctgcccttcatgggtagtaacgacctatctgatgtccaatggtaccaacaaccttcgaatggagatccattagaggacattaggaaaagctatcctcacatcattcaggacaaatgtacccttcactttttgaccccaggggtgaataattctgggtcatatatttgtagacccaagatgattaagagcccctatgatgtagcctgttgtgtcaagatgattttagaagttaagccccagacaaatgcatcctgtgagtattccgcatcacataagcaagacctacttcttgggagcactggctctatttcttgccccagtctcagctgccaaagtgatgcacaaagtccagcggtaacctggtacaagaatggaaaactcctctctgtggaaaggagcaaccgaatcgtagtggatgaagtttatgactatcaccagggcacatatgtatgtgattacactcagtcggatactgtgagttcgtggacagtcagagctgttgttcaagtgagaaccattgtgggagacactaaactcaaaccagatattctggatcctgtcgaggacacactggaagtagaacttggaaagcctttaactattagctgcaaagcacgatttggctttgaaagggtctttaaccctgtcataaaatggtacatcaaagattctgacctagagtgggaagtctcagtacctgaggcgaaaagtattaaatccactttaaaggatgaaatcattgagcgtaatatcatcttggaaaaagtcactcagcgtgatcttcgcaggaagtttgtttgctttgtccagaactccattggaaacacaacccagtccgtccaactgaaagaaaagagaggagtggtgctcctgtacatcctgcttggcaccatcgggaccctggtggccgtgctggcggcgagtgccctcctctacaggcactggattgaaatagtgctgctgtaccggacctaccagagcaaggatcagacgcttggggataaaaaggattttgatgctttcgtatcctatgcaaaatggagctcttttccaagtgaggccacttcatctctgagtgaagaacacttggccctgagcctatttcctgatgttttagaaaacaaatatggatatagcctgtgtttgcttgaaagagatgtggctccaggaggagtgtatgcagaagacattgtgagcattattaagagaagcagaagaggaatatttatcttgagccccaactatgtcaatggacccagtatctttgaactacaagcagcagtgaatcttgccttggatgatcaaacactgaaactcattttaattaagttctgttacttccaagagccagagtctctacctcatctcgtgaaaaaagctctcagggttttgcccacagttacttggagaggcttaaaatcagttcctcccaattctaggttctgggccaaaatgcgctaccacatgcctgtgaaaaactctcagggattcacgtggaaccagctcagaattacctctaggatttttcagtggaaaggactcagtagaacagaaaccactgggaggagctcccagcctaaggaatggtgaaatgagccctggagccccctccagtccagtccctgggatagagatgttgctggacagaactcacagctctgtgtgtgtgtgttcaggctgataggaaattcaaagagtctcctgccagcaccaagcaagcttgatggacaatggagtgggattgagactgtggtttagagcctttgatttcctggactggactgacggcgagtgaattctctagaccttgggtactttcagtacacaacacccctaagatttcccagtggtccgagcagaatcagaaaatacagctacttctgccttatggctagggaactgtcatgtctaccatgtattgtacatatgactttatgtatacttgcaatcaaataaatattattttattagaaa

SEQ ID NO: 13276 - DNA, 3116 bp, Homo sapiens
agcgctcagatacgcgacgcgtagcaggcggggaccgaacgggtgcctcagtgtccttcccctcccctcgcctggcctcgccgtcctctccccgcagccggaccggaactatgtgatcccggaagttccggggcctttgctgtgtgggataaacagtaatggcggaggctgcaactcccggaacaacagccacaacatcaggagcaggagcggcagcggcgacggcggcagcagcctcccccaccccgatccccacagtcaccgccccgtccctgggggcgggcggagggggcggcggcagcgacggcagcggcggcggctggactaaacaggtcacctgcaggtattttatgcatggggtttgtaaggaaggagacaactgtcgctactcgcatgacctctctgacagtccgtatagtgtagtgtgcaagtattttcagcgagggtactgtatttatggagaccgctgcagatatgaacatagcaaaccattgaaacaggaagaagcaactgctacagagctaactacaaagtcatcccttgctgcttcctcaagtctctcatcgatagttggaccacttgttgaaatgaatacaggcgaagctgagtcaagaaattcaaactttgcaactgtaggagcaggttcagaggactgggtgaatgctattgagtttgttcctgggcaaccctactgtggccgtactgcgccttcctgcactgaagcacccctgcagggctcagtgaccaaggaagaatcagagaaagagcaaaccgccgtggagacaaagaagcagctgtgcccctatgctgcagtgggagagtgccgatacggggagaactgtgtgtatctccacggagattcttgtgacatgtgtgggctgcagctcctgcatccaatggatgctgcccagagatcgcagcatatcaaatcgtgcattgaggcccatgagaaggacatggagctctcatttgccgtgcagcgcagcaaggacatggtgtgtgggatctgcatggaggtggtctatgagaaagccaaccccagtgagcgccgcttcgggatcctctccaactgcaaccacacctactgtctcaagtgcattcgcaagtggaggagtgctaagcaatttgagagcaagatcataaagtcctgcccagaatgccggatcacatctaactttgtcattccaagtgagtactgggtggaggagaaagaagagaagcagaaactcattctgaaatacaaggaggcaatgagcaacaaggcgtgcaggtattttgatgaaggacgtgggagctgcccatttggagggaactgtttttacaagcatgcgtaccctgatggccgtagagaggagccacagagacagaaagtgggaacatcaagcagataccgggcccaacgaaggaaccacttctgggaactcattgaggaaagagagaacagcaacccctttgacaacgatgaagaagaggttgtcacctttgagctgggcgagatgttgcttatgcttttggctgcaggtggggacgacgaactaacagactctgaagatgagtgggacttgtttcatgatgagctggaagatttttatgacttggatctatagcaaccttgcgtggcgtgtgaactggtctgctgacctcagacagcagctgtcccctgtggtggtgtggcagtgcctgtgttctctcctaggcaggcctctcaactccaggtgctgtcctaagaatttttacccagggcctgtcttctcaacccctcacctttccctgaggagtgtgttgttttccctgttgaaaaaagttacaaaaataaatcttaaagttagttttttgtaacacgaatttaactgtcagacagttagtgtaggtgtgttgcgtcatctgttttcaaccagattgcatttatggacttttcacacactcattttgaggaccccaggttcaaaagtaaaagcagtggccctgctttggggtccaagaataggagtgatgggtgaagggacctaagctggccaatagccctctgccccagacatgggatgtggatccttgaggtttctggtgaaatctgcacatctgtgtttttatatctgttccctaccctgtaatccctaccacgtgcacttgttctgtggttttggtctcttgtttaattgcacacaagtaatactactgggtaaccagaatcaggtgtgaatgtgttgagattttttactgttttgcatgataggaaaattgagaaagaatacgtataaaagatagagaggcataacatcaatgcagagttggaagttggctcccaagggctgacatggtgtgagtgtgtgggtgtgtgataagcttctcatccctgcatagatgcagtattcttagccttagtagaaaaacctggtttagtggtttaagccttgtgtggcagatagatcttaaagggcaaagcagtatattggtagttgtcaatatagcagtgctagctctgtctatataaatagagaaatggggttagccatagaggttaaaactacctggttatcccatataataacacaaactgggtcttggatacacagttgtatttaatgttttacgatctagcctttccagtacaggcactttctgagaaacctttgtcctcacttgaggcattttgttgtcgggtttttgtgtttgtttttgtgggtatttgcctcattccacccctgagctttcaggtagacagacgtgattcaaaactctgttctaaggtgtttattgtagtggagtaatgggtttgcagtgataagtcatacttttccaccgaaagggagggcttgggaatccctgagattagctaaagttaagttgttggaagaattccttgattggaaattgtacctttgtgttttgttgctctgtttcctgaaaataactcggggatgctcctggtttgtccatctactgctttgattccttggatcccacccattctttcactttaagaaaaaacaaataattgttgcagaggtctctgtattttgcagctgcccttttgtaagaagcacttttcccaaataaaacaattaaaaaaaaaaaaaaaaaaaaaaaaaaaaaaaaaaaaaaaaaaaaaaaaaaaa

SEQ ID NO: 13277 - DNA, 4812 bp, Homo sapiens
gcgctccagacaagatggcgcggccggtccggggagggctcggggccccgcgccgctcgccttgccttctccttctctggctgcttttgcttcggctggagccggtgaccgccgcggccggcccgcgggcgccctgcgcggccgcctgcacttgcgctggggactcgctggactgcggtgggcgcgggctggctgcgttgcccggggacctgccctcctggacgcggagcctaaacctgagttacaacaaactctctgagattgaccctgctggttttgaggacttgccgaacctacaggaagtgtacctcaataataatgagttgacagcggtaccatccctgggcgctgcttcatcacatgtcgtctctctctttctgcagcacaacaagattcgcagcgtggaggggagccagctgaaggcctacctttccttagaagtgttagatctgagtttgaacaacatcacggaagtgcggaacacctgctttccacacggaccgcctataaaggagctcaacctggcaggcaatcggattggcaccctggagttgggagcatttgatggtctgtcacggtcgctgctaactcttcgcctgagcaaaaacaggatcacccagcttcctgtaagagcattcaagctacccaggctgacacaactggacctcaatcggaacaggattcggctgatagagggcctcaccttccaggggctcaacagcttggaggtgctgaagcttcagcgaaacaacatcagcaaactgacagatggggccttctggggactgtccaagatgcatgtgctgcacctggagtacaacagcctggtagaagtgaacagcggctcgctctacggcctcacggccctgcatcagctccacctcagcaacaattccatcgctcgcattcaccgcaagggctggagcttctgccagaagctgcatgagttggtcctgtccttcaacaacctgacacggctggacgaggagagcctggccgagctgagcagcctgagtgtcctgcgtctcagccacaattccatcagccacattgcggagggtgccttcaagggactcaggagcctgcgagtcttggatctggaccataacgagatttcgggcacaatagaggacacgagcggcgccttctcagggctcgacagcctcagcaagctgactctgtttggaaacaagatcaagtctgtggctaagagagcattctcggggctggaaggcctggagcacctgaaccttggagggaatgcgatcagatctgtccagtttgatgcctttgtgaagatgaagaatcttaaagagctccatatcagcagcgacagcttcctgtgtgactgccagctgaagtggctgcccccgtggctaattggcaggatgctgcaggcctttgtgacagccacctgtgcccacccagaatcactgaagggtcagagcattttctctgtgccaccagagagtttcgtgtgcgatgacttcctgaagccacagatcatcacccagccagaaaccaccatggctatggtgggcaaggacatccggtttacatgctcagcagccagcagcagcagctcccccatgacctttgcctggaagaaagacaatgaagtcctgaccaatgcagacatggagaactttgtccacgtccacgcgcaggacggggaagtgatggagtacaccaccatcctgcacctccgtcaggtcactttcgggcacgagggccgctaccaatgtgtcatcaccaaccactttggctccacctattcacataaggccaggctcaccgtgaatgtgttgccatcattcaccaaaacgccccacgacataaccatccggaccaccaccatggcccgcctcgaatgtgctgccacaggtcacccaaaccctcagattgcctggcagaaggatggaggcacggatttccccgctgcccgtgagcgacgcatgcatgtcatgccggatgacgacgtgtttttcatcactgatgtgaaaatagatgacgcaggggtttacagctgtactgctcagaactcagccggttctatttcagctaatgccaccctgactgtcctagagaccccatccttggtggtccccttggaagaccgtgtggtatctgtgggagaaacagtggccctccaatgcaaagccacggggaaccctccgccccgcatcacctggttcaagggggaccgcccgctgagcctcactgagcggcaccacttgacccctgacaaccagctcctggtggttcagaacgtggtggcagaggatgcgggccgatatacctgtgagatgtccaacaccctgggcacggagcgagctcacagccagctgagcgtcctgcccgcagcaggctgcaggaaggatgggaccacggtaggcatcttcaccattgctgtcgtgagcagcatcgtcctgacgtcactggtctgggtgtgcatcatctaccagaccaggaagaagagtgaagagtacagtgtcaccaacacagatgaaaccgtcgtgccaccagatgttccaagctacctctcttctcaggggaccctttctgaccgacaagaaaccgtggtcaggaccgagggtggccctcaggccaatgggcacattgagagcaatggtgtgtgtccaagagatgcaagccactttccagagcccgacactcacagcgttgcctgcaggcagccaaagctctgtgctgggtctgcgtatcacaaagagccgtggaaagcgatggagaaagctgaagggacacctgggccacataagatggaacacggtggccgggtcgtatgcagtgactgcaacaccgaagtggactgttactccaggggacaagccttccacccccagcctgtgtccagagacagcgcacagccaagtgcgccaaatggcccggagccgggtgggagtgaccaagagcattctccacatcaccagtgcagcaggactgccgctgggtcctgccccgagtgccaagggtcgctctaccccagtaaccacgatagaatgctgacggctgtgaagaaaaagccaatggcatctctagatgggaaaggggattcttcctggactttagcaaggttgtatcacccggactccacagagctacagcctgcatcttcattaacttcaggcagtccagagcgcgcggaagcccagtacttgcttgtttccaatggccacctccccaaagcatgtgacgccagtcccgagtccacgccactgacaggacagctccccgggaaacagagggtgccactgctgttggcaccaaaaagctaggttttgtctacctcagttcttgtcataccaatctctacgggaaagagaggtaggagaggctgcgaggaagcttgggttcaagcgtcactcatctgtacatagttgtaactcccatgtggagtatcagtcgctcacaggacttggatctgaagcacagtaaacgcaagaggggatttgtgtacaaaaggcaaaaaaagtatttgatatcattgtacataagagttttcagagatttcatatatatcttttacagaggctattttaatctttagtgcatggttaacagaaaaaaattatacaattttgacaatattatttttcgtatcaggttgctgtttaattttggagggggtggggaaatagttctggtgccttaacgcatggctggaatttatagaggctacaaccacatttgttcacaggagtttttggtgcggggtgggaaggatggaaggccttggatttatattgcacttcatagacccctaggctgctgtgcggtgggactccacatgcgccggaaggagcttcaggtgagcactgctcatgtgtggatgcccctgcaacaggcttccctgtctgtagagccaggggtgcaagtgccatccacacttgcagtgaatggcttttccttttaggtttaagtcctgtctgtctgtaaggcgtagaatctgtccgtctgtaaggcgtagaatgagggttgttaatccatcacaagcaaaaggtcagaacagttaaacactgcctttcctcctcctcttattttatgataaaagcaaatgtggccttctcagtatcattcgattgctatttgagacttttaaattaaggtaaaggctgctggtgttggtacctgtggatttttctatactgatgttttcgttttgccaatataatgagtattacattggccttgggggacagaaaggaggaagttctgacttttcagggctaccttatttctactaaggacccagagcaggcctgtccatgccattccttcgcacagatgaaactgagctgggactggaaaggacagcccttgacctgggttctgggtataatttgcacttttgagactggtagctaaccatcttatgagtgccaatgtgtcatttagtaaaacttaaatagaaacaaggtccttcaaatgttcctttggccaaaagctgaagggagttactgagaaaatagttaacaattactgtcaggtgtcatcactgttcaaaaggtaagcacatttagaattttgttcttgacagttaactgactaatcttacttccacaaaatatgtgaatttgctgcttctgagaggcaatgtgaaagagggagtattacttttatgtacaaagttatttatttatagaaattttggtacagtgtacattgaaaaccatgtaaaatattgaagtgtctaacaaatggcattgaagtgtctttaataaaggttcatttataaatgtcaaaaaaaaaaaaaaaaaaaaaaaaaaaaaaaaaaaaaaaaaaaaaaaaaaa

SEQ ID NO: 13278 - DNA, 9890 bp, Homo sapiens
acaagctctccatgtgagctgacaggcgagtggaaacccctcgagtcacgctgcccggcggcggagggagcgctcgcccgcagtggcaacagctgcaccaccgtccccgtcgctctgccttcctcttctgcagcctctgctcttctgattacctccctcccccgtcctttggtgatttttttttttcaagaaggagagggcggggtaggtgtccgttccctcccctcttccccctcctttgccttcttggtttgaatttcctcccccggcgttgcactggcacacagtgcaagaggcaatacccgcacggagggagaacgaaggctgagactcccctgccgctccaagcccggaagaactggagcctggaggggggtgaggggagaagaggaagcgggaggggcttggcttcctcgcgtatttgaggacagcccatctcccttcaagaaccctacggagagtcggactgcatctccgcagcgagctcttggagcgccgccggccgggaggcgaaggatgcaggcggctccgcgcgccggctgcggggcagcgctcctgctgtggattgtcagcagctgcctctgcagagcctggacggctccctccacgtcccaaaaatgtgatgagccacttgtctctggactcccccatgtggctttcagcagctcctcctccatctctggtagctattctcccggctatgccaagataaacaagagaggaggtgctgggggatggtctccatcagacagcgaccattatcaatggcttcaggttgactttggcaatcggaagcagatcagtgccattgcaacccaaggaaggtatagcagctcagattgggtgacccaataccggatgctctacagcgacacagggagaaactggaaaccctatcatcaagatgggaatatctgggcatttcccggaaacattaactctgacggtgtggtccggcacgaattacagcatccgattattgcccgctatgtgcgcatagtgcctctggattggaatggagaaggtcgcattggactcagaattgaagtttatggctgttcttactgggctgatgttatcaactttgatggccatgttgtattaccatatagattcagaaacaagaagatgaaaacactgaaagatgtcattgccttgaactttaagacgtctgaaagtgaaggagtaatcctgcacggagaaggacagcaaggagattacattaccttggaactgaaaaaagccaagctggtcctcagtttaaacttaggaagcaaccagcttggccccatatatggccacacatcagtgatgacaggaagtttgctggatgaccaccactggcactctgtggtcattgagcgccaggggcggagcattaacctcactctggacaggagcatgcagcacttccgtaccaatggagagtttgactacctggacttggactatgagataacctttggaggcatccctttctctggcaagcccagctccagcagtagaaagaatttcaaaggctgcatggaaagcatcaactacaatggcgtcaacattactgatcttgccagaaggaagaaattagagccctcaaatgtgggaaatttgagcttttcttgtgtggaaccctatacggtgcctgtctttttcaacgctacaagttacctggaggtgcccggacggcttaaccaggacctgttctcagtcagtttccagtttaggacatggaaccccaatggtctcctggtcttcagtcactttgcggataatttgggcaatgtggagattgacctcactgaaagcaaagtgggtgttcacatcaacatcacacagaccaagatgagccaaatcgatatttcctcaggttctgggttgaatgatggacagtggcacgaggttcgcttcctagccaaggaaaattttgctattctcaccatcgatggagatgaagcatcagcagttcgaactaatagtccccttcaagttaaaactggcgagaagtacttttttggaggttttctgaaccagatgaataactcaagtcactctgtccttcagccttcattccaaggatgcatgcagctcattcaagtggacgatcaacttgtaaatttatacgaagtggcacaaaggaagccgggaagtttcgcgaatgtcagcattgacatgtgtgcgatcatagacagatgtgtgcccaatcactgtgagcatggtggaaagtgctcgcaaacatgggacagcttcaaatgcacttgtgatgagacaggatacagtggggccacctgccacaactctatctacgagccttcctgtgaagcctacaaacacctaggacagacatcaaattattactggatagatcctgatggcagcggacctctggggcctctgaaagtttactgcaacatgacagaggacaaagtgtggaccatagtgtctcatgacttgcagatgcagacgcctgtggtcggctacaacccagaaaaatactcagtgacacagctcgtttacagcgcctccatggaccagataagtgccatcactgacagtgccgagtactgcgagcagtatgtctcctatttctgcaagatgtcaagattgttgaacaccccagatggaagcccttacacttggtgggttggcaaagccaacgagaagcactactactggggaggctctgggcctggaatccagaaatgtgcctgcggcatcgaacgcaactgcacagatcccaagtactactgtaactgcgacgcggactacaagcaatggaggaaggatgctggtttcttatcatacaaagatcacctgccagtgagccaagtggtggttggagatactgaccgtcaaggctcagaagccaaattgagcgtaggtcctctgcgctgccaaggagacaggaattattggaatgccgcctctttcccaaacccatcctcctacctgcacttctctactttccaaggggaaactagcgctgacatttctttctacttcaaaacattaaccccctggggagtgtttcttgaaaatatgggaaaggaagatttcatcaagctggagctgaagtctgccacagaagtgtccttttcatttgatgtgggaaatgggccagtagagattgtagtgaggtcaccaacccctctcaacgatgaccagtggcaccgggtcactgcagagaggaatgtcaagcaggccagcctacaggtggaccggctaccgcagcagatccgcaaggccccaacagaaggccacacccgcctggagctctacagccagttatttgtgggtggtgctgggggccagcagggcttcctgggctgcatccgctccttgaggatgaatggggtgacacttgacctggaggaaagagcaaaggtcacatctgggttcatatccggatgctcgggccattgcaccagctatggaacaaactgtgaaaatggaggcaaatgcctagagagataccacggttactcctgcgattgctctaatactgcatatgatggaacattttgcaacaaagatgttggtgcattttttgaagaagggatgtggctacgatataactttcaggcaccagcaacaaatgccagagactccagcagcagagtagacaacgctcccgaccagcagaactcccacccggacctggcacaggaggagatccgcttcagcttcagcaccaccaaggcgccctgcattctcctctacatcagctccttcaccacagacttcttggcagtcctcgtcaaacccactggaagcttacagattcgatacaacctgggtggcacccgagagccatacaatattgacgtagaccacaggaacatggccaatggacagccccacagtgtcaacatcacccgccacgagaagaccatctttctcaagctcgatcattatccttctgtgagttaccatctgccaagttcatccgacaccctcttcaattctcccaagtcgctctttctgggaaaagttatagaaacagggaaaattgaccaagagattcacaaatacaacaccccaggattcactggttgcctctccagagtccagttcaaccagatcgcccctctcaaggccgccttgaggcagacaaacgcctcggctcacgtccacatccagggcgagctggtggagtccaactgcggggcctcgccgctgaccctctcccccatgtcgtccgccaccgacccctggcacctggatcacctggattcagccagtgcggattttccatataatccaggacaaggccaagctataagaaatggagtcaacagaaactcggctatcattggaggcgtcattgctgtggtgattttcaccatcctgtgcaccctggtcttcctgatccggtacatgttccgccacaagggcacctaccataccaacgaagcaaagggggcggagtcggcagagagcgcggacgccgccatcatgaacaacgaccccaacttcacagagaccattgatgaaagcaaaaaggaatggctcatttgaggggtggctacttggctatgggatagggaggagggaattactagggaggagagaaagggacaaaagcaccctgcttcatactcttgagcacatccttaaaatatcagcacaagttgggggaggcaggcaatggaatataatggaatattcttgagactgatcacaaaaaaaaaaacctttttaatatttctttatagctgagttttcccttctgtatcaaaacaaaataatacaaaaaatgcttttagagtttaagcaatggttgaaatttgtaggtactatctgtcttattttgtgtgtgtttagaggtgttctaaagacccgtggtaacagggcaagttttctacgtttttaagagcccttagaacgtgggtattttttttcttgagaaaagctaatgcacctacagatggcccccaacattctcttccttttgcttctagtcaaccttaatgggctgttacagaaactagttcgtgtttatatactatttcctttgatgtcctataagtcggaaaagaaaggggcaaagagaacctattatttgccagtttttaagcagagctcaatctatgccagctctctggcatctggggttcctgactgataccagcagttgaaggaagagagtgcatggcacctggtgtgtaacgacacaatcagcacaactggagagaggcattaaagaaccagggaaggtagtttgatttttcattgaattctacaagctaatattgttccacgtatgtagtcttagaccaatagctgtaactatcagctgcaataccatggtgaccagctgttacaaaagattttttcctgttttatctgaaacatactggatttatatatgtataagcgcctcaatggggaattagagccagatgttatgatttgtttgctctttttcttttatagtttagttatagcaaaaatatggataatttctagtgaatgcataaattaggttgcgtttcttattttgctttaaatctctggtagtttttccacccctgtgacacaatcctaatagacagtgtcctgtaaatggacacaacacaataaagtcaagttattattgctgttactctggatgatatggaaaacactgccatattttaaatcaactactccacgtgtttttccatccaatcacactgctgtgattcagggatctttcttctaagacggacacatttgaacctcaggttcatcacaaacctggtacctgttgcttcccagaggatggagaagtgtagttaatcacacctcttagtttaatctgaaatcttgacccagttatttaacaaataaatacctcattgattatatttaaaagtaatacacttcctgtaaacaaatggggacaatgcatccaaaaaatctttttaaacagattacacaaaaattatttccagaaaggctaccatttatcatcattatatttcaagcctcttatacttaataagcactttctaaaaagtcttgagatcccaccattctgaggaattcaatatgatcactttttccttctttgcctgggagaggttaagaggaggtttcgaaggtatagatgctattgttctgatggcccggctgaataaaatggaaattctagtttgttagaattatgcattctttttcaagattctcagtgtgcctaacttattggagcacatcagtttcttgggtaatggaaaacattacctagagttgccagtggcacattacaccagtacagagcacattccaaaggagacattggaccagttaattcccatacaagtcaaggtaacagaacaaaagggaatcctgatgcccttttaccattgctggttgagctcaggcactgtcatggacacccttaattttaaaaggttttaatcattcttctataaaatacatttaaaatggaaaaatacttaatatcactaaatatcagaacaatgtaacatttacaaatgacatattgaaagcaaaggctgttttatttagccaagatgattaccattaggagttactttatgtattgttgaaagcaaattttaaacatgatgttttagaagtgtttctgatttttaaacctggtttacaggtattacttctgcacttaccaaataatgccagatggaaatttattatttcttgcaattcccatgatagctctgttctttatgcattgtctcaacactttcccttttttcccaaaatgagtagagaattaaagccacccaaaacagcttctgctactaaaatgttctcatcctttctcctccctctccttttcctgccacaaaaggtgaaaaatgagatccaatcctctcaccaaaatttcaaacctaggacactggaatgactgcagggatcagtggttctcccatatcaccatcaattaagacatataggacactgtcttccttcaagagggttacaatgtggccatcagacaggaaaccaaacggtggataaagtattaagtaactaagtgccaaataaatgctggaaatcttgacctctccttgggattatgggtgtaacaaaaatccctacatctgtttatgaaggccatattcagtacattttaaatggtaaataatctgtttatgtgaagaaaaagaattaagtctttcttccaactctctccttggatagcctagcacagtgcagcctccataaccatgacattcccgcccaagctctcagtgcctaatcctgctttgtcattcacatctcacaaaatcttgacatcttacattccaatacattatcaagcaagcacaagtatgctggtagtagcctctttaaataatatgtatagacaacaacaacgacaaaaaatagactgttttaaagtttcagggaaagttggtggctgatttaaagttgtgcaggaaacatcttctgtgtatgaagcaaatgtcgatgttttgaaaaaagctaggagatgactttgaatgaatgcaaggttagtgagatcctaagctctcaaaatagcatattccctagagctcaagaaagctggtccaggaggttgaaaaagctattttgttgttaaattattttctggcccttcttaatatttaaaaatgtatttccccttgtggctttcaaccacctgctcaaaaaaagagacttgttacatgaaagttttcattaaagagctgaaaacaagaatttagagagccattcctagaaaatgtcctactgccctgcatttgacaaacaagcatcctttactaacaagagcaggaattcagaggcacaagaaaaagcattggcatgagccaaagagtctgtcttaatgttacttttgaaaatctgctgagcggccaccatatgcaggctgagagctgggcacaggcgaagccattggaagcacttcaggaacaagcacacagctgtgggacttgaacatgcaagtgttcaggttgtgtcaagaagcttttctttccttctatgatggaatctgttcttttctatcctacttttttctctcttcctctcctcaccacattataccctgctcttacgcagtaaacgttttaatggcccgtttatgtctcatgcctccaaacaacactgaatttgaaaccccccattttttcttttcaccaccctgttgagcaattttcccaaaaaaagggcagcaattattaaattgaattcaagtaagccagccaaagataggtcctaaattgctagtcccagtagaaccacctgatcctaaaccagtgcgaaacaaacagtaacaatgtccccagctgacttcagctaagaaccaatggctcctacccccgccccgcttttttttgttgttttttgttttgttttgagacggagtcttgctctgtcccccaggctggagtgcactggcgcaatctcgggctcactgcaacctcctcctcctcccacattgaggcgattctcctgcctcagcctcccaagtagctgggattacaggcacccgccatcacacccagctaatttttttttttttttgtattattagtagaagccaggtttcaccatgttggccagggtggtctcgaactcctgacctcaagtgatccgtccacctcggccttgcaaattgctgggattacaggtgtgagccaccgtgccgagccagccccattttttaaatgatgttttggttaagagtggaccatgagaattagctgacagcatcccctttctctctccctgccttggtgggaccctccctgtgtgaccttggtcaagtcctcgaacttttgtcccgtatttaagatggagctgttttacctacttcataagacagttgcgaggtgccattgattcttgactgcaaaataccttgaaacccttatataaagactgaagtcaacggagcctagtgaaagacttactttgtggcttgtggttgaaagtcacatcaaaagacaaatgtggccacgttcaggaattggagacttactggcatggctctacagctgctcagttattaatcatgcagactaacctgtcaacactgggagatgcaacatagcaaaaggacagagaaattagaattttttgtgcagaaagccctaaattcccacctgaatgtaacttacagctcccttacctactctcacacatgccctcaaacatgctagattggcttatacataggccaacacaaaatacaaacgtgacgtgttcatgtagcctagtggctatatgcctattctccatgtaccctgcatggtagtgctgcaaactttaaagtacatttctttcacagcagtattttttttcataagtggcatataaatgtcattcaatgaaatggggaaatcacgttgagaagttggtctgtcatctcccattgagcaaagactggcaggagataataaaaataaatatgggcacacatgtattaatatacagcacgcatttacaagtttattttccagataaaattgtgctataagaacagctctaccaagacagtctgcaccatttccaagtctcagttaatttacagcaactgctgctttcggagatggctgtgaaaatatggaagttcctctcaagtaggccaagaaacagttctagattttactaagttttattttgtcaggttttttaaattttttcagtgagcgtggtgactgcagaggttagtgctgtgaaaagctgggctaaatattctttctgtaaagtcaaacaggattccatcccctgtgaaataacacaaaatttcactctctaaaagcaacagcatgtaaactagaatgaaagaaggaaattatgtacgtatgcctaatattctttgtgaatgtctttcatttaactaaaattatattagaaaccagattgataaataaaaaattcaaagtagttttaattatcct

SEQ ID NO: 13279 - DNA, 5757 bp, Homo sapiens
atcaccctctggacaagagaacgggcgagcgggagctaggagggaagagtggagaggaccggcgaggcgcgccagccggagccacctccttcccggccgccccctccccactccccctacacacacacgctcgctcgctcgccggcgcgcgcacaccccccgcgccggacccgcacctcggcgggcgccacacactcggcagcccgagccgcggtagccgcagcgggatggaggcggcgcgcacggagcgccccgcaggcaggccgggggcgccgcttgtccggacggggctcctactcttgtcgacgtgggtcctggccggcgccgagatcacttgggacgcgacaggcggtcccggacgcccggcggccccggcttcgcggccaccggcgttgtctccactctcgccgcgggcagtggccagccagtggccggaggagctggcgtcggcgcggagagccgccgtgctggggcgccgggccggaccagagctgctgccccagcagggcggcggcagaggcggtgagatgcaggtggaagccggagggacatcaccggcaggcgagcggcggggccggggcatcccagctcctgccaagcttggcggcgcgaggaggagtcgccgggcgcagcccccaatcacccaggaacgcggggacgcctgggccactgctccggccgatggttccagaggaagccgtccccttgctaagggttcccgggaggaggtgaaggcgccgcgggctggggggtcggcggctgaagacctccggctgcccagcacctccttcgcgctgaccggggactcggcccacaaccaagccatggtgcactggtcgggacacaacagcagcgtcatacttatcctgacgaagctgtatgacttcaacctgggcagcgtgactgagagttcactatggaggtcgacagattatggcaccacctatgaaaagctgaatgacaaagtgggtttgaagactgtcctcagttacctctatgtcaatccaaccaacaaaaggaagattatgcttctcagtgatcctgagatggagagcagcatattgatcagctcagacgaaggggcgacctatcagaagtatcggctcaccttctatatccagagcctgctctttcatcccaagcaagaggactgggtgctggcctacagtttggatcaaaagctctacagctccatggactttggaagacggtggcaactcatgcatgaacgcatcacacccaacaggttttattggtcggtggccggattggataaggaggcggacctggtgcacatggaggtgcggaccacggatggatatgctcactacctcacctgcaggatccaggaatgtgccgagacaactagaagtgggccttttgcccgctccattgacatcagttccctggttgtccaggatgaatatatcttcattcaggtaacaactagtggaagagccagctactacgtgtcttatcgaagagaggcctttgctcagataaagctgcctaagtactcgttgccaaaggacatgcacatcatcagtacagacgagaaccaagtatttgctgcggtccaagaatggaaccagaatgacacgtacaacctctacatctcagacacgcgtgggatttacttcactctggccatggagaacatcaagagcagcagaggtctaatggggaacatcattattgaattgtatgaggtagcaggtatcaaagggatatttctggcaaacaagaaggtggacgaccaggtgaagacatacatcacttacaacaaaggcagggattggcgcctgctgcaagctccggatgtggacctgagaggaagcccagtgcactgcctgctgcccttctgttccttacatctgcacctgcaactctctgaaaatccatattcctcaggaagaatctctagcaaggagacagccccaggacttgtggtggctacaggcaacattggcccggagctctcatatactgatattggtgtgttcatctcctccgatgggggcaacacatggagacagatctttgatgaagagtacaatgtctggttcctagactggggtggtgccctcgtggccatgaaacacacacctctgccagtcaggcatttgtgggtgagttttgatgagggccactcttgggacaagtatggtttcacttcggttcctctctttgttgacggggctctggtggaggcaggaatggagacccacatcatgacagtttttggccacttcagcctccgctccgaatggcaattggtgaaagtggactacaaatctatcttcagccggcattgcaccaaggaggactatcagacctggcacctgctcaatcagggagagccttgtgtcatgggagaaaggaaaatattcaagaaacgtaagccaggagctcagtgtgccctgggccgagaccactcaggatcagtggtctcagaaccctgtgtctgtgccaattgggacttcgagtgtgactatgggtatgagagacatggggagagccagtgtgtcccagctttctggtacaatccagcatccccatcaaaggactgcagccttggtcaaagctaccttaacagcactgggtatcggcggattgtgtccaacaactgcacagatgggctaagggagaagtacaccgccaaggcccagatgtgccctggaaaagcccctcggggcctccatgtggtgacgaccgatgggcggctggtggcagagcaggggcacaatgcaactttcatcatcctcatggaggagggtgatctacaaaggacaaacatccagcttgactttggggatgggattgctgtgtcctacgcaaacttcagccccatcgaggacggcatcaagcacgtgtataagagtgcggggatcttccaggtgacagcctatgcagagaacaaccttggctcagacacagctgtcctcttcctgcatgtggtttgtcctgtggagcatgttcatctccgagttccatttgttgccataagaaataaggaggtcaacatcagtgcagtcgtgtggcccagtcaactggggacccttacctatttctggtggttcggcaatagcacaaagcctctcatcactttggacagcagcatttccttcacattccttgcagaaggaaccgacaccatcacagtccaggtggctgctgggaatgccctcatccaggacacaaaagagattgcagttcatgaatatttccagtcccagcttttatcattctctcctaatctggattaccacaatcctgacattcctgagtggagaaaagatattggcaatgtcatcaagcgagctctggttaaagtaaccagtgtcccagaggaccagatcctcattgccgtgtttcctggtctccccacttcagcagagcttttcattcttccacccaagaacctgacagagaggaggaaaggcaatgaaggggacctggaacaaattgtagaaacactgtttaatgctctcaaccaaaatttggtccagtttgagctgaagccgggggtacaagtcattgtgtatgtcacacagctgacgttagctccattggtggactccagtgctgggcacagcagctcagccatgcttatgctattatcagtggtatttgttggcctggctgtgtttttgatctacaagtttaaaaggaaaatcccttggattaacatctatgctcaagtccaacacgacaaggagcaggagatgattgggtcagtgagccaaagtgaaaacgcccccaaaatcacactcagtgactttacggagcctgaggagctgctggacaaagagctggacacgcgggtcataggaggcattgccactattgcaaacagcgaaagcacaaaggagatccccaactgcactagtgtttaataccagcaagccacgtggtcaaccacctttctgactttttatttttgatgattactattactattattatggaaaaattaaaatgtcttttttaccttttgtttaccaagggccccttcataaatagcaggcaaatgcctagctttgggagaaaagggcattcttagctgattgaaatgagacaaagggaataaatggctgtatttgtgctaagagcaaaggatgcatcttcccacagcctcctcgctttactctgccattggtagcttaaagactttctttttccttgtggtctcccttttttcaaaattgaagttgggttggctctttgtgaacctctcatccccacagcagaatcaccaacactctccgcttcccccagcacacacacatacaacacagatcatttcccagttagatccgcaggaagtaggttggtgggggtggatgtagctgcagaaagcatgcacaactttgtgaaagaggccctgccttgtgcatgtccatagtgaggctacagatggcttattgtatataattacaatgtaaatagctttttatttcctaagaaataatttaatgtttagtaaaaaagaaaacagaaaaaagaaagatgcgtgtgttggcttacgcactggccctcagagctgaccaacccgccaggcctgctcaatgcattgggtttggatgctctcctgttgtctgtcacacttaactcttgcatctccttgtccatgccatagctggtttctacttatgtatataaaggggggtggggggaggggcttctctggggcaattgataaaggaaggactctagtgacatcatagaacatggcagtcgtttttgttccaagaatgatatgaaaggtgaagaagaggcccactagaggcttcatactgagacccagatgggggaaaacagcttcctctctaaaaggaaaaacttgatatttatcagtctgagaaaatatttttttctaaagaaggcagtcagtggatcttaaaatgacaatctgtttttaaattggattctatgaaaatgcataatgcttatggtgaattctcaggctattctgagctcagaaaagtcccctgggcactaggtaaagcccagtgaatgtctcttggcatgggaggagttaaagaggttggaagggaagaggcatttgtggaattatgagttcatgcaaaactctccaggccaagtaggggtctagcctttaatgatattagtcaaaggcaattttagcaaagctgtgctatttgcttgtcagatgtacacaacttccttaaagtcaaatgtctgccttcagttcccttaaggtagttcttgcctctggggtgagtggctttcaaagccttttagcttttccagcacctcagccccttcacacatttacacataccaatttttttcaatagggtcacgttaagccatgctgtaagcattgtttttattttcaggcttagcctgagcacacttatttttgaaaatgatataatgtatatatatgggaggaaaggccacattttgtacctgttaatttttgtgggatgttgttcccattcttctttgtgagacagagagaatgtgatatagagaaatctggctggctacagtgtagatcagtattaggaatatttctaaagatcctgcttttttgtttcaagggttaaatggggcagacaattgcaatacttgtactaaacactggaatacaaatgcatgactcatatctatatatacagtatatgtacatatactgttcttggttttattgttccacttgaatatttctactgtaaaaaaaagacagtggttttgaaattgttgaaaataaatgtatttttgtacatc

SEQ ID NO: 13280 - DNA, 8787 bp, Homo sapiens
ggcgggtgcttctagggcgctcccagagccgcctccccctgttgctggcatcccgagcttcctcccttgccagccaggacgctgccgacttgtctttgcccgctgctccgcagacggggctgcaaagctgcaactaatggtgttggcctccctgcccacctgtggaagcaactgcgctgattgatgcgccacagacttttttcccctcgacctcgccggcgtcccctcccacagatccagcatcacccagtgaatgtacattagggtggtttcccccccagcttcgggctttgtttgggtttgattgtgtttggctcttcgctaagctgatttatgcagcagaagccccaccggctggagagaaacaaaagctcttttctttgtcccggagcaggctgcggagcccttgcagagccctctctccagtcgccgccggggcccttggccgtcgaaggaggtgcttctcgcggagaccgcgggacccgccgtgccgagccgggagggccgcaggggccctgagatgccgagcggtgcccgggcccgcttacctgcaccgcttgctccgagccgcggggtccgcctgctaggcctgcggaaaacgtcctagcgacactcggcccgcgggccccgaggtgcgcccgggaggcgcgagcccgcgtccggaaggcagtcaggcggcgggcgcggggcgggctgttttgcattatgtgcggctcggccctggctttttttaccgctgcatttgtctgcctgcaaaacgaccggcgaggtcccgcctcgttcctctgggcagcctgggtgttttcacttgttcttggactgggccaaggtgaagacaatagatgtgcatcttcaaatgcagcatcctgtgccaggtgccttgcgctgggtccagaatgtggatggtgtgttcaagaggatttcatttcaggtggatcaagaagtgaacgttgtgatattgtttccaatttaataagcaaaggctgctcagttgattcaatagaatacccatctgtgcatgttataatacccactgaaaatgaaattaatacccaggtgacaccaggagaagtgtctatccagctgcgtccaggagccgaagctaattttatgctgaaagttcatcctctgaagaaatatcctgtggatctttattatcttgttgatgtctcagcatcaatgcacaataatatagaaaaattaaattccgttggaaacgatttatctagaaaaatggcatttttctcccgtgactttcgtcttggatttggctcatacgttgataaaacagtttcaccatacattagcatccaccccgaaaggattcataatcaatgcagtgactacaatttagactgcatgcctccccatggatacatccatgtgctgtctttgacagagaacatcactgagtttgagaaagcagttcatagacagaagatctctggaaacatagatacaccagaaggaggttttgacgccatgcttcaggcagctgtctgtgaaagtcatatcggatggcgaaaagaggctaaaagattgctgctggtgatgacagatcagacgtctcatctcgctcttgatagcaaattggcaggcatagtggtgcccaatgacggaaactgtcatctgaaaaacaacgtctatgtcaaatcgacaaccatggaacacccctcactaggccaactttcagagaaattaatagacaacaacattaatgtcatctttgcagttcaaggaaaacaatttcattggtataaggatcttctacccctcttgccaggcaccattgctggtgaaatagaatcaaaggctgcaaacctcaataatttggtagtggaagcctatcagaagctcatttcagaagtgaaagttcaggtggaaaaccaggtacaaggcatctattttaacattaccgccatctgtccagatgggtccagaaagccaggcatggaaggatgcagaaacgtgacgagcaatgatgaagttcttttcaatgtaacagttacaatgaaaaaatgtgatgtcacaggaggaaaaaactatgcaataatcaaacctattggttttaatgaaaccgctaaaattcatatacacagaaactgcagctgtcagtgtgaggacaacagaggacctaaaggaaagtgtgtagatgaaacttttctagattccaagtgtttccagtgtgatgagaataaatgtcattttgatgaagatcagttttcttctgagagttgcaagtcacacaaggatcagcctgtttgcagtggtcgaggagtttgtgtttgtgggaaatgttcatgtcacaaaattaagcttggaaaagtgtatggaaaatactgtgaaaaggatgacttttcttgtccatatcaccatggaaatctgtgtgctgggcatggagagtgtgaagcaggcagatgccaatgcttcagtggctgggaaggtgatcgatgccagtgcccttcagcagcagcccagcactgtgtcaattcaaagggccaagtgtgcagtggaagaggcacgtgtgtgtgtggaaggtgtgagtgcaccgatcccaggagcatcggccgcttctgtgaacactgccccacctgttatacagcctgcaaggaaaactggaattgtatgcaatgccttcaccctcacaatttgtctcaggctatacttgatcagtgcaaaacctcatgtgctctcatggaacaacagcattatgtcgaccaaacttcagaatgtttctccagcccaagctacttgagaatatttttcatcattttcatagttacattcttgattgggttgcttaaagtcctgatcattagacaggtgatactacaatggaatagtaataaaattaagtcctcatcagattacagagtgtcagcctcaaaaaaggataagttgattctgcaaagtgtttgcacaagagcagtcacctaccgacgtgagaagcctgaagaaataaaaatggatatcagcaaattaaatgctcatgaaactttcaggtgcaacttctaaaaaaagatttttaaacacttaatgggaaactggaattgttaataattgctcctaaagattataattttaaaagtcacaggaggagacaaattgctcacggtcatgccagttgctggttgtacactcgaacgaagactgacaagtatcctcatcatgatgtgactcacatagctgctgactttttcagagaaaaatgtgtcttactactgtttgagactagtgtcgttgtagcactttactgtaatatataacttatttagatcagcatagaatgtagatcctctgaagagcactgattacactttacaggtacctgttatccctacgcttcccagagagaacaatgctgtgagagagtttagcattgtgtcactacaagggtacagtaatccctgcactggacatgtgaggaaaaaaataatctggcaagtatattctaaggttgccaaacacttcaacagttggtggttgaatagacaagaacagctagatgaataaatgattcgtgtttcactctttcaagaggtgaacagatacaaccttaatcttaaaagattattgctttttaaagtgtgtagttttatgcatgtgtgtttatggtttgcttatttttgcaagatggatactaattccagcattctctcctctttgcctttatgttttgttttcttttttacaggataagtttatgtatgtcacagatgactggattaattaagtgctaagttactactgccataaaaaactaataatacaatgtcactttatcagaatactagttttaaaagctgaatgttaataggggacactgtaaagtatcatcaaaacctgaatagcttcattgtgcacaagtgtggagttttgtatcctcttacctggtaaactgaagggattgtttggccatttcatttatcttatcattaattcacaagatagttagaaattctgcctcaagcaaagtaccacattttgaatgttttcttagattttgattgcaagtagatatcagcattttttaaatgaaaagctatattatcttctcccttcaaggcagcctaaggatgttctttcccagaatcactccaacccttcttgccagaattcataaaagtacaaaattggagaatagatgatatcttagaaataagctttttttttttttttttttttttttgagacggagtttcactcttgtcacccaggctgaagtgcaatggcgcaattagggttcactgcaacctctgcctcccgggttcaagcagttctcctgcctcagcctcctgagtagctgggattacaggcatccaccaccgtgcccagctaatttttgtatttttagtagagacggggttttgccatgttggacaggttgatctcaaactcctgacctcaggtgatctaccctcctcggcctcccagagtgttgggattacaggcatgagccaccatgccaggctgctaattctcctttttagtgagttagggaactgagcctcagaaaacttaaacgatttctcagaaaacactcaagtgataaagtggccacattggaaaggagtttttatcttctcattgtcaggccagtgttcattgcacaatatcatgctacctcttgaatctttaaaatattcaattggcaaatgtttttcaatgtgatttactcatgtcttaagtgtatgaggaaagttcaaagcaaaatagaaaggaataattcaaactgaattgtccataatcagcttccagtctttcatgctaatcagcttcttaagagactgaagtatggcatacctacaggggaattccttcgcaccatagcctgtatgaacagtgttccctggagttctccagtgctcagcttgagaccttgatacacgggccatgagccctgtcttccccaatggaaatttatttacacttaccttatccctatggacttagtctgattttattggctaggagtctaacagtcctgtgtggatatacagttttgcccatgacaacaaaggaatctatccgaaatatctttttttttataataaacttccaagatttgctgtcttccagcacttgagttaaagtactagatactgcattttgatgaagactaaccccatctcatattctaccctaaagagaactgaaaaacctataataagttgttctggagccaataaacacagcagctctgttagatgtcctctacagccaagcactttcaatgctaacttgaactgcatttccttcctcaaatgagagattgacataattcagtactgtgagtcacttgtataagaaacctttgatcactaaaaataatgtaaaaattgggtttagtagcctaatacacataacgttcttcttaaaaaggaaaatggatggatgcctgacaaccctccaaaagaaaaaagtgtaagatagccattaagatgatgacaatttttgaaatgaacattatgatatttatgaacaataaacaaatttccgtatggaatgaattatccaaaaagagtataacaaaatgaaatccttaaaaatccagagtttatattttttttataccctcacttgtttgcactaactttatagtggaccaaggctgttaccataggaagggacaaacttccttgtaggcaactcagtgttagacgatgattgtggttatgcttgcaaagtcttgtgcttatcttttttgtttttacttaaaaagctaatttttaaagattgtagggcttgtattttacttgaataattgatatcttcctgtgtaatgatttgtgagatgagaattaatatttgactagttagaattaattaaatggtaagggaacacagggtactcttaggttaaataatgtatgcaaatagagtctattttcaactaatatggccacaggagccttttgagattcattgatattaaacacaattaatgaaattttaaattgttaacagaattgagaacttgaacaacacttttagtactgcagcatttttgtgccctaaagtatgtaatgatttataaatgtgccatacatacactacaacataacatttgctttgttatgcattttatttctctggggacaccattgcactgcagtgcacacgtatttataaacatttgttatatttttggaaacttgctaatatttattaagtcatagacttttctggaggacttaaaaattcactaaaaatctgattatgtcttaaatgttcagtttatctttggtttattaaaataaaaaaaaaatctaagattaaacacagtagatatctctggaggcaattttccaaaactcaacattaaaatttgtggatgcatgagatgcaatccttcaaagaatgaatctgaaatatatttttaatatttacttaatatccactgaagatatctttatgcaagacaagagtcagccatcagacactgaaatatattatgatagattatgaagaattttctctgtagaattatattcttcctggaacctggtagagtagattagactcaaaggctttttcttccttttcttactcctgttttttccactcactcttcccaagagatttcctaaagcttcaagcttaataagcctaatagtgaaaaataactgaatttaatggtataatgaagttcttcatttccagacatctttaattgatcttaaagctcatttgagtctttgcccctgaacaaagacagacccattaaaatctaagaattctaaattttcacaactgtttgagcttcttttcattttgaaggatttggaatatatatgttttcataaaagtatcaagtgaaatatagttacatgggagctcaatcatgtgcagattgcattctgttatgttgactcaatatttaatttacaactatccttatttatattgacctcaagaactccattttatgcaatgcagaccactgagatatagctaacattctttcaaataattttccttttcttttataattcctctatagcaaatttttatgtataactgattatacatatccatatttatatttcattgattccaagacatcactttttcaatttaacatctctgaaattgtgacatttcttgcaactgttggcacttcagatgcagtgtttaaaattatgcttgaataaatattacactaatccaactttacctaaatgtttatgcatctaggcaaattttgttttcttataaagatttgagagcccatttatgacaaaatatgaaggcgaaatttaaggacaactgagtcacgcacaactcaacatggagcctaactgattatcagctcagatcccgcatatcttgagtttacaaaagctctttcaggtccccatttatactttacgtgagtgcgaatgatttcagcaaaccctaacttaactaacaagaatgggtaggtatgtctacgtttcattaacaaatttttattatttttattctattatatgagatccttttatattatcatctcacttttaaacaaaattaactggaaaaatattacatggaactgtcatagttaggttttgcagcatcttacatgtcttgtatcaatggcaggagaaaaatatgataaaaacaatcagtgctgtgaaaaacaactttcttctagagtcctcttactttttattcttctttatcatttgtgggtttttcccccttggctctgatcactttaacttcaagcttatgtaacgactgttataaaactgcatatttaaattatttgaattatatgaaataattgttcagctatctgggcagctgttaatgtaaacctgagagtaataacactactcttttatctacctggaatacttttctgcataaaatttatctttgtaagctaactctattaatcaggtttcttctagcctctgcaacctacttcagttagaattgtctaatactgctctattaatcaggtttctagcctctacaacctacttcagttaaaattgtctaatacagcaatatttaaaaaaaaaacactgcaattgtcaaggatggaaaatgtgtgatttgtgtaaacaatttttaccaactttacattttcctacagataaatgtgaaattttgataagaagtctacgcaatgacaagtatggtacataaattttattaagaatattgagtataaagtactttaattctaaattataagaaaatatacatttgcacatattaatatagaaattcattttgtgtatatttaacatagcttttaaactattttacattagctacttcattatggtttcttgaacttctgaaaaaaattagaaatgtattaaacttatcagtaacataaaaacttattttgtttcacctaacgaatactgcgtttgtaaaaataaatttaatatagaatatatttttaaattaaatatttgaatataaaatagctctaagaaagaagcaaattatcactgaacatatttcttattatttctggctttgaattatacgtaacttaaattgtcttaaatgatacagaatattggagaatatgatactttcacataatatactatgaacctgttcatataactctgattgactactaacttctgttttatgtatttattaaagagctgacactgtagtttgtggtgagatgtttatttttctaacagagcttataacagttaggacaaggcatttaattaatgcatcattctgtttagtagtaggtgttaatcaatatgaaattctctgttttaaaataaaaatgtaaaaatctaagaataaaaaaaaaaa

SEQ ID NO: 13281 - DNA, 3785 bp, Homo sapiens
acagaaggaagagcgcgaaattgcccaggatggacactttcaaaggggccccagcggctaagtgactctcagggaaggtggccttgccatcccaacttctatttaggggcaaccactagcaagttcttctcttcgggcaattggaaagagttcctataagcaaagtggaggtgatgtggacccctggaaaatttccttgccccgtttgaactttgcaatgattcactgcaagtcatgtccacgtggaaagcaagactcaccaaaagactgaagtctccctctagaagcatgcatccatttccgtgctcagctctgctcgcctgttttgggaatacgagggagagtgcttccttcaatcagtccggcgtggctgatactcattccaccgtccgtgtgcagcctgtggccaaagcaggcagacagccaagacacccaagcgcagaaggagctccagagaaaaggcaagattcgagcacccatgcagagagaaatggcagtgcgaatcggaattcaagtcaccgcactgcggcccagcccgcggagacgcctgaagatgtgcccgggtccctggatgatggggcggactgtgaagcagtggtgtttcacgcttccatccccagaccatcaattattgacacgcccaaggaagaagaatttcgagaagaacctaaatgcctcgagctggagcagaaaatgacatcagacagcccacctgaggatattgaccataaggactcatatctcattacaagaagcatcatggccgagccagactacatagaagatgacaatcctgaactcattaggcctcagaaactgatcaatcctgtaaaaacctcccggaaccatcaagatcttcacagagaacttcttatgaatcaaaaaaggggtcttgctcctcagaacaaaccagaattgcagaaggtgatggaaaaaagaaaacgagaccaagtaataaagcagaaggaagaagaagcacagaagaagaaatctgacttggaaatagagctattaaaacggcagcagaagttggagcagcttgaacttgagaagcagaaattgcaagaagagcaagaaaatgcccccgagtttgtgaaggtgaaaggcaatctcaggagaacaggccaagaagtcgcccaagcccaggagtcctaggctgaggctgcaccaagacctcgtgtgtcaccccacagagctgtctgtgggtgccttctcaatctcagggcaatagcccctggagaatatttcagccagcagagaattttgacttgcagtaggatttggtttgattttcctacgatctgggtggatgccttgcctgtgacagttgcagttcctattcgccaaatgaagggcagtgccccgcacgtaagttggaatgatggacctgtgttcagagacttaacagaaccaacaagcaaaacaagtgagaacaggaaaaaggaagaggacactggaatcaattcttgagagttgcactacttggtttttcttccattccaagtttcgtgggacccagagccttttttcttttaaaagctaaaaaacaagtgtttaattcctctttttgttatctgttagataattgagatcacctagaaatgcgtttaatctgttcactcactgtaaattttgaggacccagaattgtcttgtttaatttatactttcacccctgttgcagttaacaccagagaaggaacgtgaatgtcgagcacagccactacccttgttggcacttaatttagaaatagggtgagaagtttaaaagcccatcttgattttattttcattccttttggttctctgtgtaataatagcaggctacatagtgacattccagttccaagaaggtacatcctgtccattcattaattgctttgattactaggagggtttctgttcagttttgtttttaaatgtcttgctgatctagttctttcagatggaataaccttccagtcccttagagagtggaactagtccatataacccagcttcagtagcaaaagtagaagccgccacatcttttcatttctccaagaggagagtggggaaggttcccatgaccagctgggcagtcaggatttctctaggcattctaatgtgaaataagtgtagactgctgtcaaggaggcttcatcagaagatgtatagcatttgaatgtctaatgataatgcatatcattagaatccaagctttgaaaatttctgattaatgctcatgtatttctttatctttgtttttccttgtgaagaaagactttcaccactgtctgagtgatgatgctgttgataaggatgatgtcgatgactactatattgcatctctcaggaacagctgatgggaagggaggggctgctgagttcccttgttctagctagcagcacgctcctcagagagggggccgagttacagacagcagccgcattctcatgcaaaattagttttaaactgctagtgtgggcatcggtaccttttgcctgggtgataccgaagaattgttgaggatttagtatgctccgtagagacagttcagccagtcatttctgcattggagagacttctcatactttctttgaagactcatagaaagctggatctagagctcttgaatccttaattagcacagtagaaattagctttctatgggaatgctttagtgttagcagttgacaattaggcccatattcaatctgaatgggaacaaaagtaaatgcaatgataatatactgctagttagagaaacatgttagttgattatacctgaaatggattatttatctcatcagcaagtattatttgaataaaatgagaaatgcttaagaaaaattgttgctctacagtaatttggtttcgaagaatggaatggtaactattttttcccatcgttcttttgagagaaggaagtgtgatgactgatgatcttgaaaagcccatttctgattgcacgttgactggaattctttctttgtgtctgtggactagcgatgctgtttgtaaaatgaagattcgggactggctcatatctttttatctaactagatgtcagatcttgaaatctgtattctcgaagcaattctgccacttgatcgtattcacaggggccctggtaggctcctttagaaggaccatttctgttcctagagcttaactagaattcattcttcactgaaaaaaaaaaaagttacttaagaaagcatttctttcctaatctcactcaaatctgcagaattatttgtaattagtaatacaaaatctggccaaaaggagacttgtaaatagcgtaaagtggtgtcttatgctaaacggtggaatgtataggcagagaagctctttgaagttgtcagatgagctgggctcacaagcctgattcaaacaggctgtcggtctcctctcaccccttaatactgtgcagcccaaactcctaggactcttgaacatctgagcagttttgtgctttgagccactttttgacaaaaatggctccatttttccacagcgtggttttcttaaaatagtttaatgttttatagtctcatagtagtagtgttgctttctaagctataacagtcgaccttattcttctactctgaaaaatcttgacttgtttgagtgtatataatatatataaagggagccttaatggattggttttcataatttaatattttttgtatttgctcttgtataattgtttttaacggaaagtattaaagaattgagggtggaattcttagaaccaaagttattcttaataaaaatcaccacatgcttggaccatg

SEQ ID NO: 13282 - DNA, 1216 bp, Homo sapiens
ccgcgaccccgccttcggcgctcggctcgcaggatggatcccgtacccgggacagactcggcgccgctggctggcctggcctggtcgtcggcctctgcacccccgccgcgggggttcagcgcgatctcctgcaccgtcgagggggcacccgccagctttggcaagagcttcgcgcagaaatctggctacttcctgtgccttagttctctgggcagcctagagaacccgcaggagaacgtggtggccgatatccagatcgtggtggacaagagccccctgccgctgggcttctcccccgtctgcgaccccatggattccaaggcctctgtgtccaagaagaaacgcatgtgtgtgaagctgttgcccctgggagccacggacacggctgtgtttgatgtccggctgagtgggaagaccaagacagtgcctggataccttcgaataggggacatgggcggctttgccatctggtgcaagaaggccaaggccccgaggccagtgcccaagccccgaggtctcagccgggacatgcagggcctctctctggatgcagccagccagccaagtaagggcggcctcctggagcggacagcgtcaaggctgggctctcgggcatccactctgcggaggaatgactccatctacgaggcctccagcctctatggcatctcagccatggatggggttcccttcacactccacccacgatttgagggcaagagctgcagccccctggccttctctgcttttggggacctgaccatcaagtctctggcggacattgaggaggagtataactacggcttcgtggtggagaagaccgcggctgcccgcctgccccccagcgtctcatagtccctcacccttccgcggaaagagcccccttactccacctccccgccagcctggggccaccccccctcactgcatcctggggccacccccactcactgcatcctgggaaccttcgccctgcaaggcgtttgctatcttcagccactgggcggagctgcagccctggaggagggggcgggtcgaggctgcgtggtgatggggtctccgcccccacgccctgccgggcagggctggagctggacagaagccagtgcctttaagtcatttgtgtcaaaaccctctggggtccggaggctgtgcgggtgtcctcctggcaataaacactacccggttctcgcaaaaaaaaaaaaaaaaaaaaaaa

SEQ ID NO: 13283 - DNA, 6145 bp, Homo sapiens
gctcctggcaccgccagctgctacttggccctcgccggtggcccaccaggacaatgcccccccgcagccatctcatgcccatcgccactgccctggggcagctgaactgagcgtatgtgccacgccgcccaggagacccctctgctgcaccacttcatggcccccgtgatggctcgctggcctcccttcggcctctgcctcctcctgctgctgctgtccccaccgccactgcccttgacaggggcccatcgcttctccgcacctaataccactctcaaccacttggcactggcacctggccgaggcacactctatgtcggcgcagtgaaccgcctcttccagctcagccccgagctgcagctcgaggccgtggctgtcactggccctgtaatcgacagccctgactgcgtgcccttccgtgacccagccgagtgcccacaggcccagctcactgacaatgccaaccagctgctgctggtgagcagccgcgcccaggagctggtggcctgcgggcaggtgcggcagggcgtgtgtgagacacggcgccttggggatgtggccgaggtgctgtaccaggctgaggaccctggtgacgggcagtttgtggctgccaataccccgggagtggcaacggtggggctggtggtgcccttgcccggccgggacctcctgcttgtggccagaggcctggcgggcaagctgtcggcaggggtgccacccctggccatccgccagctggccgggtctcagcccttctccagcgagggcctgggccgcctggtggtgggcgacttctccgactacaacaacagctacgtcggggcctttgccgacgcccgctccgcctacttcgtgttccgccgccgcggggcccgggcccaggctgagtaccgctcctacgtggcccgcgtctgcctgggggacaccaacctgtactcctacgtggaggtccccctcgcctgccagggccagggcctcatccaggccgccttccttgccccgggcaccttgctaggggtgtttgccgcgggcccaaggggcacccaggcggcgctctgtgccttccccatggtggagctgggtgccagcatggagcaggcccggagactctgctacacggcgggcggccggggccccagcggcgcagaggaagccaccgtggagtacggcgtcacgtcgcgctgcgtcaccctgccccttgattcccccgagtcgtacccctgtggcgacgagcacacccccagccccattgctggccgccagcccctggaggtccagcctctgctgaagctcgggcagccggtcagcgccgtggcagctctccaggcagatgggcacatgatagccttcctgggggacacccagggccagctgtacaaggtctttctccacggctcccagggccaggtttaccactcccagcaagtggggcctccaggctcagccatcagcccagacctgctgctggacagcagtggcagtcacctctatgtcctgactgcccaccaggtggaccggatacctgtggcagcctgcccccagttccctgactgtgccagctgcctccaggcccaggacccgctgtgtggctggtgtgtcctccagggcaggtgtacccggaagggccagtgcgggcgggcaggccagctgaaccagtggctgtggagttatgaggaggacagccactgcctgcacatccagagcctgctgccgggccaccacccccgccaggagcagggccaggtcactttgtctgtcccccggctgcccatcctggatgcagatgaatacttccattgtgcgttcggggactatgacagcttggctcatgtggaagggccccacgtggcctgtgtcacccctccccaagaccaggtgccacttaaccctccaggcacagaccacgtcactgtgcccctggccctgatgttcgaggacgtgactgtggctgccaccaacttctccttttatgactgcagtgccgtccaggccttggaggcggctgccccgtgtcgcgcttgcgtgggcagcatctggcggtgtcactggtgcccgcagagtagccactgcgtgtacggagagcactgcccagagggcgagaggaccatctacagcgcccaggaggtggacatccaggtgcgtggcccaggggcttgcccacaggtcgaaggcctggcaggtccccacctggtgcctgtgggctgggagagccatttggccctacgcgtgcggaaccttcaacatttccgaggcctgcctgcctccttccactgctggctggagctgcctggagaacttcggggactgccggccaccctggaggagacagcaggggattcaggcctcatccactgccaggcccaccagttttatccctccatgtcccagcgggagctcccagtgcccatctacgtcacccagggtgaagcccagaggctggacaacacccatgctctttatgtgatcctgtacgactgcgccatgggccacccggactgcagccactgccaagcggccaacaggagcctgggctgcctgtggtgtgctgacggccagcctgcctgtcgctatgggcccttgtgcccgccgggggctgtggagctgctgtgtcctgcgcccagcattgatgcagtcgagcccctgaccggtccccctgagggaggcttggccctcaccatcctgggctccaacctgggccgggccttcgccgatgtgcagtacgccgtgagcgtggccagccggccctgcaaccctgagccctctctctaccgcacgtcggcccggattgtgtgtgtgacatctcctgcccccaatggcaccactgggcccgtccgggtggccattaagagccagccaccaggcatctcaagccagcacttcacctaccaggaccctgtcctgctgagcctgagtcctcgctggggcccccaggcagggggcacccagctcaccatccgaggtcagcacctccagacaggtggcaacaccagtgccttcgtgggtggccaaccctgtcccatcctggagccagtgtgtccggaggccatcgtgtgccgtaccaggccccaggctgccccaggagaagcagcggtccttgtggtctttggccatgcccagcgcacactgctcgccagccccttccgctacaccgccaacccccagcttgtagcggcggagcccagtgccagcttccgggggggtgggcgactgatccgtgtcaggggcaccggcctagacgtggtgcagcggcccctactgtctgtgtggctggaggctgacgcagaggtgcaggcttccagggcccagccccaggacccacagccaaggaggagctgtggagcccctgctgcggacccccaggcttgtatccagctcggtggggggctgctgcagtgctccaccgtctgctccgtcaactcgtccagcctcctcctgtgccggagccctgctgtaccagacagagcccacccgcagcgggtcttcttcaccctagacaacgtgcaagtggacttcgccagtgccagtgggggccagggcttcctgtaccagcccaacccccgcctggcacccctcagccgcgaggggcctgcccgcccctaccgcctcaagccaggccatgtcctggatgtggagggcgagggcctcaacctgggcatcagcaaggaggaggtgcgcgtgcacatcggccgcggcgagtgcctggtgaagacgctcacgcgcacccacctgtactgcgagccgcctgcgcacgccccgcagcctgccaatggctccggcctgccacagttcgtggtgcagatgggcaatgtgcagctggccctgggccctgtgcagtacgaggctgaacccccgctgtctgcctttcccgtggaggcccaggcaggcgtgggcatgggtgctgcagtgctgattgccgccgtgctcctcctcaccctcatgtacaggcacaagagcaagcaggccctgcgggactaccagaaggtgctagtgcagctggagagcctggagaccggcgtgggagaccagtgccgcaaggagttcacagacctcatgacggagatgaccgacctcagcagcgacctggagggcagcgggatccccttcctggactaccgcacctacgccgagcgcgccttcttccctggccatggcggttgcccgctgcagcccaagcctgaggggccaggggaggacggccactgtgccactgtgcgccagggcctcacgcagctctccaacctgctcaacagcaagctcttcctcctcacgctcatccacaccctggaggagcagcccagcttttcccagagggatcgctgccatgtggcttcgctgctgtcgctagcgctacacggcaagctggagtacctgacggacatcatgaggaccctgctgggtgacctggcggcccattacgtgcacaggaaccccaagctcatgctacgcaggacagagaccatggtggagaaactgctcaccaactggctgtccatctgcctgtacgccttcctgagggaggtggctggtgaaccactgtacatgctcttccgggccatccagtaccaggtggacaaaggccccgtggacgccgtgacaggcaaggccaaacggaccctgaatgatagccgcttgctgcgggaggacgtggagttccagcccctgacgctgatggtgctggtggggcccggggctggcggggccgcaggcagcagcgagatgcagcgcgtgccagcccgggtgctcgacacggacaccatcacccaggtcaaggagaaggtgttggaccaagtctacaagggcacccccttctcccagaggccctcagtgcatgccctagaccttgagtggcgctcaggcctggctggtcacctgaccctatcggacgaagacttgacctccgtgacccaaaaccactggaagagactcaacaccttgcaacactacaaggtcccagatggagcaacagtggggctcgtccctcagctgcaccgtggcagcaccatctcccagagcctggcccagaggtgccccttgggagagaacatacccacgctggaggatggcgaggaggggggggtgtgcctctggcacctggtgaaagccaccgaggagccagaaggggccaaggtgcggtgcagcagcctgcgggagcgcgagccagcaagggccaaggccattccggaaatctacctcacccgtctgctgtccatgaagggcacgctgcagaagtttgtggacgacaccttccaggccattctcagcgtgaaccggcccatccccatcgccgtcaagtacctgtttgaccttctggatgagctagcagagaagcacggcatcgaggacccagggaccctgcacatctggaagaccaacagtctgctgctgcggttctgggtgaatgccttgaagaacccacagctcatctttgatgtacgggtgtcggacaatgtggacgccatccttgctgtcatcgcccagaccttcattgactcctgtaccacctcggagcataaagtgggccgggattccccagtgaacaaactgctctacgcccgggagatcccacgctacaagcagatggtggagaggtactatgcggacattcgccagagctctccggcgagctaccaggagatgaactctgctttggctgagctctccgggaactacacttctgctccccactgtctggaggctctgcaagaactctacaaccacatccacaggtactatgatcagattatcagtgccctggaggaggaccctgtgggccagaagctgcagctggcctgccgcctgcagcaggtcgccgccctggtggaaaacaaagtgactgacctgtgagctctggctcagacagcagcaagccggatccaccaacaccgcagcgccttatgaccccggaaccgagccagccactgaggggagctggcagagcctgggggcacagggtgcaaagccaggcactgtgcccagcagtgggctccctgcctgccacctcccctgccagcccacccaccttccccccacctgagattgtttctaatttataaggatccccctccttccccctctccccattgtatttatttgcctgctggaaaatcacatccggaaataaaatagaaatatgtctttttatttt

SEQ ID NO: 13284 - DNA, 4312 bp, Homo sapiens
cgaccgcggcggctggaaccctgattgctgtccttcaacgtgttcattatgaagttattagtaatacttttgttttctggacttataactggttttagaagtgactcttcctctagtttgccacctaagttactactagtatcctttgatggcttcagagctgattatctgaagaactatgaatttcctcatctccagaattttatcaaagaaggtgttttggtagagcatgttaaaaatgtttttatcacaaaaacatttccaaaccactacagtattgtgacaggcttgtatgaagaaagccatggcattgtggctaattccatgtatgatgcagtcacaaagaaacacttttctgactctaatgacaaggatcctttttggtggaatgaggcagtacctatttgggtgaccaatcagcttcaggaaaacagatcaagtgctgctgctatgtggcctggtactgatgtacccattcacgataccatctcttcctattttatgaattacaactcctcagtgtcatttgaggaaagactaaataatattactatgtggctaaacaattcgaacccaccagtcacctttgcaacactatattgggaagaaccagatgcaagtggccacaaatacggacctgaagataaagaaaacatgagcagagtgttgaaaaaaatagatgatcttatcggtgacttagtccaaagactcaagatgttagggctatgggaaaatcttaatgtgatcattacaagtgatcatgggatgacccagtgttctcaggacagactgataaacctggattcctgcatcgatcattcatactacactcttatagatttgagcccagttgctgcaatacttcccaaaataaatagaacagaggtttataacaaactgaaaaactgtagccctcatatgaatgtttatctcaaagaagacattcctaacagattttattaccaacataatgatcgaattcagcccattattttggttgccgatgaaggctggacaattgtgctaaatgaatcatcacaaaaattaggtgaccatggttatgataattctttgcctagtatgcatccatttctagctgcccacggacctgcatttcacaaaggctacaagcatagcacaattaacattgtggatatttatccaatgatgtgccacatcctgggattaaaaccacatcccaataatgggacctttggtcatactaagtgcttgttagttgaccagtggtgcattaatctcccagaagccatcgcgattgttatcggttcactcttggtgttaaccatgctaacatgcctcataataatcatgcagaatagactttctgtacctcgtccattttctcgacttcagctacaagaagatgatgatgatcctttaattgggtgacatgtgctagggcttatacaaagtgtctttgattaatcacaaaactaagaatacatccaaagaatagtgttgtaactatgaaaaagaatactttgaaagacaaagaacttagactaagcatgttaaaattattactttgttttccttgtgttttgtttcggtgcatttgctaataagataacgctgaccatagtaaaattgttagtaaatcattaggtaacatcttgtggtaggaaatcattaggtaacatcaatcctaactagaaatactaaaaatggcttttgagaaaaatacttcctctgcttgtattttgcgatgaagatgtgatacatctttaaatgaaaatataccaaaatttagtaggcatgtttttctaataaatttatatatttgtaaagaaaacaacagaaatctttatgcaatttgtgaattttgtatattagggaggaaaagcttcctatatttttatatttacctttaattagtttgtatctcaagtaccctcttgaggtaggaaatgctctgtgatggtaaataaaattggagcagacagaaaagatatagcaaatgaagaaatattttaaggaaacctatttgaaaaaaaaagcaaagaccatttgataaaagcctgagttgtcaccattatgtcttaagctgttagtcttaaagattattgttaaaaaattcagaagaaaagagagacaagtgctcttctctctatctatgcttaatgcctttatgtaagttacttagttgtttgcgtgtgcctgtgcaagtgtgtttgtgtgtggttgtgtggacattatgtgatttactatataaggaggtcagagatggactgtggccaggcttccacattcctgaagcacacagatctcaggaaaggttatttttgcacttcatatttgtttactttctcctaactcacaagttaaaatcataacttaatttcattaacttttatcatttaactctctcatgtttgttgtaacctgaggtatccaaatgctacagaaaaatttatgacccaaatacaaatctcaatttgactgggacagaatgaggaatggagatttttgtatttatctttgggactttatgccttactttttaggctatagaatagttaagaaattttaaacaaaatttagtatcttttggtctttcacaccattcatatgttaagtggcagaatagccttagtgctacctccactttttttctccagtatttgcatcacagaaataatccctctgtttaacatgtttgttcagagccaagggtttattgtgaagaactgtcatcctgcctttgctagctggtaccttctagtaatcaaaattaatatgaagaaactaggttgtgacagactagattatatttagtaggggaaaaattgggctcaagaaccattcatcagtacgtgagacaagcagttaatagtatgatctttaaagttttgacaatataaaataaacttggtaactgttttacaaatataaaagtataataaatatgcagcccagttaaatattgattatctgtgatggtaaagaacaacagtggtgccagtcatcaaacatacagtgcgtcctattgagtcactgctaatttcttgagcctggtatttgctgcctattgtatttgtggttgttgagaggcattttcaaaccctgtataaataatccatgctgttggtcataagttaactgtattaagaacagtaaaataaataaaaaccaatagtactaattttgctttaaaaaaatttctaatttttttcacataaaacaattatcctaaaggttaatagttgatcgaaacagaataatagaaaaattctactttaatttccattaaaaagcaaatagcattgacacatttaaagcttttcatttaaagtagtggatgtttttgaagtatctaaaatagtagcagaatattttatacttggtccttgcaatggtgtgagttttaatgattgcattatcgtgattggtggttatgagtttcagaaatctatacttggcatccaactcatgagtggattttatataggatggaacaggaaggtatgtcctgtcagtatcttaaccctttcaacaagacatttacctatttgtctttccttacgttctcaaaatattaactcgaattgtaaattaagcaaaaatttaaaaagtatatgttgatgggacaagaagaatagtatttatttaataaaacatatattatattgaactatgtgttaattcatttgtatcttttaaaaaattatcactgttaaagccattgactcctttagtacactgagaaaaatcttatagtaaaactagcctttcacattaaggttttggtgtgtattttgttaaataactaacatgctgctctattttctgggtgtagaaagtatttggctctaggaaacatttacttgtttgtgaaaacaataccccaaggtaataggaaaagtttgagttaagtgtttttaattcagtcagtgaattcagaataagtacattcatgtataacatagggacagttctgctgctgttatttatatgcaattcttctggtaaatagcaatagaataaaacatatttcaatgtttgtgtataggttttatattattattccactaggaatggcataagaatttatagataaattcttgtaacattaaaggattaaaatgtttttacattgtttttgggtgtctccttcttgtgcccatatctgataagctttatggattattgcatttaattccttttatttggagggttttacttccttgttaacatataaagttataaatgaaggacaaggaggagatggaaaatgtgtatttattgttaattcttaaaatagtgtgtaaataaaataacatcagtgtgcttt

SEQ ID NO: 13285 - DNA, 2782 bp, Homo sapiens
gcgacgccgagtttcactctggctgccttctcctgagagtcggagccacagccagagccctgcccaggccgagccggagctgcagcccgagcgcggtggtgccctcagccccgtcctcttgtcctcctcagcctcggtgccttggaatttgtgtcgctgagtcagcaagcctttcagatttgcccggtttttgttgtttgtggtttgtatcaagatgggaactcaaacaagtcattcctcctaaggagctggtgtcttcatccagaagggacagtttgtgccagctctccagagagaaaaggatctggtactgttctggagtggcctgtagcagacactgaaccaccagccagctgcatttgttgtcctggaagtcattgccaactctgccagtcacactggggtccccaaagaagtcaagatctgccggaggcgctgggcaatgaccccgggactccaggccagaggggtctgaagctgtttgggaaagcagcgggactccttgggaagatggccatggccccaagcccttccctggtgcaggtgtacaccagccccgcggctgtggccgtgtgggaatggcaggacgggctgggcacctggcacccctacagtgccaccgtctgcagcttcatcgagcagcagtttgtccagcagaagggccaacgttttgggcttgggagcctggcccacagcatccccttgggccaggcagacccctcgctggccccttacattattgacctccccagctggacccagttccgccaggacaccggcaccatgcgggctgtgcggagacacctgttcccccagcactcagcccctggccgaggtgtcgtctgggagtggctgagcgacgatggctcctggactgcctatgaagccagcgtctgtgactatctggagcagcaggtggccaggggcaaccagctcgtggacttggcccccctggggtacaactacactgtcaactacaccacccacacgcagaccaacaagacttccagcttttgccgcagcgtgcggcgccaagcagggccgccttacccggtgaccaccatcatcgctccgccgggccacacaggcgtcgcctgctcttgccaccagtgcctcagtggcagcagaactggccccgtgtcaggccgctaccgccactccatgaccaacctccctgcataccccgtcccccagcaccccccacacaggaccgcttctgtgtttgggacccaccaggcctttgcaccgtacaacaaaccctcactctccggggcccggtctgcgcccaggctgaacaccaccaacgcctggggcgcagctcctccttccctggggagccagcccctctaccgctccagcctctcccacctgggaccgcagcacctgcccccaggatcctccacctccggtgcagtcagtgcctccctccccagcggtccctcaagcagcccagggagcgtccctgccactgtgcccatgcagatgccaaagcccagcagagtccagcaggcgctcgcaggcatgacgagtgttctgatgtcagccattggactccctgtgtgtcttagccgcgcaccccagcccaccagccctcccgcctcccgtctggcttccaaaagtcacggctcagttaagagattgaggaaaatgtccgtgaaaggagcgaccccgaagccagagccagagccagagcaggtcataaaaaactacacggaagagctgaaagtgcccccagatgaggactgcatcatctgcatggagaagctgtccgcagcgtctggatacagcgatgtgactgacagcaaggcaatcgggtccctagctgtgggccacctcaccaagtgcagccatgccttccacctgctgtgcctcctggccatgtactgcaacggcaataaggatggaagtctgcagtgtccctcctgcaaaaccatctatggagagaagacggggacccagccccagggaaagatggaggtattacggttccagatgtcgctccccggccacgaggactgcgggaccatcctcatagtttacagcattccccatggtatccagggccctgagcaccccaatcccggaaagccgttcactgccagagggtttccccgccagtgctaccttccagacaacgcccagggccgcaaggtcctagagctcctgaaggtggcctggaagaggcggctcatcttcacagtgggcacgtccagcaccacgggtgagacggacaccgtggtatggaacgagatccaccacaagacagagatggaccgcaacattacgggccacggctatcccgaccccaactacctgcagaacgtgctggctgagctggctgcccagggggtgaccgaggactgcctggagcagcagtgacctcgcaccccagcacgcccgcctctggtggccaccccgctgccccatggctggctgggtggccaggcaggaagtgcccagcccgagaggctgggaggtttgttgagggtgtggggtgtgccccacctgaagccggggctccccctgcctgcctctctctcctcctcccctctgggaattgggcagccctgggcagttgtactcatgggggcttaggatgcagctacctcagtgcgcagggcccgtctgtcctctgggggctgcttcgggcccgcggtgctcggggcctggtgtggggcgagtagagacttccccagcctggacgggcgtgggttctgggtcagcttcttttacctcaattttgtttgcaataaatgctctatagccaaaaaaaaaaaaaaaa

SEQ ID NO: 13286 - DNA, 2445 bp, Homo sapiens
acctcgttcatctccttcacctccgaaatgatctcgcttttgggtttacggccggtctcttcacctggagcatcagccgggaaggtcagggtcgccctggctcgggcctgttcacattggggtcaaaggcacacattgggggctcaaccaaggcgagctgcgttcgcggggccgggtctttccgcacaggcggagggcggtggcgggcgcggaggcgtcgcgcgagccagggggcagccacgggccgggggtacctagcgccacccgcttcgcttgcatcagctgcgcgccccatcccgaggaatggtagaggcagccccgcccccggcccgcccccgcctttccattggctgccgcgcggggcggggagcggggtcggctcagtggccctgagaccctagctctgctctcggtccgctcgctgtccgctagcccgctgcgatgttgcgcgctgccgcccgcttcgggccccgcctgggccgccgcctcttgtcagccgccgccacccaggccgtgcctgcccccaaccagcagcccgaggtcttctgcaaccagattttcataaacaatgaatggcacgatgccgtcagcaggaaaacattccccaccgtcaatccgtccactggagaggtcatctgtcaggtagctgaaggggacaaggaagatgtggacaaggcagtgaaggccgcccgggccgccttccagctgggctcaccttggcgccgcatggacgcatcacacaggggccggctgctgaaccgcctggccgatctgatcgagcgggaccggacctacctggcggccttggagaccctggacaatggcaagccctatgtcatctcctacctggtggatttggacatggtcctcaaatgtctccggtattatgccggctgggctgataagtaccacgggaaaaccatccccattgacggagacttcttcagctacacacgccatgaacctgtgggggtgtgcgggcagatcattccgtggaatttcccgctcctgatgcaagcatggaagctgggcccagccttggcaactggaaacgtggttgtgatgaaggtagctgagcagacacccctcaccgccctctatgtggccaacctgatcaaggaggctggctttccccctggtgtggtcaacattgtgcctggatttggccccacggctggggccgccattgcctcccatgaggatgtggacaaagtggcattcacaggctccactgagattggccgcgtaatccaggttgctgctgggagcagcaacctcaagagagtgaccttggagctgggggggaagagccccaacatcatcatgtcagatgccgatatggattgggccgtggaacaggcccacttcgccctgttcttcaaccagggccagtgctgctgtgccggctcccggaccttcgtgcaggaggacatctatgatgagtttgtggagcggagcgttgcccgggccaagtctcgggtggtcgggaacccctttgatagcaagaccgagcaggggccgcaggtggatgaaactcagtttaagaagatcctcggctacatcaacacggggaagcaagagggggcgaagctgctgtgtggtgggggcattgctgctgaccgtggttacttcatccagcccactgtgtttggagatgtgcaggatggcatgaccatcgccaaggaggagatcttcgggccagtgatgcagatcctgaagttcaagaccatagaggaggttgttgggagagccaacaattccacgtacgggctggccgcagctgtcttcacaaaggatttggacaaggccaattacctgtcccaggccctccaggcgggcactgtgtgggtcaactgctatgatgtgtttggagcccagtcaccctttggtggctacaagatgtcggggagtggccgggagttgggcgagtacgggctgcaggcatacactgaagtgaaaactgtcacagtcaaagtgcctcagaagaactcataagaatcatgcaagcttcctccctcagccattgatggaaagttcagcaagatcagcaacaaaaccaagaaaaatgatccttgcgtgctgaatatctgaaaagagaaatttttcctacaaaatctcttgggtcaagaaagttctagaatttgaattgataaacatggtgggttggctgagggtaagagtatatgaggaaccttttaaacgacaacaatactgctagctttcaggatgatttttaaaaaatagattcaaatgtgttatcctctctctgaaacgcttcctataactcgagtttataggggaagaaaaagctattgtttacaattatatcaccattaaggcaactgctacaccctgctttgtattctgggctaagattcattaaaaactagctgctcttaaaaaaaaaaaaaaaaaaaaaaaaaaaaaaaaaaaaaaaaaaaaaaa

SEQ ID NO: 13287 - DNA, 1104 bp, Homo sapiens
agtaagttccagcgcagctagaccgcggggtagtcggcgcgaggcggagcttggcagttccgtccacttcagccgcagcgtccctcgccgggtgtctcgccgcagcctccggagaggaacagaccctcactctctctgtcagaaaaatgtctgctccagctcagccacctgctgaagggacagaagggactgccccaggtgggggtccccctggccctcctcctaacatgaccagtaacagacgactacagcaaacccaggcacaagtggaggaggtggtggacatcatacgtgtgaacgtggacaaggtcctggagagggaccagaagctgtcagagctggatgaccgagctgatgccttgcaggcaggagcatcacaatttgagagcagtgctgccaagctaaagaggaagtattggtggaaaaactgcaagatgatgatcatgctgggagccatctgtgccatcatcgtggtagttattgtaaggcgggactgaagagctggaagaaagcagtcagtaccctcccaacggcccccctcgaaggtctccactctcctctgggctcctccttgcctaatgcagggggtcaccgctggagaagaaccaccactgtcctcgatgtgtcccaagcctggagcgaatccgtcctcttggctctcccagccctatcacaggaatcattcctgggtttctgtccctctgaggctcaccaggtgtagttggccttgttctttgggggtattagcccttctactttctttctcacccaccctgtaccctcttctgtgtgtctctgctatccccctttcctcccaccacccatgtgcatgagcaaatgtgcaacaaaaccctgggactttgcagtcaaatgaagctgagcttcccacatcccgttcttcggtttgccatgagacgatgtggggtttccactgtgtgtctgtcatcacctctttgtctttttttcctaaccctgatctcatacttgtatagagtaataacaacagttgtacttccaccaaaggcatgtggcatatttaccaatgtcatgtattctgaacaaaggcaaaaaatacaaattcctaccattaaaaaaaaaaaaaaa

SEQ ID NO: 13288 - DNA, 3278 bp, Homo sapiens
ggcccgaagatggcggcggtggctggatctggggctgccgcggctccgagctcactgctcctcgtggtgggcagcgagttcgggagcccggggctcctcacctacgtcctggaggagctcgaaagaggcatccggtcttgggatgtcgatcctggcgtctgcaaccttgatgaacagctcaaggtctttgtgtcccgacactctgccaccttctccagcattgtgaaaggccagcggagcctgcaccaccgtggagacaacctggagaccctggtcctcctgaacccatcagacaagtccctgtatgatgagctccggaaccttctgttggaccctgcctctcacaagctactggtgttggctgggccctgcctggaggagacgggggagctgctgctacagacagggggcttctcgcctcaccacttcctccaggtcctgaaggacagagagatccgggacatcctggccaccacgcccccacctgtgcagccgcccatactcaccatcacctgccccaccttcggtgactgggctcagctggcacccgctgtgcctggccttcagggggcgctccggctccagctgcggctgaaccccccggcgcagctgcccaactctgagggcctgtgcgaattcctggagtacgtggctgagtctctggagccaccgtcccccttcgagctgctggagcccccgacctccgggggcttcctcaggctgggccggccctgctgctacatcttccctggaggcctcggggatgccgccttcttcgccgtcaatggcttcactgtgctggtcaacggtggctcaaaccccaagtccagtttctggaagctggtgcggcacctggaccgcgtggatgccgtgctggtgacccaccctggcgccgacagcctccccggcctcaacagcctgctgcggcgcaaactggcggagcgctccgaggtggctgctggtgggggctcctgggacgacaggctgcgcaggctcatctcccccaacctgggggtcgtgttcttcaacgcctgcgaggccgcgtcgcggctggcgcgcggcgaggatgaggcggagctggcgctgagcctcctggcgcagctgggcatcacgcctctgccactcagccgcggccccgtgccagccaaacccaccgtgctcttcgagaagatgggcgtgggccggctggacatgtatgtgctgcacccgccctccgccggcgccgagcgcacgctggcctctgtgtgcgccctgctggtgtggcaccccgccggccccggcgagaaggtggtgcgcgtgctgttccccggttgcaccccgcccgcctgcctcctggacggcctggtccgcctgcagcacttgaggttcctgcgagagcccgtggtgacgccccaggacctggaggggccggggcgagccgagagcaaagagagcgtgggctcccgggacagctcgaagagagagggcctcctggccacccaccctagacctggccaggagcgccctggggtggcccgcaaggagccagcacgggctgaggccccacgcaagactgagaaagaagccaagaccccccgggagttgaagaaagaccccaaaccgagtgtctcccggacccagccgcgggaggtgcgccgggcagcctcttctgtgcccaacctcaagaagacgaatgcccaggcggcacccaagccccgcaaagcgcccagcacgtcccactctggcttcccgccggtggcaaatggaccccgcagcccgcccagcctccgatgtggagaagccagcccccccagtgcagcctgcggctctccggcctcccagctggtggccacgcccagcctggagctggggccgatcccagccggggaggagaaggcactggagctgcctttggccgccagctcaatcccaaggccacgcacaccctcccctgagtcccaccggagccccgcagagggcagcgagcggctgtcgctgagcccactgcggggcggggaggccgggccagacgcctcacccacagtgaccacacccacggtgaccacgccctcactacccgcagaggtgggctccccgcactcgaccgaggtggacgagtccctgtcggtgtcctttgagcaggtgctgccgccatccgcccccaccagtgaggctgggctgagcctcccgctgcgtggcccccgggcgcggcgctcggcttccccacacgatgtggacctgtgcctggtgtcaccctgtgaatttgagcatcgcaaggcggtgccaatggcaccggcacctgcgtcccccggcagctcgaatgacagcagtgcccggtcacaggaacgggcaggtgggctgggggccgaggagacgccacccacatcggtcagcgagtccctgcccaccctgtctgactcggatcccgtgcccctggcccccggtgcggcagactcagacgaagacacagagggctttggagtccctcgccacgaccctttgcctgaccccctcaaggtccccccaccactgcctgacccatccagcatctgcatggtggaccccgagatgctgccccccaagacagcacggcaaacggagaacgtcagccgcacccggaagcccctggcccgccccaactcacgcgctgccgcccccaaagccactccagtggctgctgccaaaaccaaggggcttgctggtggggaccgtgccagccgaccactcagtgcccggagtgagcccagtgagaagggaggccgggcacccctgtccagaaagtcctcaacccccaagactgccactcgaggcccgtcggggtcagccagcagccggcccggggtgtcagccaccccacccaagtccccggtctacctggacctggcctacctgcccagcgggagcagcgcccacctggtggatgaggagttcttccagcgcgtgcgcgcgctctgctacgtcatcagtggccaggaccagcgcaaggaggaaggcatgcgggccgtcctggacgcgctactggccagcaagcagcattgggaccgtgacctgcaggtgaccctgatccccactttcgactcggtggccatgcatacgtggtacgcagagacgcacgcccggcaccaggcgctgggcatcacggtgttgggcagcaacagcatggtgtccatgcaggatgacgccttcccggcctgcaaggtggagttctagccccatcgccgacacgccccccactcagcccagcccgcctgtccctagattcagccacatcagaaataaactgtgactacacttggcaa

SEQ ID NO: 13289 - DNA, 1791 bp, Homo sapiens
cccagaaattctacccaagctccctcagcaccatgtaccgagcacttcggctcctcgcgcgctcgcgtcccctcgtgcgggctccagccgcagccttagcttcggctcccggcttgggtggcgcggccgtgccctcgttttggcctccgaacgcggctcgaatggcaagccaaaattccttccggatagaatatgatacctttggtgaactaaaggtgccaaatgataagtattatggcgcccagaccgtgagatctacgatgaactttaagattggaggtgtgacagaacgcatgccaaccccagttattaaagcttttggcatcttgaagcgagcggccgctgaagtaaaccaggattatggtcttgatccaaagattgctaatgcaataatgaaggcagcagatgaggtagctgaaggtaaattaaatgatcattttcctctcgtggtatggcagactggatcaggaactcagacaaatatgaatgtaaatgaagtcattagcaatagagcaattgaaatgttaggaggtgaacttggcagcaagatacctgtgcatcccaacgatcatgttaataaaagccagagctcaaatgatacttttcccacagcaatgcacattgctgctgcaatagaagttcatgaagtactgttaccaggactacagaagttacatgatgctcttgatgcaaaatccaaagagtttgcacagatcatcaagattggacgtactcatactcaggatgctgttccacttactcttgggcaggaatttagtggttatgttcaacaagtaaaatatgcaatgacaagaataaaagctgccatgccaagaatctatgagctcgcagctggaggcactgctgttggtacaggtttaaatactagaattggctttgcagaaaaggttgctgcaaaagtggctgcacttacaggcttgccttttgtcactgctccgaataaatttgaagctctggctgctcatgacgctctggttgagctcagtggagccatgaacactactgcctgcagtctgatgaagatagcaaatgatattcgatttttgggttctggtcctcggtcaggtctgggagaattgatcttgcctgaaaatgaaccaggaagcagtatcatgccaggcaaggtgaaccctactcagtgtgaagcaatgaccatggttgcagcccaagtcatggggaaccatgttgctgtcactgtcggaggcagcaatggacattttgagttgaatgttttcaagccaatgatgattaaaaatgtgttacactcagccaggctgctgggggatgcttcagtttcctttacagaaaactgcgtggtgggaatccaggccaatacagaaaggatcaacaagctgatgaatgagtctctaatgttggtgacagctctcaatcctcatatagggtatgacaaggcagcaaagattgctaagacagcacacaaaaatggatcaaccttaaaggaaactgctatcgaacttggctatctcacagcagagcagtttgacgaatgggtaaaacctaaggacatgctgggtccaaagtgatttacataaatttataatgaaaataaacatgtataaaatttaaaaaaacagactcccatttcttaaaaacggataagtttgaaaggaaactgctattgaacttaagcatctctagcagagcaatttgatcagtatataaaaccctaggatgtgctaggtctaagatggattaaacaagtataaaataaaatacatttataaaataaaaaggaaaacagacttaaaa

SEQ ID NO: 13290 - DNA, 2867 bp, Homo sapiens
aatcagggagcgccgcgcgagggtggggaccagctgcgcacgaggccagcggcggggtcgctgccgttgaggcttcccgccactgctgctggcggatttgtggggcaaaatttctcgctggctagccttcttttccctcccgcactttggtggggagggggtggatcctcgtttcggtgcccaagttcacgatgacccgagagaactcgaggaagttgtcgccgcggccatttcccccagtgccgcaacttgctggccttggagggggaggagcgccgaggcagtgactgcgacgcaaacatcaaaccagatgcaaacagattcattatctccatcccctaatcctgtgtcacctgtgcctttgaataacccaacaagtgccccaagatatggaacagtgatccctaatcgcatctttgtaggaggaattgattttaagacaaacgaaagtgatttaagaaaatttttttcccagtatgggtctgtgaaagaagtgaagattgtaaatgacagagctggagtatccaaagggtatggtttcgtcacttttgaaacacaagaagatgcacaaaaaattttacaagaggctgaaaaacttaattataaggataagaagctgaacattggtccagcaataagaaaacaacaagtagggatccctcgttctagtataatgccagcagctggaacaatgtatctaacaacttcaactggatatccttatacttaccataatggtgttgcttattttcatactccagaggtaacttcggtcccaccgccttggccttcacgttctgtatgtagctcccctgtgatggtagctcagcccatttatcagcaacctgcatatcactaccaggccaccacacagtatttaccaggacagtggcagtggagtgttcctcagccttctgcctcttctgctccattcttatacctgcaaccttctgaggttatttatcaaccagtggaaattgcacaggatggtggatgtgttcctcctccactgtctctgatggaaacttcagttccagagccttattctgatcatggagttcaagcaacatatcaccaggtttatgctccaagtgccatcactatgcctgcgcctgtgatgcagcctgagccaattaaaacagtgtggagcattcattattaagacaattgggcagctctattccagctcaactgatttcttgtccaatgatccttgcgtggccgagatccagcttcaacgaaccagctagaagctgcccgttgtgaaacttagtgttagttaatacctcaccatactcagttattccactataagctgtctaaatttgatgaaatttgctttttcagctgttctacaaaattatttaggtagatgtggcatgttggttttttatgtgctaacctaactgtaatgaccttttctacaacatgttttatccattccataaataataaccacattgggaatagtgaggtgtcttttattttctctgctttgtgttattttttcttatcaaacaattagatgttatgtttcatattatttgatatttattttcatatttaggataagaatcatttttaattataatacttttaatactttcatatattttacaacagtatactatttaatattaatgacaattctatttttgctttgctgttttgtcatttaatatgcttttgtctaatttttaattcatttattactgttactccttatttaattttgcgtctgccatggttttcagaatctgaatagtatttatacttcttttttataacattttccaaatattagaaataccatcaacatgatcagtattcttgccttttcatgtaatttgactatattaaattttttctccagtgtttgagacaatattgaaatcttcctataacataatttatttggtatcaaattttataaaatatggatccacctttggaattttgataaaagggttcatctctgacatgatcccataacactgactgaaattccaccaaattactgttctttgaatgctttaatccttaaaccttttcttctgatatgcaaccaatatattcaattatatatgtgattaatttttaaaaggacaattgttttcataaaatgcaaaactattttttacaccaaaggaaaattttagattctgattctaaatccgatttttactataaaattggaaaatagatgggaggggtgtcattcattgttcaaaaggtacagaacaaatcataggggtttttaatctctaaaatttctacagtagtacaggaaatattcctctttacattcatttgcagttctttcactgacctcctaattttaggtggagggggcagggggagccataaaagttggtattaccctaataaatctatctctttcctcccctgtttcaaccccacatgtattccatgctcagcagcagcagcagaaatagtaggatatagatcacaaaggtttttctggtgagtcaaatagggtgttttcttttgaaactgtaatgaatatgtttgccagtcaaatggcttcatgagaacagtagaaccttatgaatgtatactagcatacaaggatctcaaatacattaattattctcagttttaggaatgtaaatagattaagtcccacaatgaaatttcagaagtttttgttctgtaagtaaaaaattactaaccactgatgttcaagattttcttttaatagcactatccttgagaaccaaaaagtttatgttttgattttcaaatgttaaacaagatgctaaacaaatcctggactgttaataaaaattaattatgtattattggataaaaaaaaaaaaaaaaaaaaaaaaaaaaaaaaaaaaaaa

SEQ ID NO: 13291 - DNA, 2804 bp, Homo sapiens
gaggcgacgcagtccgcttctccccacccgccaggtggcaggttcagggccggggtccgagcctgcttccctgcagctgccacagccaccctcgccgccagggggcgagagtcccaggcaggacaagcagcgctgctgccttggcgtgaaggtggtttcaaactttaggcttcttttccctaccccgcgtctctgaagagcagagaggaagatggaaaccgagtccgggccgcaaacatcaaaccagatgcaaacagattcattatctccatcccctaatcctgtgtcacctgtgcctttgaataacccaacaagtgccccaagatatggaacagtgatccctaatcgcatctttgtaggaggaattgattttaagacaaacgaaagtgatttaagaaaatttttttcccagtatgggtctgtgaaagaagtgaagattgtaaatgacagagctggagtatccaaagggtatggtttcgtcacttttgaaacacaagaagatgcacaaaaaattttacaagaggctgaaaaacttaattataaggataagaagctgaacattggtccagcaataagaaaacaacaagtagggatccctcgttctagtataatgccagcagctggaacaatgtatctaacaacttcaactggatatccttatacttaccataatggtgttgcttattttcatactccagaggtaacttcggtcccaccgccttggccttcacgttctgtatgtagctcccctgtgatggtagctcagcccatttatcagcaacctgcatatcactaccaggccaccacacagtatttaccaggacagtggcagtggagtgttcctcagccttctgcctcttctgctccattcttatacctgcaaccttctgaggttatttatcaaccagtggaaattgcacaggatggtggatgtgttcctcctccactgtctctgatggaaacttcagttccagagccttattctgatcatggagttcaagcaacatatcaccaggtttatgctccaagtgccatcactatgcctgcgcctgtgatgcagcctgagccaattaaaacagtgtggagcattcattattaagacaattgggcagctctattccagctcaactgatttcttgtccaatgatccttgcgtggccgagatccagcttcaacgaaccagctagaagctgcccgttgtgaaacttagtgttagttaatacctcaccatactcagttattccactataagctgtctaaatttgatgaaatttgctttttcagctgttctacaaaattatttaggtagatgtggcatgttggttttttatgtgctaacctaactgtaatgaccttttctacaacatgttttatccattccataaataataaccacattgggaatagtgaggtgtcttttattttctctgctttgtgttattttttcttatcaaacaattagatgttatgtttcatattatttgatatttattttcatatttaggataagaatcatttttaattataatacttttaatactttcatatattttacaacagtatactatttaatattaatgacaattctatttttgctttgctgttttgtcatttaatatgcttttgtctaatttttaattcatttattactgttactccttatttaattttgcgtctgccatggttttcagaatctgaatagtatttatacttcttttttataacattttccaaatattagaaataccatcaacatgatcagtattcttgccttttcatgtaatttgactatattaaattttttctccagtgtttgagacaatattgaaatcttcctataacataatttatttggtatcaaattttataaaatatggatccacctttggaattttgataaaagggttcatctctgacatgatcccataacactgactgaaattccaccaaattactgttctttgaatgctttaatccttaaaccttttcttctgatatgcaaccaatatattcaattatatatgtgattaatttttaaaaggacaattgttttcataaaatgcaaaactattttttacaccaaaggaaaattttagattctgattctaaatccgatttttactataaaattggaaaatagatgggaggggtgtcattcattgttcaaaaggtacagaacaaatcataggggtttttaatctctaaaatttctacagtagtacaggaaatattcctctttacattcatttgcagttctttcactgacctcctaattttaggtggagggggcagggggagccataaaagttggtattaccctaataaatctatctctttcctcccctgtttcaaccccacatgtattccatgctcagcagcagcagcagaaatagtaggatatagatcacaaaggtttttctggtgagtcaaatagggtgttttcttttgaaactgtaatgaatatgtttgccagtcaaatggcttcatgagaacagtagaaccttatgaatgtatactagcatacaaggatctcaaatacattaattattctcagttttaggaatgtaaatagattaagtcccacaatgaaatttcagaagtttttgttctgtaagtaaaaaattactaaccactgatgttcaagattttcttttaatagcactatccttgagaaccaaaaagtttatgttttgattttcaaatgttaaacaagatgctaaacaaatcctggactgttaataaaaattaattatgtattattggataaaaaaaaaaaaaaaaaaaaaaaaaaaaaaaaaaaaaaa

SEQ ID NO: 13292 - DNA, 3885 bp, Homo sapiens
atgaaggttgcaggaggacttgaacttggagctgctgctctgctctcagcatcaccacgtgctcttgtcactctttccacaggtcctacttgctctatattaccaaagaatccacttttcccccaaaacctgagctctcagccttgtatcaagatggaaggagacaaatcgctcaccttttccagctacgggctgcaatggtgtctctatgagctagacaaggaagaatttcagacattcaaggaattactaaagaagaaatcttcagaatcgaccacatgctctattccacagtttgaaatcgagaatgccaacgtggaatgtctggcactcctcttgcatgagtattatggagcatcgctggcctgggctacgtccattagcatctttgaaaacatgaacctgcgaaccctctcggagaaggcacgggatgacatgaaaagacattcaccagaagatcctgaagcaacgatgactgaccaaggaccaagcaaggaaaaagtgccaggaatttcacaagctgtgcaacaagatagtgccacagctgcagagacaaaagaacaagaaatttcacaagctatggaacaagaaggtgccacagcagcagagacagaagaacaagaaatttcacaagctatggaacaagaaggtgccacagcagcagagacagaagaacaaggacatggaggtgacacatgggactacaagagtcacgtgatgaccaaattcgctgaggaggaggatgtacgtcgtagttttgaaaacactgctgctgactggccggaaatgcaaacgttggctggtgcttttgattcagaccggtggggcttccggcctcgcacggtggttctgcacggaaagtcaggaattgggaaatcggctctagccagaaggatcgtgctgtgctgggcgcaaggtggactctaccagggaatgttctcctacgtcttcttcctccccgttagagagatgcagcggaagaaggagagcagtgtcacagagttcatctccagggagtggccagactcccaggctccggtgacggagatcatgtcccgaccagaaaggctgttgttcatcattgacggtttcgatgacctgggctctgtcctcaacaatgacacaaagctctgcaaagactgggctgagaagcagcctccgttcaccctcatacgcagtctgctgaggaaggtcctgctccctgagtccttcctgatcgtcaccgtcagagacgtgggcacagagaagctcaagtcagaggtcgtgtctccccgttacctgttagttagaggaatctccggggaacaaagaatccacttgctccttgagcgcgggattggtgagcatcagaagacacaagggttgcgtgcgatcatgaacaaccgtgagctgctcgaccagtgccaggtgcccgccgtgggctctctcatctgcgtggccctgcagctgcaggacgtggtgggggagagcgtcgcccccttcaaccaaacgctcacaggcctgcacgccgcttttgtgtttcatcagctcacccctcgaggcgtggtccggcgctgtctcaatctggaggaaagagttgtcctgaagcgcttctgccgtatggctgtggagggagtgtggaataggaagtcagtgtttgacggtgacgacctcatggttcaaggactcggggagtctgagctccgtgctctgtttcacatgaacatccttctcccagacagccactgtgaggagtactacaccttcttccacctcagtctccaggacttctgtgccgccttgtactacgtgttagagggcctggaaatcgagccagctctctgccctctgtacgttgagaagacaaagaggtccatggagcttaaacaggcaggcttccatatccactcgctttggatgaagcgtttcttgtttggcctcgtgagcgaagacgtaaggaggccactggaggtcctgctgggctgtcccgttcccctgggggtgaagcagaagcttctgcactgggtctctctgttgggtcagcagcctaatgccaccaccccaggagacaccctggacgccttccactgtcttttcgagactcaagacaaagagtttgttcgcttggcattaaacagcttccaagaagtgtggcttccgattaaccagaacctggacttgatagcatcttccttctgcctccagcactgtccgtatttgcggaaaattcgggtggatgtcaaagggatcttcccaagagatgagtccgctgaggcatgtcctgtggtccctctatggatgcgggataagaccctcattgaggagcagtgggaagatttctgctccatgcttggcacccacccacacctgcggcagctggacctgggcagcagcatcctgacagagcgggccatgaagaccctgtgtgccaagctgaggcatcccacctgcaagatacagaccctgatgtttagaaatgcacagattacccctggtgtgcagcacctctggagaatcgtcatggccaaccgtaacctaagatccctcaacttgggaggcacccacctgaaggaagaggatgtaaggatggcgtgtgaagccttaaaacacccaaaatgtttgttggagtctttgaggctggattgctgtggattgacccatgcctgttacctgaagatctcccaaatccttacgacctcccccagcctgaaatctctgagcctggcaggaaacaaggtgacagaccagggagtaatgcctctcagtgatgccttgagagtctcccagtgcgccctgcagaagctgatactggaggactgtggcatcacagccacgggttgccagagtctggcctcagccctcgtcagcaaccggagcttgacacacctgtgcctatccaacaacagcctggggaacgaaggtgtaaatctactgtgtcgatccatgaggcttccccactgtagtctgcagaggctgatgctgaatcagtgccacctggacacggctggctgtggttttcttgcacttgcgcttatgggtaactcatggctgacgcacctgagccttagcatgaaccctgtggaagacaatggcgtgaagcttctgtgcgaggtcatgagagaaccatcttgtcatctccaggacctggagttggtaaagtgtcatctcaccgccgcgtgctgtgagagtctgtcctgtgtgatctcgaggagcagacacctgaagagcctggatctcacggacaatgccctgggtgacggtggggttgctgcgctgtgcgagggactgaagcaaaagaacagtgttctggcgagactcgggttgaaggcatgtggactgacttctgattgctgtgaggcactctccttggccctttcctgcaaccggcatctgaccagtctaaacctggtgcagaataacttcagtcccaaaggaatgatgaagctgtgttcggcctttgcctgtcccacgtctaacttacagataattgggctgtggaaatggcagtaccctgtgcaaataaggaagctgctggaggaagtgcagctactcaagccccgagtcgtaattgacggtagttggcattcttttgatgaagatgaccggtactggtggaaaaactgaagatacggaaacctgccccactcacacccatctgatggaggaactttaaacgctgttttctcagagcaagctatgcacctgggagttccttctcaaagatggagaatgatttctgattctcacaaagccctcaatggtagtgattcttctgtgttcactctacgttggttactggatttgaaggctagagaccttcaagtcataggactcagtatctgtgaaatgtccgtcatatctcagagcatatagagggaattaaataaacacaaagcatttggaaaa

SEQ ID NO: 13293 - DNA, 4761 bp, Homo sapiens
gccattttgtgcagtcgctgggaaggaaggagacgcctaaaccgcggcactgcccggtttgagcgtagccaaacctgcccaccggctttgtagccccgattctctgtgttttgctcccgtctccgacgagagaggcggcgacggtggcgtctgcgacgggagacagcgcgtcggagcgagagagcgctgcgcctgccgccgccccaacagcggaggcgccgccgccatcggtcgtcaccagaccggagccgcaggccctcccgagcccggccatccgtgccccgctcccagatctctatccttttgggaccatgcgcggaggaggctttggggaccgggaccgggatcgtgaccgtggaggatttggagcaagaggtggtggtggccttcccccgaagaaatttggtaatcctggggagcgtttgcgtaaaaaaaagtgggatttgagtgagctccccaagtttgagaaaaatttttatgtggaacatccggaagtagcaaggctgacaccatatgaggttgatgagctacgccgaaagaaggagattacagtgagggggggagatgtttgtcctaaacccgtgtttgccttccatcatgctaacttcccacaatatgtaatggatgtgttgatggatcagcactttacagaaccaactccaattcagtgccagggatttccgttggctcttagtggccgggatatggtgggcattgctcagactggctctgggaagacgttggcgtatctcctgcctgcaattgttcatattaaccaccagccatacttggaaaggggagatggcccaatctgtctagttctggctcctaccagagagcttgcccagcaagtacagcaggtggccgatgactatggcaaatgttctagattgaagagtacttgtatttatggaggtgctcctaaaggtccccagattcgagacttggaaagaggtgttgagatctgcatagccactcctggacgtctgatagatttcctggagtcaggaaagacaaatcttcgccgatgtacttaccttgtattggacgaagctgacagaatgcttgatatggggtttgaaccccagatccgtaaaattgttgaccaaatcaggcctgataggcagacactgatgtggagtgcaacctggccaaaagaagtaagacagcttgcagaggatttccttcgtgattacacccagatcaacgtaggcaatctggagttgagtgccaaccacaacatcctccagatagtggatgtctgcatggaaagtgaaaaagaccacaagttgatccaactaatggaagaaataatggctgaaaaggaaaacaaaacaataatatttgtggagacaaagagacgctgtgatgatctgactcgaaggatgcgcagagatggttggccagctatgtgtatccatggagacaagagtcaaccagaaagagattgggtacttaatgagttccgttctggaaaggcacccatccttattgctacagatgtagcctcccgtgggctagatgtggaagatgtcaagtttgtgatcaactatgactatccaaacagctcagaggattatgtgcaccgtattggccgaacagcccgtagcaccaacaagggtaccgcctataccttcttcaccccagggaacctaaaacaggccagagagcttatcaaagtgctggaagaggccaatcaggctatcaatccaaaactgatgcagcttgtggaccacagaggaggcggcggaggcgggggtggtcgttctcgttaccggaccacttcttcagccaacaatcccaatctgatgtatcaggatgagtgtgaccgaaggcttcgaggagtcaaggatggtggccggagagactctgcaagctatcgggatcgtagtgaaaccgatagagctggttatgctaatggcagtggctatggaagtccaaattctgcctttggagcacaagcaggccaatacacctatggtcaaggcacctatggggcagctgcttatggcaccagtagctatacagctcaagaatatggtgctggcacttatggagctagtagcaccacctcaactgggagaagttcacagagctctagccagcagtttagtgggataggccggtctgggcagcagccacagccactgatgtcacaacagtttgcacagcctccgggagctaccaatatgataggttacatggggcagactgcctaccaataccctcctcctcctccccctcctcctccttcacgtaaatgaaaccactcaagtggtagtgactccagcagacttaattacattttaaggaacactgtctttcctttttttttcctcttcgccttttctttttttttccttttttctttttttttttttaatttttccccccaaccatcgtgatttgtcttttcatgcagattagttagaattcactgccaggtttcttctgcccaccaaaatgatccagtctggaataacattttgtaaaaaaaaaaaaaatatatatatatatatatagctgactggaagagattaatttcttcccccaacttcttgcatgttgaagatatttgagctatttttcatctaaaagagtaaggtattaggcccttttgtgggagccccatgttttgtttttctgagttggtggggagggagggagggggagggctgaattgttttgcagaggaagatggcatctgtgctttaaatttctcattactgggttagaaaacaaagagggagtgccctgcacattttcttttgtgcttttaaatgtttcttaagttggaacaggtttcctcgggcctgttttgactgattgctggagtgcatttgatagttaaaaattactaattggttttatttcccttcacactctgcctccccacttctccccccgttactgaaaaataaccattttagtgtcaggctagaaattgaattgctgagttttgtgtatcctttaaattaaaaaccacaagtgtttattgtagtggttaaactgtagcatctcagcatctgggtggaagctgcctatatttcttcccagtttaactggggaccatctgtgaaattaattttccatccagacagctgctgtgagcaaatgaacataaatgctcgctggaaatttactaaccagtttttatattgacctgcagtgtaaaaagcacatttaattataaacaatatattcaaaatgggcaaattttattttcaaatgcagtgtagagctagattaaaagcaactctttgccacctactctgcccttttggcaaagttaccttgaacaaagaatcttaagggtttattaagaactctttattttcttcataccctgttctctgcagtgctttctaacagcttctgggtgcagattttcttcggcatccttttgcactcagcttattacaggtaggtagtgcttaagaaaagtcatggaggactaaagcctaagtccttttcacttttcctccatctgaaggtaggtgagttcatcctcttcatagtaatgctgttttaccaagactttatagcagatggacccagaaagaattttctgctattgtgttcactacaacaggatagggacatcagacagccccagaaaccccttccagatctgatatgggactattaatttttatgctgttaattggtattcattcacaatgcagttgaagggggaaggctccactgcattctttggctaaggcctgaatgcttgctcatctgtaagatctatactcgaggttttgttttccttttaaaattctttagggagagagggatggtttctgaggggttctgaaagtatgattcaatgtgcaacatacaggtaggtcttcagcataagctgaaatatatgcatgtaaaaactttgacatctttttttttaattttccactttcttcttaactttacttctctttttgtcccccccccatcttacagaagttgaggccaagggagaatggtaggcacagaagaaacatggcaaactgctctgtgctttcaaaccaaagtgttccccccaaccccaaatttgtctaagcactggccagtctgttgtgggcattgttttctacaaccaaattctgggtttttttcttctttctttaaacatagaggtaccaccacaagggatgccctactctctcgcagctcttgaaagcatctgtttgagggaaaggtctctgggcaagcaagtggttatttggattgcttgcttccctttttccacctgggacattgtaatcataaaataacagtaaattccaaacctcaaaaactattatggcctgagcacagctgaaatctagcagagtttaactcttctgcctccatgtctgtcacttataattcaggttctgctgttggcttcagaacatgagcagaagaatcgttttatgctagttattgcattcatggttgaaactcaacttagggaaagggttccaatgtattaagcaatgggctgcttctccccaatcctccctaacaattcgttgtgtggacttctcatctaaaaggttagtggcttttgcttgggatcagtgctctctattgatgttcttgctggtctccagacacattcctgttgcattaagacttgaaagacttgtagatgtgtgatgttcaggcacaggatgctgaaagctatgttactattcttagtttgtaaattgtccttttgataccatcatcttgttttctttttgtaggtataaataaaaacactgttgacaataa

SEQ ID NO: 13294 - DNA, 5128 bp, Homo sapiens
actctggagtgggagtgggagcgagcgcttctgcgactccagttgtgagagccgcaagggcatgggaattgacgccactcaccgacccccagtctcaatctcaacgctgtgaggaaacctcgactttgccaggtccccaagggcagcggggctcggcgagcgaggcacccttctccgtccccatcccaatccaagcgctcctggcactgacgacgccaagagactcgagtgggagttaaagcttccagtgagggcagcaggtgtccaggccgggcctgcgggttcctgttgacgtcttgccctaggcaaaggtcccagttccttctcggagccggctgtcccgcgccactggaaaccgcacctccccgcagcatgggcaccagcctcagcccgaacgacccttggccgctaaacccgctgtccatccagcagaccacgctcctgctactcctgtcggtgctggccactgtgcatgtgggccagcggctgctgaggcaacggaggcggcagctccggtccgcgcccccgggcccgtttgcgtggccactgatcggaaacgcggcggcggtgggccaggcggctcacctctcgttcgctcgcctggcgcggcgctacggcgacgttttccagatccgcctgggcagctgccccatagtggtgctgaatggcgagcgcgccatccaccaggccctggtgcagcagggctcggccttcgccgaccggccggccttcgcctccttccgtgtggtgtccggcggccgcagcatggctttcggccactactcggagcactggaaggtgcagcggcgcgcagcccacagcatgatgcgcaacttcttcacgcgccagccgcgcagccgccaagtcctcgagggccacgtgctgagcgaggcgcgcgagctggtggcgctgctggtgcgcggcagcgcggacggcgccttcctcgacccgaggccgctgaccgtcgtggccgtggccaacgtcatgagtgccgtgtgtttcggctgccgctacagccacgacgaccccgagttccgtgagctgctcagccacaacgaagagttcgggcgcacggtgggcgcgggcagcctggtggacgtgatgccctggctgcagtacttccccaacccggtgcgcaccgttttccgcgaattcgagcagctcaaccgcaacttcagcaacttcatcctggacaagttcttgaggcactgcgaaagccttcggcccggggccgccccccgcgacatgatggacgcctttatcctctctgcggaaaagaaggcggccggggactcgcacggtggtggcgcgcggctggatttggagaacgtaccggccactatcactgacatcttcggcgccagccaggacaccctgtccaccgcgctgcagtggctgctcctcctcttcaccaggtatcctgatgtgcagactcgagtgcaggcagaattggatcaggtcgtggggagggaccgtctgccttgtatgggtgaccagcccaacctgccctatgtcctggccttcctttatgaagccatgcgcttctccagctttgtgcctgtcactattcctcatgccaccactgccaacacctctgtcttgggctaccacattcccaaggacactgtggtttttgtcaaccagtggtctgtgaatcatgacccagtgaagtggcctaacccggagaactttgatccagctcgattcttggacaaggatggcctcatcaacaaggacctgaccagcagagtgatgattttttcagtgggcaaaaggcggtgcattggcgaagaactttctaagatgcagctttttctcttcatctccatcctggctcaccagtgcgatttcagggccaacccaaatgagcctgcgaaaatgaatttcagttatggtctaaccattaaacccaagtcatttaaagtcaatgtcactctcagagagtccatggagctccttgatagtgctgtccaaaatttacaagccaaggaaacttgccaataagaagcaagaggcaagctgaaattttagaaatattcacatcttcggagatgaggagtaaaattcagtttttttccagttcctcttttgtgctgcttctcaattagcgtttaaggtgagcataaatcaactgtccatcaggtgaggtgtgctccatacccagcggttcttcatgagtagtgggctatgcaggagcttctgggagatttttttgagtcaaagacttaaagggcccaatgaattattatatacatactgcatcttggttatttctgaaggtagcattctttggagttaaaatgcacatatagacacatacacccaaacacttacaccaaactactgaatgaagaagtattttggtaaccaggccatttttggtgggaatccaagattggtctcccatatgcagaaatagacaaaaagtatattaaacaaagtttcagagtatattgttgaagagacagagacaagtaatttcagtgtaaagtgtgtgattgaaggtgataagggaaaagataaagaccagaaattcccttttcaccttttcaggaaaataacttagactctagtatttatgggtggatttatccttttgccttctggtatacttccttacttttaaggataaatcataaagtcagttgctcaaaaagaaatcaatagttgaattagtgagtatagtggggttccatgagttatcatgaattttaaagtatgcattattaaattgtaaaactccaaggtgatgttgtacctcttttgcttgccaaagtacagaatttgaattatcagcaaagaaaaaaaaaaaagccagccaagctttaaattatgtgaccataatgtactgatttcagtaagtctcataggttaaaaaaaaaagtcaccaaatagtgtgaaatatattacttaactgtccgtaagcagtatattagtattatcttgttcaggaaaaggttgaataatatatgccttgtgtaatattgaaaattgaaaagtacaactaacgcaaccaagtgtgctaaaaatgagcttgattaaatcaaccacctatttttgacatggaaatgaagcagggtttcttttcttcactcaaattttggcgaatctcaaaattagatcctaagatgtgttcttatttttataacatctttattgaaattctatttataatacagaatcttgttttgaaaataacctaattaatatattaaaattccaaattcatggcatgcttaaattttaactaaattttaaagccattctgattattgagttccagttgaagttagtggaaatctgaacattctcctgtggaaggcagagaaatctaagctgtgtctgcccaatgaataatggaaaatgccatgaattacctggatgttctttttacgaggtgacaagagttggggacagaactcccattacaactgaccaagtttctcttctagatgattttttgaaagttaacattaatgcctgctttttggaaagtcagaatcagaagatagtcttggaagctgtttggaaaagacagtggagatgaggtcagttgtgttttttaagatggcaattactttggtagctgggaaagcataaagctcaaatgaaatgtatgcattcacatttagaaaagtgaattgaagtttcaagttttaaagttcattgcaattaaacttccaaagaaagttctacagtgtcctaagtgctaagtgcttattacattttattaagctttttggaatctttgtaccaaaattttaaaaaagggagtttttgatagttgtgtgtatgtgtgtgtggggtggggggatggtaagagaaaagagagaaacactgaaaagaaggaaagatggttaaacattttcccactcattctgaattaattaatttggagcacaaaattcaaagcatggacatttagaagaaagatgtttggcgtagcagagttaaatctcaaataggctattaaaaaagtctacaacatagcagatctgttttgtggtttggaatattaaaaaacttcatgtaattttattttaaaatttcatagctgtacttcttgaatataaaaaatcatgccagtatttttaaaggcattagagtcaactacacaaagcaggcttgcccagtacatttaaattttttggcacttgccattccaaaatattatgccccaccaaggctgagacagtgaatttgggctgctgtagcctatttttttagattgagaaatgtgtagctgcaaaaataatcatgaaccaatctggatgcctcattatgtcaaccaggtccagatgtgctataatctgtttttacgtatgtaggcccagtcgtcatcagatgcttgcggcaaaagaaagctgtgtttatatggaagaaagtaaggtgcttggagtttacctggcttatttaatatgcttataacctagttaaagaaaggaaaagaaaacaaaaaacgaatgaaaataactgaatttggaggctggagtaatcagattactgctttaatcagaaaccctcattgtgtttctaccggagagagaatgtatttgctgacaaccattaaagtcagaagttttactccaggttattgcaataaagtataatgtttattaaatgcttcatttgtatgtcaaagctttgactctataagcaaattgcttttttccaaaacaaaaagatgtctcaggtttgttttgtgaattttctaaaagctttcatgtcccagaacttagcctttacctgtgaagtgttactacagccttaatattttcctagtagatctatattagatcaaatagttgcatagcagtatatgttaatttgtgtgtttttagctgtgacacaactgtgtgattaaaaggtatactttagtagacatttataactcaaggataccttcttatttaatcttttcttatttttgtactttatcatgaatgcttttagtgtgtgcataatagctacagtgcatagttgtagacaaagtacattctggggaaacaacatttatatgtagcctttactgtttgatataccaaattaaaaaaaaattgtatctcattacttatactgggacaccattaccaaaataataaaaatcactttcataatcttgaaaaaa

SEQ ID NO: 13295 - DNA, 14773 bp, Homo sapiens
ctgggcggccgggcgcggggagagggcgcgggagcggctcgtgcggcaggtaccatgcggacgcgcgagcccggcgagggccccggcaggcccggtccctgctcgggggcgcgctgagacggcgggtgagctccacgagagcgccgtcgccacttcgggccaactttgcgattcccgacagttaagcaatggggagacatttggctttgctcctgcttctgctccttctcttccaacattttggagacagtgatggcagccaacgacttgaacagactcctctgcagtttacacacctcgagtacaacgtcaccgtgcaggagaactctgcagctaagacttatgtggggcatcctgtcaagatgggtgtttacattacacatccagcgtgggaagtaaggtacaaaattgtttccggagacagtgaaaacctgttcaaagctgaagagtacattctcggagacttttgctttctaagaataaggaccaaaggaggaaatacagctattcttaatagagaagtgaaggatcactacacattgatagtgaaagcacttgaaaaaaatactaatgtggaggcgcgaacaaaggtcagggtgcaggtgctggatacaaatgacttgagaccgttattctcacccacctcatacagcgtttctttacctgaaaacacagctataaggaccagtatcgcaagagtcagcgccacggatgcagacataggaaccaacggggaattttactacagttttaaagatcgaacagatatgtttgctattcacccaaccagtggtgtgatagtgttaactggtagacttgattacctagagaccaagctctatgagatggaaatcctcgctgcggaccgtggcatgaagttgtatgggagcagtggcatcagcagcatggccaagctaacggtgcacatcgaacaggccaatgaatgtgctccggtgataacagcagtgacattgtcaccatcagaactggacagggacccagcatatgcaattgtgacagtggatgactgcgatcagggtgccaatggtgacatagcatctttaagcatcgtggcaggtgaccttctccagcagtttagaacagtgaggtcctttccagggagtaaggagtataaagtcaaagccatcggtggcattgattgggacagtcatcctttcggctacaatctcacactacaggctaaagataaaggaactccgccccagttctcttctgttaaagtcattcacgtgacttctccacagttcaaagccgggccagtcaagtttgaaaaggatgtttacagagcagaaataagtgaatttgctcctcccaacacacctgtggtcatggtaaaggccattcctgcttattcccatttgaggtatgtttttaaaagtacacctggaaaagctaaattcagtttaaattacaacactggtctcatttctattttagaaccagttaaaagacagcaggcagcccattttgaacttgaagtaacaacaagtgacagaaaagcgtccaccaaggtcttggtgaaagtcttaggtgcaaatagcaatccccctgaatttacccagacagcgtacaaagctgcttttgatgagaacgtgcccattggtactactgtcatgagcctgagtgccgtagaccctgatgagggtgagaacgggtacgtgacatacagtatcgcaaatttaaatcatgtgccgtttgcgattgaccatttcactggtgccgtgagtacgtcagaaaacctggactacgaactgatgcctcgggtttatactctgaggattcgtgcatcagactggggcttgccgtaccgccgggaagtcgaagtccttgctacaattactctcaataacttgaatgacaacacacctttgtttgagaaaataaattgtgaagggacaattcccagagatctaggcgtgggagagcaaataaccactgtttctgctattgatgcagatgaacttcagttggtacagtatcagattgaagctggaaatgaactggatttctttagtttaaaccccaactcgggggtattgtcattaaagcgatcgctaatggatggcttaggtgcaaaggtgtctttccacagtctgagaatcacagctacagatggagaaaattttgccacaccattatatatcaacataacagtggctgccagtcacaagctggtaaacttgcagtgtgaagagactggtgttgccaaaatgctggcagagaagctcctgcaggcaaataaattacacaaccagggagaggtggaggatattttcttcgattctcactctgtcaatgctcacataccgcagtttagaagcactcttccgactggtattcaggtaaaggaaaaccagcctgtgggttccagtgtaattttcatgaactccactgaccttgacactggcttcaatggaaaactggtctatgctgtttctggaggaaatgaggatagttgcttcatgattgatatggaaacaggaatgctgaaaattttatctcctcttgaccgtgaaacaacagacaaatacaccctgaatattaccgtctatgaccttgggataccccagaaggctgcgtggcgtcttctacatgtcgtggttgtcgatgccaatgataatccacccgagtttttacaggagagctattttgtggaagtgagtgaagacaaggaggtacatagtgaaatcatccaggttgaagccacagataaagacctggggcccaacggacacgtgacgtactcaattgttacagacacagacacattttcaattgacagcgtgacgggtgttgttaacatcgcacgccctctggatcgagagctgcagcatgagcactccttaaagattgaggccagggaccaagccagagaagagcctcagctgttctccactgtcgttgtgaaagtatcactagaagatgttaatgacaacccacctacatttattccacctaattatcgtgtgaaagtccgagaggatcttccagaaggaaccgtcatcatgtggttagaagcccacgatcctgatttaggtcagtctggtcaggtgagatacagccttctggaccacggagaaggaaacttcgatgtggataaactcagtggagcagttaggatcgtccagcagttggactttgagaagaagcaagtgtataatctcactgtgagggccaaagacaagggaaagccagtttctctgtcttctacttgctatgttgaagttgaggtggttgatgtgaatgagaacctgcacccacccgtgttttccagctttgtggaaaaggggacagtgaaagaagatgcacctgttggttcattggtaatgacggtgtcggctcatgatgaggacgccagaagagatggggagatccgatactccattagagatggctctggcgttggtgttttcaaaataggtgaagagacaggtgtcatagagacgtcagatcgactggaccgtgaatcgacctcccattattggctaacagtctttgcaaccgatcagggtgtcgtgcctctttcatcgttcatagagatctacatagaggttgaggatgtcaatgacaatgcaccacagacatcagagcctgtttattacccagaaatcatggaaaattctcctaaagatgtatctgtggtccagatcgaggcatttgatccagattcgagctctaatgacaagctcatgtacaaaattacaagtggaaatccacaaggattcttttcaatacatcctaaaacaggtctcatcacaactacgtcaaggaagctagaccgagaacagcaagatgaacacatattagaggttactgtgacagacaatggtagtccccccaaatcaaccattgcaagagtcattgtgaaaatccttgatgaaaatgacaacaaacctcagtttctgcaaaagttctacaaaatcagactccctgagcgggaaaagccagaccgagaaagaaatgccagacgggagccgctctatcacgtcatagccaccgacaaggatgagggccccaatgcagaaatctcctacagcatcgaagacgggaatgagcatggcaaatttttcatcgaaccgaaaactggagtggtttcgtccaagaggttttcagcagctggagaatatgatattctttcaattaaggcagttgacaatggtcgccctcaaaagtcatcaaccaccagactccatattgaatggatctccaagcccaaaccgtccctggagcccatttcatttgaagaatcattttttacctttactgtgatggaaagtgaccccgttgctcacatgattggagtaatatctgtggagcctcctggcatacccctttggtttgacatcactggtggcaactacgacagtcacttcgatgtggacaagggaactggaaccatcattgttgccaaacctcttgatgcagaacagaagtcaaactacaacctcacagtcgaggctacagatggaaccaccactatcctcactcaggtattcatcaaagtaatagacacaaatgaccatcgtcctcagttttctacatcaaagtatgaagttgttattcctgaagatacagcgccagaaacagaaattttgcaaatcagtgctgtggatcaggatgagaaaaacaaactaatctacactctgcagagcagtagagatccactgagtctcaagaaatttcgtcttgatcctgcaaccggctctctctatacttctgagaaactggatcatgaagctgttcaccagcacaccctcacggtcatggtacgagatcaagatgtgcctgtaaaacgcaactttgcaaggattgtggtcaatgtcagcgacacgaatgaccacgccccgtggttcaccgcttcctcctacaaagggcgggtttatgaatcggcagccgttggctcagttgtgttgcaggtgacggctctggacaaggacaaagggaaaaatgctgaagtgctgtactcgatcgagtcaggaaatattggaaattcttttatgattgatcctgtcttgggctctattaaaactgccaaagaattagatcgaagtaaccaagcggagtatgatttaatggtaaaagctacagataagggcagtccaccaatgagtgaaataacttctgtgcgtatctttgtcacaattgctgacaacgcctctccgaagtttacatcaaaagaatattctgttgaacttagtgaaactgtcagcattgggagtttcgttgggatggttacagcccatagtcaatcatcagtggtgtatgaaataaaagatggaaatacaggtgatgcttttgatattaatccacattctggaactatcatcactcagaaagccctggactttgaaactttgcccatttacacattgataatacaaggaactaacatggctggtttgtccactaatacaacggttctagttcacttgcaggatgagaatgacaacgcgccagtttttatgcaggcagaatatacaggactcattagtgaatcagcctcaattaacagcgtggtcctaacagacaggaatgtcccactggtgattcgagcagctgatgctgataaagactcaaatgctttgcttgtatatcacattgttgaaccatctgtacacacatattttgctattgattctagcactggtgctattcatacagtactaagtctggactatgaagaaacaagtatttttcactttaccgtccaagtgcatgacatgggaaccccacgtttatttgctgagtatgcagcgaatgtaacagtacatgtaattgacattaatgactgcccccctgtgtttgccaagccattatatgaagcatctcttttgttaccaacatacaaaggagtaaaagtcatcacagtaaatgctacagatgctgattcaagtgcattctcacagttgatttactccatcaccgaaggcaacatcggggagaagttttctatggactacaagactggtgctctcactgtccaaaacacaactcagttaagaagccgctacgagctaaccgttagagcttccgatggcagatttgccggccttacctctgtcaaaattaatgtgaaagaaagcaaagaaagtcacctaaagtttacccaggatgtctactctgcggtagtgaaagagaattccaccgaggccgaaacattagctgtcattactgctattgggaatccaatcaatgagcctttgttttatcacatcctcaacccagatcgcagatttaaaataagccgcacttcaggagttctgtcaaccactggcacgcccttcgatcgtgagcagcaggaggcgtttgatgtggttgtagaagtgacagaggaacataagccttctgcagtggcccacgttgtcgtgaaggtcattgtagaagaccaaaatgataatgcgccggtgtttgtcaaccttccctactacgccgttgttaaagtggacactgaggtgggccatgtcattcgctatgtcactgctgtagacagagacagtggcagaaacggggaagtgcattactacctcaaggaacatcatgaacactttcaaattggacccttgggtgaaatttcactgaaaaagcaatttgagcttgacaccttaaataaagaatatcttgttacagtggttgcaaaagatggagggaacccggccttttcagcggaagttatcgttccgatcactgtcatgaataaagccatgcctgtgtttgaaaaacctttctacagtgcagagattgcagagagcatccaggtgcacagccctgtggtccacgtgcaggctaacagcccggaaggcctgaaagtgttctacagcatcacagacggagaccctttcagccagttcactattaacttcaatactggagttatcaatgtcatagctcctctggactttgaggcccacccggcatataagctgagcatacgcgcaactgactccttgacgggcgctcatgctgaagtatttgtggacatcatagtagacgacatcaatgataaccctcctgtgtttgctcagcagtcttatgcggtgaccctgtctgaggcatctgtaattggaacgtctgttgttcaagttagagccaccgattctgattcagaaccaaatagaggaatctcataccagatgtttgggaatcacagcaagagtcatgatcattttcatgtagacagcagcactggcctcatctcactactcagaaccctggattacgagcagtcccggcagcacacgatttttgtgagggcagttgatggtggtatgcccacgctgagcagtgatgtgattgtcacggtggacgttaccgacctcaatgataatccaccactctttgaacaacagatttatgaagccagaattagcgagcacgcccctcatgggcatttcgtgacctgtgtaaaagcctatgatgcagacagttcagacatagacaagttgcagtattccattctgtctggcaatgatcataaacattttgtcattgacagtgcaacagggattatcaccctctcaaacctgcaccggcacgccctgaagccattttacagtcttaacctgtcagtgtctgatggagtttttagaagttccacccaggttcatgtaactgtaattggaggcaatttgcacagtcctgctttccttcagaacgaatatgaagtggaactagctgaaaacgctcccctacataccctggtgatggaggtgaaaactacggatggggattctggtatttatggtcacgttacttaccatattgtaaatgactttgccaaagacagattttacataaatgagagaggacagatatttactttggaaaaacttgatcgagaaaccccggcggagaaagtgatctcagtccgtttaatggctaaggatgctggaggaaaagttgctttctgcaccgtgaatgtcatccttacagatgacaatgacaatgcaccacaatttcgagcaaccaaatacgaagtgaatatcgggtccagtgctgctaaagggacttcagtcgttaaagttcttgcaagtgatgccgatgagggctccaatgccgacatcacctatgccattgaagcagactctgaaagtgtaaaagagaatttggaaattaacaaactgtccggcgtaatcactacaaaggagagcctcattggcttggaaaatgaattcttcactttctttgttagagctgtggataatgggtctccatcaaaagaatctgttgttcttgtctatgttaaaatccttccaccggaaatgcagcttccaaaattttcagaacctttctatacctttacagtgtcagaggacgtgcctattggaacagagatagatctcatccgagcagaacatagtgggactgttctttacagcctggtcaaagggaatactccagaaagcaatagggatgagtcctttgtgattgacagacagagcgggagactgaagttggagaagagtcttgatcatgagacaactaagtggtatcagttttccatactggccaggtgcactcaagatgaccatgagatggtggcttctgtagatgttagtatccaagtgaaagatgcaaatgacaacagcccggtctttgaatctagtccatatgaggcattcattgttgaaaacctgccagggggaagtagagtaattcagatcagggcatctgatgctgactcaggaaccaacggccaagttatgtatagcctggatcagtcacaaagtgtggaagtcattgaatcctttgccattaacatggaaacaggctggattacaactttaaaggaacttgaccatgaaaagagagacaattaccagattaaagtggttgcatcagatcatggtgaaaagatccagctatcctccacagccattgtggatgttaccgtcaccgatgtcaacgatagtccaccacgattcacggccgagatctataaagggactgtgagtgaggatgacccccaaggtggggtgattgccatcttaagtaccacggatgctgattctgaagagatcaacagacaagttacatatttcataacaggaggggatcctttaggacagtttgccgttgaaactatacagaatgaatggaaggtatatgtgaagaaacctctagacagggaaaaaagggacaattaccttcttactatcacggcaactgatggcaccttctcatcaaaagcgatagttgaagtgaaagttctggatgcaaatgacaacagtccagtttgtgaaaagactttatattcagacactattcctgaagacgtccttcctggaaaattgatcatgcagatctctgctacagacgcagacatccgctctaacgctgaaattacttacacgttattgggttcaggtgcagaaaaattcaaactaaatccagacacaggtgaactgaaaacgtcaaccccccttgatcgtgaggagcaagctgtttatcatcttctcgtcagggccacagatggaggaggaagattctgccaagccagtattgtgctcacgctagaagatgtgaacgataacgcccccgaattctctgccgatccttatgccatcaccgtgtttgaaaacacagagccgggaacgctgctgacaagagtgcaggccacagatgccgacgcaggattaaatcggaagattttatactcactgattgactctgctgatgggcagttctccattaacgaattatctggaattattcagttagaaaaacctttggacagagaactccaggcagtatacaccctctctttgaaagctgtggatcaaggcttgccaaggaggctgactgccactggcactgtgattgtatcagttcttgacataaatgacaacccccctgtgtttgagtaccgtgaatatggtgccaccgtgtctgaggacattcttgttggaactgaagttcttcaagtgtatgcagcaagtcgggatattgaagcaaatgcagaaatcacctactcaataataagtggaaatgaacatgggaaattcagcatagattctaaaacaggggccgtatttatcattgagaatctggattatgagagctctcatgagtattacctaacagtagaggccactgatggaggcacgccttcactgagcgacgttgccactgtgaacgttaatgtaacagatatcaacgataatacccctgtgttcagccaagacacctacacgacagtcatcagtgaagatgccgttcttgagcagtctgtcatcacggttatggccgatgatgccgatggaccttccaacagccacatccactactcaattatagatggcaaccaaggaagctcgttcacaattgaccccgtcaggggagaagtcaaagtgaccaaacttctcgaccgagaaacgatttcaggttacacgctcacggttcaagcttctgataatggcagtccacccagagtcaacacgacgaccgtgaacatcgatgtgtccgatgtcaatgacaacgcgcccgtcttctccaggggaaactacagtgtcattatccaggaaaataagccagtgggcttcagcgtgctgcagctggtagtaacagatgaggattcttcccataacggtccacccttcttctttactattgtaactggaaatgatgagaaggcttttgaagttaacccgcaaggagtcctcctgacatcatctgccatcaagaggaaggagaaagatcattacttactgcaggtgaaggtggcagataatggaaagcctcagttgtcatctttgacatacattgacattagggtaattgaggagagcatctatccgcctgcgattttgcccctggagattttcatcacctcttctggagaagaatactcaggtggcgtcattgggaagatccatgccacagaccaggacgtgtatgatactctaacctacagtctcgaccctcagatggacaacctgttctctgtttccagcacagggggcaagctgatagcacacaaaaagctagacatagggcaataccttctcaatgtcagcgtaacagatgggaagttcacgacggtggccgacatcacagtgcatatcagacaagtcacacaggagatgttgaaccacaccatcgcgatccgctttgccaacctcactccggaagaattcgttggtgactactggcgcaacttccagcgagctttacggaacatcctgggtgtgaggaggaacgacatacagattgttagtttgcagtcctctgaacctcacccacatctggacgtcttactttttgtagagaaaccaggtagtgctcagatctcaacaaaacaacttctgcacaagattaactcttccgtgactgacattgaggaaatcattggagttaggatactgaatgtattccagaaactctgcgcgggactggactgcccctggaagttctgcgatgaaaaggtgtctgtggatgaaagtgtgatgtcaacacacagcacagccagactgagttttgtgactccccgccaccacagggcagcggtgtgtctctgcaaagagggaaggtgcccacctgtccaccatggctgtgaagatgatccgtgccctgagggatccgaatgtgtgtctgatccctgggaggagaaacacacctgtgtctgtcccagcggcaggtttggtcagtgcccagggagttcatctatgacactgactggaaacagctacgtgaaataccgtctgacggaaaatgaaaacaaattagagatgaaactgaccatgaggctcagaacatattccacgcatgcggttgtcatgtatgctcgaggaactgactatagcatcttggagattcatcatggaaggctgcagtacaagtttgactgtggaagtggccctggaattgtctctgttcagagcattcaggtcaatgatgggcagtggcacgcagtggccctggaagtgaatggaaactatgctcgcttggttctagaccaagttcatactgcatcgggcacagccccagggactctgaaaaccctgaacctggataactatgtgttttttggtggccacatccgtcagcagggaacaaggcatggaagaagtcctcaagttggtaatggtttcaggggttgtatggactccatttatttgaatgggcaggagctccctttaaacagcaaacccagaagctatgcacacatcgaagagtcggtggatgtatctccaggctgcttcctgacggccacggaagactgcgccagcaacccttgccagaatggaggcgtttgcaatccgtcacctgctggaggttattactgcaaatgcagtgccttgtacatagggacccactgtgagataagcgtcaatccgtgttcctccaagccatgcctctatgggggcacgtgtgttgtcgacaacggaggctttgtttgccagtgtagaggattatatactggtcagaggtgtcagcttagtccatactgcaaagatgaaccctgtaagaatggcggaacatgctttgacagtttggatggcgccgtttgtcagtgtgattcgggttttaggggagaaaggtgtcagagtgatatcgacgagtgctctggaaacccttgcctgcacggggccctctgtgagaacacgcacggctcctatcactgcaactgcagccacgagtacaggggacgtcactgcgaggatgctgcgcccaaccagtatgtgtccacgccgtggaacattgggttggcggaaggaattggaatcgttgtgtttgttgcagggatatttttactggtggtggtgtttgttctctgccgtaagatgattagtcggaaaaagaagcatcaggctgaacctaaagacaagcacctgggacccgctacggctttcttgcaaagaccgtattttgattccaagctaaataagaacatttactcagacataccaccccaggtgcctgtccggcctatttcctacaccccgagtattccaagtgactcaagaaacaatctggaccgaaattccttcgaaggatctgctatcccagagcatcccgaattcagcacttttaaccccgagtctgtgcacgggcaccgaaaagcagtggcggtctgcagcgtggcgccaaacctgcctcccccacccccttcaaactccccttctgacagcgactccatccagaagcctagctgggactttgactatgacacaaaagtggtggatcttgatccctgtctttccaagaagcctctagaggaaaagccttcccagccatacagtgcccgggaaagcctgtctgaagtgcagtctctgagctccttccagtccgaatcgtgcgatgacaatgggtatcactgggatacatcagattggatgccaagcgttcctctgccggacatacaagagttccccaactatgaggtgattgatgagcagacacccctgtactcagcagatccaaacgccatcgatacggactattaccctggaggctacgacatcgaaagtgattttcctccacccccagaagacttccccgcagctgatgagctaccaccgttaccgcccgaattcagcaatcagtttgaatccatccaccctcctagagacatgcctgccgcgggtagcttgggttcttcatcaagaaaccggcagaggttcaacttgaatcagtatttgcccaatttttatcccctcgatatgtctgaacctcaaacaaaaggcactggtgagaatagtacttgtagagaaccccatgccccttacccgccagggtatcaaagacacttcgaggcgcccgctgtcgagagcatgcccatgtctgtgtacgcctccaccgcctcctgctctgacgtgtcagcctgctgcgaagtggagtccgaggtcatgatgagtgactatgagagcggggacgacggccacttcgaagaggtgacgatcccgcccctggattcccagcagcacacggaagtctgactctcaactccccccaaagtgcctgactttagtgaacctagaggtgatgtgagtaatccgcgctgttctttgcagcagtgcttccaagctttttttggtgagccgaatgggcatggctgcgctggatcctgcgcctctggacgtgctagccatttccagtgtcccaactactgtcatcgtgaggttttcatcggctgtgccatttcccaacgtcttttgggatttacatctgtctgtgttaaaataatcaaacgaaaaatcagtcctgtgttgtcagcatgattcatgtatttatatagatttgattattttaattttcctgtctcttttttttgtaaattttatgtacagatttgatttttcatagttttaactagatttccaagatattttgtgcatttgtttcaactgaattttggtggtgtcagtgccattatctagcaccctgatttttttttttttactataaccagggtttcattctgtctttttccactgaagtgtgacattttgttagtacatttcagtgtagtcattcatttctagctgtacataggatgaaggagagatcagatacatgaacatgtcttacatgggttgctgtatttagaattataaacatttttcattattggaaagtgtaacggggaccttctgcatacctgtttagaaccaaaaccaccatgacacagtttttatagtgtctgtatatttgtgatgcaatggtcttgtaaaggtttttaatgaaaactaccattagccagtctttcttactgacaataaattattaataaaatacttgagctttaaaaaaaaaa

SEQ ID NO: 13296 - DNA, 4511 bp, Homo sapiens
gcagaggccgggctgagacgtggccaggggaacacggctggctgtccaggccgtcggggcggcagtagggtccctagcacgtccttgccttcttgggagctccaagcggcgggagaggcaggcgtcagtggctgcgcctccatgcctgcgcgcggggcgggacgctgatggagcgcgccatcagcccggggctgctggtacgggcgctgctgctgctgctgctgctgctggggctcgcggcaaggacggtggccgcggggcgcgcccgtggcctcccagcgccgacggcggaggcggcgttcggcctcggggcggccgctgctcccacctcagcgacgcgagtaccggcggcgggcgccgtggctgcggccgaggtgactgtggaggacgctgaggcgctgccggcagccgcgggagagcaggagcctcggggtccggaaccagacgatgagacagagttgcgaccgcgcggcaggtcattagtaattatcagcactttagatgggagaattgctgccttggatcctgaaaatcatggtaaaaagcagtgggatttggatgtgggatccggttccttggtgtcatccagccttagcaaaccagaggtatttgggaataagatgatcattccttccctggatggagccctcttccagtgggaccaagaccgtgaaagcatggaaacagttcctttcacagttgaatcacttcttgaatcttcttataaatttggagatgatgttgttttggttggaggaaaatctctgactacatatggactcagtgcatatagtggaaaggtgaggtatatctgttcagctctgggttgtcgccaatgggatagtgacgaaatggaacaagaggaagacatcctgcttctacagcgtacccaaaaaactgttagagctgtcggacctcgcagtggcaatgagaagtggaatttcagtgttggccactttgaacttcggtatattccagacatggaaacgagagccggatttattgaaagcacctttaagcccaatgagaacacagaagagtctaaaattatttcagatgtggaagaacaggaagctgccataatggacatagtgataaaggtttcggttgctgactggaaagttatggcattcagtaagaagggaggacatctggaatgggagtaccagttttgtactccaattgcatctgcctggttacttaaggatgggaaagtcattcccatcagtctttttgatgatacaagttatacatctaatgatgatgttttagaagatgaagaagacattgtagaagctgccagaggagccacagaaaacagtgtttacttgggaatgtatagaggccagctgtatctgcagtcatcagtcagaatttcagaaaagtttccttcaagtcccaaggctttggaatctgtcactaatgaaaacgcaattattcctttaccaacaatcaaatggaaacccttaattcattctccttccagaactcctgtcttggtaggatctgatgaatttgacaaatgtctcagtaatgataagttttctcatgaagaatatagtaatggtgcactttcaatcttgcagtatccatatgataatggttattatctaccatactacaagagggagaggaacaaacgaagcacacagattacagtcagattcctcgacaacccacattacaacaagaatatccgcaaaaaggatcctgttcttcttttacactggtggaaagaaatagttgcaacgattttgttttgtatcatagcaacaacgtttattgtgcgcaggcttttccatcctcatcctcacaggcaaaggaaggagtctgaaactcagtgtcaaactgaaaataaatatgattctgtaagtggtgaagccaatgacagtagctggaatgacataaaaaactctggatatatatcacgatatctaactgattttgagccaattcaatgcctgggacgtggtggctttggagttgtttttgaagctaaaaacaaagtagatgactgcaattatgctatcaagaggatccgtctccccaatagggaattggctcgggaaaaggtaatgcgagaagttaaagccttagccaagcttgaacacccgggcattgttagatatttcaatgcctggctcgaagcaccaccagagaagtggcaagaaaagatggatgaaatttggctgaaagatgaaagcacagactggccactcagctctcctagcccaatggatgcaccatcagttaaaatacgcagaatggatcctttctctacaaaagaacatattgaaatcatagctccttcaccacaaagaagcaggtctttttcagtagggatttcctgtgaccagacaagttcatctgagagccagttctcaccactggaattctcaggaatggaccatgaggacatcagtgagtcagtggatgcagcatacaacctccaggacagttgccttacagactgtgatgtggaagatgggactatggatggcaatgatgaggggcactcctttgaactttgtccttctgaagcttctccttatgtaaggtcaagggagagaacctcctcttcaatagtatttgaagattctggctgtgataatgcttccagtaaagaagagccgaaaactaatcgattgcatattggcaaccattgtgctaataaactaactgctttcaagcccaccagtagcaaatcttcttctgaagctacattgtctatttctcctccaagaccaaccactttaagtttagatctcactaaaaacaccacagaaaaactccagcccagttcaccaaaggtgtatctttacattcaaatgcagctgtgcagaaaagaaaacctcaaagactggatgaatggacgatgtaccatagaggagagagagaggagcgtgtgtctgcacatcttcctgcagatcgcagaggcagtggagtttcttcacagtaaaggactgatgcacagggacctcaagccatccaacatattctttacaatggatgatgtggtcaaggttggagactttgggttagtgactgcaatggaccaggatgaggaagagcagacggttctgaccccaatgccagcttatgccagacacacaggacaagtagggaccaaactgtatatgagcccagagcagattcatggaaacagctattctcataaagtggacatcttttctttaggcctgattctatttgaattgctgtatccattcagcactcagatggagagagtcaggaccttaactgatgtaagaaatctcaaatttccaccattatttactcagaaatatccttgtgagtacgtgatggttcaagacatgctctctccatcccccatggaacgacctgaagctataaacatcattgaaaatgctgtatttgaggacttggactttccaggaaaaacagtgctcagacagaggtctcgctccttgagttcatcgggaacaaaacattcaagacagtccaacaactcccatagccctttgccaagcaattagccttaagttgtgctagcaaccctaataggtgatgcagataatagcctacttcttagaatatgcctgtccaaaattgcagacttgaaaagtttgttcttcgctcaatttttttgtggactactttttttatatcaaatttaagctggatttgggggcataacctaatttgagccaactcctgagttttgctatacttaaggaaagggctatctttgttctttgttagtctcttgaaactggctgctggccaagctttatagccctcaccatttgcctaaggaggtagcagcaatccctaatatatatatatagtgagaactaaaatggatatatttttataatgcagaagaaggaaagtccccctgtgtggtaactgtattgttctagaaatatgctttctagagatatgatgattttgaaactgatttctagaaaaagctgactccatttttgtccctggcgggtaaattaggaatctgcactattttggaggacaagtagcacaaactgtataacggtttatgtccgtagttttatagtcctatttgtagcattcaatagctttattccttagatggttctagggtgggtttacagctttttgtacttttacctccaataaagggaaaatgaagctttttatgtaaattggttgaaaggtctagttttgggaggaaaaaagccgtagtaagaaatggatcatatatattacaactaacttcttcaactatggactttttaagcctaatgaaatcttaagtgtcttatatgtaatcctgtaggttggtacttcccccaaactgattataggtaacagtttaatcatctcacttgctaacatgtttttatttttcactgtaaatatgtttatgttttatttataaaaattctgaaatcaatccatttgggttggtggtgtacagaacacacttaagtgtgttaacttgtgacttctttcaagtctaaatgatttaataaaactttttttaaatt

SEQ ID NO: 13297 - DNA, 3575 bp, Homo sapiens
agattgcgcgagggggagcgagcgagcgggcgctgccaggagcccgcagccctggcgcccgccgccgcccggagccccgcaatatgccgccgcggccctctggctctaggccatggcgaggctctgccggcgtgtcccctgcaccctgcttctcggcctggccgtggtgctgctgaaagcgcggctggtccccgcggccgccagagcggaactcagccgctccgacctcagcctcatccaacagcagcagcagcagcagcagcagcaacaacaacaacaacagcaaaagcagctggaggaggctgaggaggagaggacagaggtgcctggggcaacctccaccttgacggttccagtgtctgtatttatgttgaaagtccaggtgaatgacatcatcagtcgtcagtacctgagccaagcagttgtagaagtgtttgtaaactacacgaagacaaattccacagtaactaaaagcaatggagcagtgctgataaaagtaccctacaaattaggacttagtttaactattattgcttacaaagatggctacgtgttgacccctctgccttggaaaaccagaagaatgccaatatattcatcagttacactttcactgttcccgcaaagccaagcaaatatatggctatttgaagacactgttttaattactggaaaattagctgatgccaagtctcaaccaagtgttcagttttcaaaagccttaattaaacttcctgacaaccatcatattagcaacgttactggctatcttacagttctacaacagtttttgaaagtggacaattttctgcatacaactggaattactctcaataaaccaggttttgaaaacattgaattgactcctcttgctgcaatatgtgtgaaaatatattctggaggaaaagaactaaaggtcaatggctctattcaagtttctcttcctcttctacgtctgaatgatataagtgcaggggatcgcatacctgcttggacatttgatatgaacacaggtgcttggataaatcatggtcggggaatggtcaaggaacataacaatcatttaatctggacatatgatgcaccacatttggggtactggatagcagctccacttccaggaactagaggttcaggtataaatgaagattccaaggacataactgcctaccacacagtgtttcttacagccatattaggaggaacaatagtcattgtcattggattttttgctgtactactttgttattgcagggacaagtgtggtactccacagaaaagagaaagaaatatcactaaacttgaggtcctcaagagagaccagacaacttcaacaacacacataaatcatatcagtacagttaaagttgcattaaaagctgaggacaagtcgcagttattcaatgccaaaaactcctcatatagtcctcagaaaaaggaaccatcaaaggcagaaacagaagaaagagtttccatggtaaaaactcgggacgattttaaaatctacaatgaagatgtttcatttctatcagtcaatcaaaataattactcaagaaacccaacacagtctttggagcccaatgtagggtccaaacaacctaaacatattaacaacaatctatcttcatctctaggtgatgctcaagatgaaaagaggtatctcacaggtaatgaggaggcgtatgggcgttcccatattcctgaacagcttatgcatatttacagccaacccattgccatccttcaaacatctgaccttttctccacaccggaacaattacatactgctaagtcagctactttgccaagaaagggacagttagtctatggccaattgatggaaccagtaaatcgagagaactttacgcagaccttgcccaaaatgccaattcattcccatgcacagcccccagatgccagggaagaggatatcatacttgaaggtcaacagagcctgccatcccaggcttcagattggagccgatactcaagcagcttactggaatccgtctctgttcctggaacactaaatgaggctgttgtaatgactccattttcatcggaacttcaaggaatttcagaacagaccctcctggagctgtccaaaggaaagccctccccgcatcccagagcctggtttgtgtctcttgatggaaagccagttgcacaagtgaggcactcctttatagacctgaaaaagggcaagagaacccagagcaatgacaccagtctggactctggggtggacatgaatgagcttcactcaagtagaaagctcgagagggagaaaacattcatcaaaagcatgcatcagcccaagatcctttacttagaagatttagacctaagcagcagtgagagtggaaccaccgtctgttcccctgaagacccagctttaaggcacatcctagatggagggagtggagtgatcatggagcaccctggagaagagtcgccaggaaggaaaagcactgttgaagattttgaagctaatacatcccccactaaaagaaggggcagaccaccactagccaaaagagatagcaagactaacatctggaagaagcgagaggaacgcccactgattcccataaattaactccaatggggattgtgtgtctgctgtctcgtgctgtttattcttgcttcttgttgtaaattgcagtacgaacttaagaaaatgagactgagcaatctcatggttcttggacatgtctcaagcagagtaaatggtaattcagtaatcagagagaaagataccaaggaatgctttttctggcctattcatttatttttgggtgatgaatttacagtatctaagttttcaaaatgtaaaatagcttcaagatgttagttatctgaaaatgttgctcagccagccagtttggccttgactctcttaagaataacagtgaaatatatactcctcaagttgcctccaaaaatgttgcctctaccatggtgactaccccatggaacatttagaaacaaaactgacttcaggcatcatattattttaaatgttactattacgtcttcttctgcctatacttaaaaataacttgataaatgacttggactgatgttactctggagttatcacaaagaaaatgttgtttggtctttaaagagcatgtgtattgtatcatcccaaacgtaaatcctacatttatataagatgggcaagaagctacttggtcattagagagggagacaccagctctttggttgtttttggatataactttacaaaataagtaagatgttaatttagaaatttgagaaattaatgctctaatactgagtttttatttaaaaattattttttcttcccctcaacaatgaagcaagcttagctgtcaagggaaactttttacaaatctgaaaaaaacaatctatgactttggtttaaggctcactgatacttttaggctaaattggttttaatatatttcttctattctaaaaacctgaactcagtcacttaaaggctatgaaatttaaaaaaaaagtcgatgtgaaagtttcttttgaacactaaaataaaatatgtgcagataaaaaaaaaaaaaaaa

SEQ ID NO: 13298 - DNA, 4338 bp, Homo sapiens
ggggcacactcatgcattcctgtcaagtcatcttgtgaaaggctgcctgcttccagcttggcttggatgtgcaaccttaataaaactcactgaggtctgggagaaaatagcagatctgcagcagatagggtagaggaaagggtctagaatatgtacacgcagctgactcaggcaggctccatgctgaacggtcacacagagaggaaacaataaatctcagctactatgcaataaatatctcaagttttaacgaagaaaaacatcattgcagtgaaataaaaaattttaaaattttagaacaaagctaacaaatggctagttttctatgattcttcttcaaacgctttctttgagggggaaagagtcaaacaaacaagcagttttacctgaaataaagaactagttttagaggtcagaagaaaggagcaagttttgcgagaggcacggaaggagtgtgctggcagtacaatgacagttttcctttcctttgctttcctcgctgccattctgactcacatagggtgcagcaatcagcgccgaagtccagaaaacagtgggagaagatataaccggattcaacatgggcaatgtgcctacactttcattcttccagaacacgatggcaactgtcgtgagagtacgacagaccagtacaacacaaacgctctgcagagagatgctccacacgtggaaccggatttctcttcccagaaacttcaacatctggaacatgtgatggaaaattatactcagtggctgcaaaaacttgagaattacattgtggaaaacatgaagtcggagatggcccagatacagcagaatgcagttcagaaccacacggctaccatgctggagataggaaccagcctcctctctcagactgcagagcagaccagaaagctgacagatgttgagacccaggtactaaatcaaacttctcgacttgagatacagctgctggagaattcattatccacctacaagctagagaagcaacttcttcaacagacaaatgaaatcttgaagatccatgaaaaaaacagtttattagaacataaaatcttagaaatggaaggaaaacacaaggaagagttggacaccttaaaggaagagaaagagaaccttcaaggcttggttactcgtcaaacatatataatccaggagctggaaaagcaattaaacagagctaccaccaacaacagtgtccttcagaagcagcaactggagctgatggacacagtccacaaccttgtcaatctttgcactaaagaaggtgttttactaaagggaggaaaaagagaggaagagaaaccatttagagactgtgcagatgtatatcaagctggttttaataaaagtggaatctacactatttatattaataatatgccagaacccaaaaaggtgttttgcaatatggatgtcaatgggggaggttggactgtaatacaacatcgtgaagatggaagtctagatttccaaagaggctggaaggaatataaaatgggttttggaaatccctccggtgaatattggctggggaatgagtttatttttgccattaccagtcagaggcagtacatgctaagaattgagttaatggactgggaagggaaccgagcctattcacagtatgacagattccacataggaaatgaaaagcaaaactataggttgtatttaaaaggtcacactgggacagcaggaaaacagagcagcctgatcttacacggtgctgatttcagcactaaagatgctgataatgacaactgtatgtgcaaatgtgccctcatgttaacaggaggatggtggtttgatgcttgtggcccctccaatctaaatggaatgttctatactgcgggacaaaaccatggaaaactgaatgggataaagtggcactacttcaaagggcccagttactccttacgttccacaactatgatgattcgacctttagatttttgaaagcgcaatgtcagaagcgattatgaaagcaacaaagaaatccggagaagctgccaggtgagaaactgtttgaaaacttcagaagcaaacaatattgtctcccttccagcaataagtggtagttatgtgaagtcaccaaggttcttgaccgtgaatctggagccgtttgagttcacaagagtctctacttggggtgacagtgctcacgtggctcgactatagaaaactccactgactgtcgggctttaaaaagggaagaaactgctgagcttgctgtgcttcaaactactactggaccttattttggaactatggtagccagatgataaatatggttaatttcatgtaaaacagaaaaaaagagtgaaaaagagaatatacatgaagaatagaaacaagcctgccataatcctttggaaaagatgtattataccagtgaaaaggtgttatatctatgcaaacctactaacaaattatactgttgcacaattttgataaaaatttagaacagcattgtcctctgagttggttaaatgttaatggatttcagaagcctaattccagtatcatacttactagttgatttctgcttacccatcttcaaatgaaaattccatttttgtaagccataatgaactgtagtacatggacaataagtgtgtggtagaaacaaactccattactctgatttttgatacagttttcagaaaaagaaatgaacataatcaagtaaggatgtatgtggtgaaaacttaccacccccatactatggttttcatttactctaaaaactgattgaatgatatataaatatatttatagcctgagtaaagttaaaagaatgtaaaatatatcatcaagttcttaaaataatatacatgcatttaatatttcctttgatattatacaggaaagcaatattttggagtatgttaagttgaagtaaaagcaagtactctggagcagttcattttacagtatctacttgcatgtgtatacatacatgtaacttcattattttaaaaatatttttagaactccaatactcaccctgttatgtcttgctaatttaaattttgctaattaactgaaacatgcttaccagattcacactgttccagtgtctataaaagaaacactttgaagtctataaaaaataaaataattataaatatcattgtacatagcatgtttatatctgcaaaaaacctaatagctaattaatctggaatatgcaacattgtccttaattgatgcaaataacacaaatgctcaaagaaatctactatatcccttaatgaaatacatcattcttcatatatttctccttcagtccattcccttaggcaatttttaatttttaaaaattattatcaggggagaaaaattggcaaaactattatatgtaagggaaatatatacaaaaagaaaattaatcatagtcacctgactaagaaattctgactgctagttgccataaataactcaatggaaatattcctatgggataatgtattttaagtgaatttttggggtgcttgaagttactgcattattttatcaagaagtcttctctgcctgtaagtgtccaaggttatgacagtaaacagtttttattaaaacatgagtcactatgggatgagaaaattgaaataaagctactgggcctcctctcataaaagagacagttgttggcaaggtagcaataccagtttcaaacttggtgacttgatccactatgccttaatggtttcctccatttgagaaaataaagctattcacattgttaagaaaaatactttttaaagtttaccatcaagtcttttttatatttatgtgtctgtattctacccctttttgccttacaagtgatatttgcaggtattataccatttttctattcttggtggcttcttcatagcaggtaagcctctccttctaaaaacttctcaactgttttcatttaagggaaagaaaatgagtattttgtccttttgtgttcctacagacactttcttaaaccagtttttggataaagaatactatttccaaactcatattacaaaaacaaaataaaataataaaaaaagaaagcatgatatttactgttttgttgtctgggtttgagaaatgaaatattgtttccaattatttataataaatcagtataaaatgttttatgattgttatgtgtattatgtaatacgtacatgtttatggcaatttaacatgtgtattcttttaattgtttcagaataggataattaggtattcgaattttgtctttaaaattcatgtggtttctatgcaaagttcttcatatcatcacaacattatttgatttaaataaaattgaaagtaatatttgtgcaa

SEQ ID NO: 13299 - DNA, 2367 bp, Homo sapiens
gcggccgcgatggggccgaagcgcccgaagccccggagcccacaaactgccgggcccgcctcgccgccgggacccgggtgcctgggctcggcttgaagcggcggcggcgcaccggcacagccgcgggagcatgggcaggaggatgcggggcgccgccgccaccgcggggctctggctgctggcgctgggctcgctgctggcgctgtggggagggctcctgccgccgcggaccgagctgcccgcctcccggccgcccgaagaccgactcccacggcgcccggcccggagcggcggccccgcgcccgcgcctcgcttccctctgcccccgcccctggcgtgggacgcccgcggcggctccctgaaaactttccgggcgctgctcaccctggcggccggcgcggacggcccgccccggcagtcccggagcgagcccaggtggcacgtgtcagccaggcagccccggccggaggagagcgccgcggtgcacgggggcgtcttctggagccgcggcctggaggagcaggtgcccccgggcttttcggaggcccaggcggcggcgtggctggaggcggctcgcggcgcccggatggtggccctggagcgcgggggttgcgggcgcagctccaaccgactggcccgttttgccgacggcacccgcgcctgcgtgcgctacggcatcaacccggagcagattcagggcgaggccctgtcttactatctggcgcgcctgctgggcctccagcgccacgtgccgccgctggcactggctcgggtggaggctcggggcgcgcagtgggcgcaggtgcaggaggagctgcgcgctgcgcactggaccgagggcagcgtggtgagcctgacacgctggctgcccaacctcacggacgtggtggtgcccgcgccctggcgctcggaggacggccgtctgcgccccctccgggatgccgggggtgagctggccaacctcagccaggcggagctggtggacctagtacaatggaccgacttaatccttttcgactacctgacggccaacttcgaccggctcgtaagcaacctcttcagcctgcagtgggacccgcgcgtcatgcagcgtgccaccagcaacctgcaccgcggtccgggcggggcgctggtctttctggacaatgaggcgggcttggtgcacggctaccgggtagcaggcatgtgggacaagtataacgagccgctgttgcagtcagtgtgcgtgttccgcgagcggaccgcgcggcgcgtcctggagctgcaccgcggacaggacgccgcggcccggctgctgcgcctctaccggcgccacgagcctcgcttccccgagctggccgcccttgcagacccccacgctcagctgctacagcgccgcctcgacttcctcgccaagcacattttgcactgtaaggccaagtacggccgccggtctgggacttagtgtcaccgggaggaaaagagagagatctggggctggggtatggatgatggggggaagggcggtcgcctctgccactgtcagggaccagccggccaacgcccacccgcaaaggtgtctaaaaacttcagcttttcacccacctgcccctttctttcaatcccacgctgtttcctttcaaagttctgggaggacgaactcaccgaggcgagaagtgtaacattctctccacccagcttataaaaggattctttactgtgccagcacggggattggatccgaagaaactggctactggggtttggcccccgagtggccgtccctgtgggagatgcaccccattcttgggcccccctcattccctttccgaaaaaggaaaacttgcgtttgagccgttgagctaattctgcaattttctaccaaacagagcgctggtggccccggagcagggctgtgacattggctggtggagccccttcctgtgttctccctttgttccagcgccgcgatggtgagatcactgttccaagcagggggacggctcgcgataggacaaagagagcaggacctccagactctggggagccctgcagaccttgacaatttgcctgactcattcctgacctcttgtcattttggcctgaaggctacaaattcagggtcagctgtatgcactaagtcaaataatgaatttcttcctccctctcgcaaccgaccaaaattttgacaacgatgatgttcaccagaaggaaaaaaaaatcagttttatgcactttattttgttttgattttcattttttattaagaaaaaattttattttacagaatttaccttctctgtatatatgtgcataaagtgtggtgtaaatatactaaacaaacttatatttcaataaaagggagtttaaaatttaaaaaaaaaaaaa

SEQ ID NO: 13300 - DNA, 735 bp, Homo sapiens
gctgcccctgaaccccagaacaaccagctggatcagttctcacaggagctacagcgcggagactgggaaacatggttccaaaactgttcacttcccaaatttgtctgcttcttctgttggggcttctggctgtggagggctcactccatgtcaaacctccacagtttacctgggctcaatggtttgaaacccagcacatcaatatgacctcccagcaatgcaccaatgcaatgcaggtcattaacaattatcaacggcgatgcaaaaaccaaaatactttccttcttacaacttttgctaacgtagttaatgtttgtggtaacccaaatatgacctgtcctagtaacaaaactcgcaaaaattgtcaccacagtggaagccaggtgcctttaatccactgtaacctcacaactccaagtccacagaatatttcaaactgcaggtatgcgcagacaccagcaaacatgttctatatagttgcatgtgacaacagagatcaacgacgagaccctccacagtatccggtggttccagttcacctggatagaatcatctaagctcctgtatcagcactcctcatcatcactcatctgccaagctcctcaatcatagccaagatcccatctctccatatactttgggtatcagcatctgtcctcatcagtctccataccccttcagctttcctgagctgaagtgccttgtgaaccctgcaataaactgctttgcaaattc

SEQ ID NO: 13301 - DNA, 2136 bp, Homo sapiens
gccctggaggcccggcctggccgctcccggccctggggtgcacatcggccctgagtcccgtcccaggctctgggctcgggcagccgccgccaccgctgcccaggacgtcgggcctcctgccttcctcccaggcccccacgttgctggccgcctggccgagtggccgccatgctcctgccttgggccacctctgcccccggcctggcctgggggcctctggtgctgggcctcttcgggctcctggcagcatcgcagccccaggcggtgcctccatatgcgtcggagaaccagacctgcagggaccaggaaaaggaatactatgagccccagcaccgcatctgctgctcccgctgcccgccaggcacctatgtctcagctaaatgtagccgcatccgggacacagtttgtgccacatgtgccgagaattcctacaacgagcactggaactacctgaccatctgccagctgtgccgcccctgtgacccagtgatgggcctcgaggagattgccccctgcacaagcaaacggaagacccagtgccgctgccagccgggaatgttctgtgctgcctgggccctcgagtgtacacactgcgagctactttctgactgcccgcctggcactgaagccgagctcaaagatgaagttgggaagggtaacaaccactgcgtcccctgcaaggcagggcacttccagaatacctcctcccccagcgcccgctgccagccccacaccaggtgtgagaaccaaggtctggtggaggcagctccaggcactgcccagtccgacacaacctgcaaaaatccattagagccactgcccccagagatgtcaggaaccatgctgatgctggccgttctgctgccactggccttctttctgctccttgccaccgtcttctcctgcatctggaagagccacccttctctctgcaggaaactgggatcgctgctcaagaggcgtccgcagggagagggacccaatcctgtagctggaagctgggagcctccgaaggcccatccatacttccctgacttggtacagccactgctacccatttctggagatgtttccccagtatccactgggctccccgcagccccagttttggaggcaggggtgccgcaacagcagagtcctctggacctgaccagggagccgcagttggaacccggggagcagagccaggtggcccacggtaccaatggcattcatgtcaccggcgggtctatgactatcactggcaacatctacatctacaatggaccagtactggggggaccaccgggtcctggagacctcccagctacccccgaacctccataccccattcccgaagagggggaccctggccctcccgggctctctacaccccaccaggaagatggcaaggcttggcacctagcggagacagagcactgtggtgccacaccctctaacaggggcccaaggaaccaatttatcacccatgactgacggagtctgagaaaaggcagaagaaggggggcacaagggcactttctcccttgaggctgccctgcccacgtgggattcacaggggcctgagtagggcccggggaagcagagccctaagggattaaggctcagacacctctgagagcaggtgggcactggctgggtacggtgccctccacaggactctccctactgcctgagcaaacctgaggcctcccggcagacccacccaccccctggggctgctcagcctcaggcacggacagggcacatgataccaactgctgcccactacggcacgccgcaccggagcacggcaccgagggagccgccacacggtcacctgcaaggacgtcacgggcccctctaaaggattcgtggtgctcatccccaagcttcagagaccctttggggttccacacttcacgtggactgaggtagaccctgcatgaagatgaaattatagggaggacgctccttccctcccctcctagaggagaggaaagggagtcattaacaactagggggttgggtaggattcctaggtatggggaagagttttggaaggggaggaaaatggcaagtgtatttatattgtaaccacatgcaaataaaaagaatgggacctaaactcgtgccgctcgtgccgaattcctgcag

SEQ ID NO: 13302 - DNA, 3040 bp, Homo sapiens
aaatcctcctcctccgccatcatccgccgcggtgcggagagcaggtggtgctggaagcgcgtgaggccgggagctcgagagagctaacagactagccggctggacatctggaccgctggatccggaggtggcgaccccggcctgacccggaccctaaatccgtccccgccccagagggcggaggcgcgcgctcgattccccccacgcggcggcgccgcctgtttacgtctgcagatctccaggggagcccaccagcctagtcaacatggcctcggaagacattgccaagctggcagagacacttgccaagactcaggtggccgggggacagctgagtttcaaaggcaagagcctcaaactcaacactgcagaagatgctaaagatgtgattaaagagattgaagactttgacagcttggaggctctgcgtctggaaggcaacacagtgggcgtggaagcagccagggtcatcgccaaggccttagagaagaagtcggagttgaagcgctgccactggagtgacatgttcacgggaaggctgcggaccgagatcccaccagccctgatctcactaggggaaggactcatcacagctggggctcagctggtggagctggacttaagcgacaacgcattcgggcccgacggtgtgcaaggcttcgaggccctgctcaagagctcagcctgcttcaccctgcaggaactcaagctcaacaactgtggcatgggcattggcggcggcaagatcctggctgcagctctgaccgaatgtcaccggaaatccagtgcccaaggcaagcctctggccctgaaggtctttgtggctggcagaaaccgtctggagaatgatggcgccactgccttggcagaagcttttagggtcatcgggaccctggaggaggtccacatgccacagaatgggatcaaccaccctggcatcactgccctggcccaggctttcgctgtcaaccccctgctgcgggtcatcaacctgaatgacaacaccttcactgagaagggcgccgtggccatggccgagaccttgaagaccttgcggcaggtggaggtgattaattttggggactgcctggtgcgctccaagggtgcagttgccattgcagatgccatccgcggcggcctgcccaagctaaaggagctgaacttgtcattctgtgaaatcaagagggatgctgccctggctgttgctgaggccatggcagacaaagctgagctggagaagctggacctgaatggcaacaccctgggagaagaaggctgtgaacagcttcaggaggtgctggagggcttcaacatggccaaggtgctggcgtccctcagtgatgacgaggacgaggaggaggaggaggaaggagaagaggaagaagaggaagcagaagaagaggaggaggaagatgaggaagaggaggaagaagaggaggaggaggaggaagaagagcctcagcagcgagggcagggagagaagtcagccacgccctcacggaagattctggaccctaacactggggagccagctcccgtgctgtcctccccacctcctgcagacgtctccaccttcctggcttttccctctccagagaagctgctgcgcctagggcccaagagctccgtgctgatagcccagcagactgacacgtctgaccccgagaaggtggtctctgccttcctaaaggtgtcatctgtgttcaaggacgaagctactgtgaggatggcagtgcaggatgcagtagatgccctgatgcagaaggctttcaactcctcgtccttcaactccaacaccttcctcaccaggctgctcgtgcacatgggtctgctcaagagtgaagacaaggtcaaggccattgccaacctgtacggccccctgatggcgctgaaccacatggtgcagcaggactatttccccaaggcccttgcacccctgctgctggcgttcgtgaccaagcccaacagcgccctggaatcctgctccttcgcccgccacagtctgctgcagacgctgtacaaggtctagactcaaagcctctcccatcccttggcctggaccagtgagctggggagggactcggatgaactgaggcgcagcctacgccattgccttggacaggactctggccacaggcagggcgggtctgtgtcccatgtgtcctgtcagtcccctgagtatgtgtgtgggtgtggcgcatgtgcaggtctgtgcctcctgtcgggatttgggttttaacgtcttctgctggcccagccctgctctgttgtggggagttggcccccaggggaaagggctgtgagctgctccgccattaaactcacctccacctgagggcgctctgctgatctccgcctgggccctgatggccgtccccacccacctgccttccggcccggctccctggcggagccagaacccagggagttgcccgcgtgctgtccttcccctctgtgttgtgattgggttgtttcctgccctgcctggggctgcttctcgtcaccaagccctggtcctgcggcagctgtcacccctaccatccataccactgtgctgaccgctcagcctgaagagcagagaatgccatgggtgggactgtgggggtcggatcgtggggttgttggcagagggcaaccctgggccccacaccgtgtggacaggcagacaccagattgtccaggagcaggagctgctgggactgcgctggccccggacctagtgggccttctcctggctgctgagatgtcgtctgtgactggcctggctggagggggagtgttgacaacccaaagctgttctccagtctggggagggagaggcagggtccccaatgtccgagctgcatctggacgctgctcttaaaggacctcctggggcaggggagcggtagggtctggactgggcagatgctgtatgacctccctgagcacccgtgactgccccatgctttcccctttgtgctctgtgtgtgtctgggctgtgcccgggggcttcacaaataaagtcgtgtggcagcttcaaaaaaaaaaaaaaaaaaaa

SEQ ID NO: 13303 - DNA, 5626 bp, Homo sapiens
ggtcgctgccggagctcgccggtcgcccctgcgctgcgcggaccgcagccacagccggactggtgggaacggcggcgacagacggattggctgacagtcccagccctcagaacagccccggcctcgaagcgttggcgtctgcgtccgcgtcagcgtccgcttgtcccggagccggggcaggtgcgcgcggggggcgctccagggaccgcgctgaggccgcagacgccgcccgccgagccccgccccctgctcgccgaactcagctccccgttcgccgtcggggcgtccccgggcccaggggcggcggcggagctgatgtgcgcccgctgagcgcccccggcccgccatggccgcgcgccccggaccgctctggcttctgggcctgacgttgtgcgcgctgggcgggggcggccccggcctgcgacccccgcccggctgtccccagcgacgtctgggcgcgcgcgagcgccgggacgtgcagcgcgagatcctggcggtgctcgggctacccgggcggccccggccccgcgcgccacccgccgcctcccggctgcccgcgtccgcgccgctcttcatgctggacctgtaccacgccatggctggcgacgacgacgaggacggcgcgcccgcggagcagcgcctgggccgcgccgacctggtcatgagcttcgtcaacatggtggagcgagaccgtgccctgggccaccaggagccccattggaaggagttccgctttgacctgacccagatcccggctggggaggcggtcacagctgcggagttccggatttacaaggtgcccagcatccacctgctcaacaggaccctccacgtcagcatgttccaggtggtccaggagcagtccaacagggagtctgacttgttctttttggatcttcagacgctccgagctggagacgagggctggctggtgctggatgtcacagcagccagtgactgctggttgctgaagcgtcacaaggacctgggactccgcctctatgtggagactgaggatgggcacagcgtggatcctggcctggccggcctgctgggtcaacgggccccacgctcccaacagcctttcgtggtcactttcttcagggccagtccgagtcccatccgcacccctcgggcagtgaggccactgaggaggaggcagccgaagaaaagcaacgagctgccgcaggccaaccgactcccagggatctttgatgacgtccacggctcccacggccggcaggtctgccgtcggcacgagctctacgtcagcttccaggaccttggctggctggactgggtcatcgccccccaaggctactcagcctattactgtgagggggagtgctccttcccgctggactcctgcatgaacgccaccaaccacgccatcctgcagtccctggtgcacctgatgaagccaaacgcagtccccaaggcgtgctgtgcacccaccaagctgagcgccacctctgtgctctactatgacagcagcaacaacgtcatcctgcgcaagcaccgcaacatggtggtcaaggcctgcggctgccactgagtcagcccgcccagccctactgcagccacccttctcatctggatcgggccctgcagaggcagaaaacccttaaatgctgtcacagctcaagcaggagtgtcaggggccctcactctcggtgcctacttcctgtcaggcttctggtcctttctcggtacctctgtgcccctcccctggggtttgtggctgtcactctgcccgacactttggtggcctaaggcacacagcagcctcagagcctgtgctgactgcactgtctggagtcagcacagaagtcctatcttaggacctgtcagactgtggctggccccggatggtctgaggttggctgacccgagcttttctccattcaccagagggtttaggtgtgaggagaagggctctgcctcttcccaggtacaacactggccatttctgggcaaaattggacacgcttatgttctcagcacagtgtgttctgggattcttctcatttggtccagggtgcagttagcatattagaaaaagaataagctggacatccccacgaagccactggggattttttttttttttttccagatagagtctcactctgtcacccaggctggagtgcagtggtgcaatcctggctcactgcaacctctgcctcccaggttcaagcaattctcgtgcctcagcctcctgagtagctgggattacaggggcccaccaccacgcccagctcattcttgtatttttagtagagacggggtttcaccatatcggccaggctggtcttgaactcctgacctcaggtgatccacccgcccggcctcccaaagtgttgggatgacaggcatgagccaccgtgcctggccactggggatattttatgtcatgtgtattcccttgccctgggcctgccccttctcctgcctgggaaagaggtatgactcccacaggagcaaagaatcctgggggcttccagttccctccaccatctctaccatgctgacccatttggggctcagcactgagacagaggcaagaccagcagctccaacatgtagtgtaggctggcacagagcaaatgcccccgcagcctgctccccttgcccatggctcatgtcagtaatcaacctacgtacctttcccactgaaccaggacagggcctccaggcctcagcacagaactgcagacagccaccaccaggcattgtcaataagacctcagttccccctcctgccccactgcagagcaatccattccatccaaagcagggtgactggcagtctccggccaggcatggggcaagggtggggactgccagtgtttgcttgtgtctaggagttatgaacaagctggccaccaaaattggcgtcaccctgggtgcccaccagcgctgtcctgtgtcttgggtctgtgagtcaaagaaaaggtccctgtcccagggagtgacaggcagtaattaggctgagttgggtggggaggtttgtctcggcctccactgttcccggaaaccgctgttctccttggaacagccactgggagttggagtgtttatttgatttctgacttgctaagcctgtaatttacctgctggaacagacagagtccagctgcccaaaccgtgtcattaaaagcagatcctgggcccgccccatccacaggcacagcctggcagagtggttccacctccccatgggcccaaggatgcgcctctctggagttcacgtgctgcacccccagggaggggcctggggagagctggtccagcagcaggggtggaggctggggccacactgcgggacagcagcccctccacctggaccagggagggcctccatgtgcaagcgcagaggaagagaccctctcatgtacataaagggtgggcccaggctgtctggaagatggtgagttccccactagtctaaggcttcaagctcagctagcagagattggaagaggcaatggcctgagtgttaggagacaggtattctggttccaactcagccactgacttggtgtcaggacaagtcccctttcttattcacgcttcagtttctcatctgcaacatgaggacataggactctttaattccaaaggctcttccaacccagagaacccatctgcccccatgaccttctcccagagcttgagacatggcctgagccccctgctgccataggacttggggcctatctgccattgcaggacctgatttaacagctctcttcttccaatactgggcagtagagtttcggaaactgacaaatgtgtggtctcttcagtgcccagtgtgtaacctggcatggtttgggtgtgctaggagtttgtgaaatgaatgttttcaagacgcaaacgctgctatgcccatcaggtgtgcacagcaggcctgaggatcatgatgagactccctttttatgcagcaaagcacaaagtgtgacagtcgtggccttcctggtggccagacttctagcaactttagccacccaccaaatgacatcacatacagaaggcctcagaaagggaggaggtcgtaaggacacacagctgatgaagggtcagtgctcagctatcaaggtcatcttctggcctggttgcctcccacagcccaggatgcattcaaggctgcacatcaggagcataaataagggtggtcagctcaggcccactggctgcaacaagtagccactgacagggagtctggggccatttggtgcagaacaacccccaacccagtggccatcttcacaactgcagcacagtgctggccctaatgccaggtgagcgtgcaaagtcctgtttctttgtctttacatagggaccgggcgatgcgctttagagaaattccctattatttcacaggaaaggaggctgtgaaaaggagagggcaggttttggagccaagtcgacctggcatcaggtcctggctgcctttttttttttttttttaaagacatacatggtcttgctttgtcgcccaggctggagtgcagtggcagtgtcatggctcactgcagcctcaacctgctgggctcaagcaatcctcccacttcagcccgagttgctgggatgacaggcacacgccaccatacccagctaatttttaaattttttatagaaaccaggtctcactatgttgcccaggccggtcttaaactttgcccaggccagtcttgaactcctgagctcaagcaatcctcctgcctcagcctcccaaagtgctaggattacaggcgtgagccacttacccggcctctgcctcttgttaatttgaccacatcatgtacctgctgtgcccgttccttcctccgtagaagagggtgctggtcctgcccttttgaggcctccatgagggccaaatgtgccatgggacacttagtgccatgcctgcgcagacctgtggaataaacagcaattctgagcaggctcattttaaagggacttgcaaatttgggcgttccttgtgtgccttcctcataaaacccactcctcccagaatatgcttagaggtgctgctgtatttacctgagagctatgcttttcatcaaaaacctaaacgtgatcatctcttggatgaggtgtggccctgcacactcgcctgctcgtggaaggagtctgggccagcagtgacccacgcgctagggtctctgctgaggaagtggcaggtgtgcggccctgccctggccccgtagtgagtgtggggcccacctgtgccctcatgggcagctgaagggggagctttctaccccaggttcctttccttactgaaaagtcttgagcaaacagttgccgctctccaccccctgctttttaaaaaaaattttttctcacgtaagaaaatgttatctgtgtgctggggaaaattttgaaaataacaaaaaccagaatacaaacacccataatcaatcacagagataaccactgttcataattccttccagtcttcttacttggcacatatacatttgtctttctttatatatgacatatggatattttacaaagttaggatcctactctatgcactgcttggtgatcggatctattcaatgtacaaaatattttgaaagtttctgtgattaaatgttctttgaaaacataa

SEQ ID NO: 13304 - DNA, 3773 bp, Homo sapiens
actcgcgggaaccgcaccaagcgggtggctgcaggagctcgcccatcgcccctgcgctgctcggaccgcggccacagccggactggcgggtacggcggcgacagacggattggccgagagtcccagtccgcagagtagccccggcctcgaggcggtggcgtccgcgtcctctcgtccaggagccaggacaggtgtcgcgcggcgggcgctccagggaccgcgctgaggccgcggtcgccgcccgtcccgccccgccccgccgcccgccgcccgccgagcccagcctccttgccgtcggggcgtccccaggccctgggtcggccgcggagccgatgcgcgcccgctgagcgccccagctgagcgcccccggcctgccatgaccgcgctccccggcccgctctggctcctgggcctggcgctatgcgcgctgggcgggggcggccccggcctgcgacccccgcccggctgtccccagcgacgtctgggcgcgcgcgagcgccgggacgtgcagcgcgagatcctggcggtgctcgggctgcctgggcggccccggccccgcgcgccacccgccgcctcccggctgcccgcgtccgcgccgctcttcatgctggacctgtaccacgccatggccggcgacgacgacgaggacggcgcgcccgcggagcggcgcctgggccgcgccgacctggtcatgagcttcgttaacatggtggagcgagaccgtgccctgggccaccaggagccccattggaaggagttccgctttgacctgacccagatcccggctggggaggcggtcacagctgcggagttccggatttacaaggtgcccagcatccacctgctcaacaggaccctccacgtcagcatgttccaggtggtccaggagcagtccaacagggagtctgacttgttctttttggatcttcagacgctccgagctggagacgagggctggctggtgctggatgtcacagcagccagtgactgctggttgctgaagcgtcacaaggacctgggactccgcctctatgtggagactgaggacgggcacagcgtggatcctggcctggccggcctgctgggtcaacgggccccacgctcccaacagcctttcgtggtcactttcttcagggccagtccgagtcccatccgcacccctcgggcagtgaggccactgaggaggaggcagccgaagaaaagcaacgagctgccgcaggccaaccgactcccagggatctttgatgacgtccacggctcccacggccggcaggtctgccgtcggcacgagctctacgtcagcttccaggacctcggctggctggactgggtcatcgctccccaaggctactcggcctattactgtgagggggagtgctccttcccactggactcctgcatgaatgccaccaaccacgccatcctgcagtccctggtgcacctgatgatgccagacgcagtccccaaggcgtgctgtgcacccaccaagctgagcgccacctctgtgctctactatgacagcagcaacaatgtcatcctgcgcaagcaccgcaacatggtggtcaaggcctgcggctgccactgagtccacccgcccggcccagctgcagccacccttctcatctggatcgggcccctcagaagcaggaaaccctcaaacccagccagaccccaggccggggcattgccagggaggaccctcacaaccacgtacatgaccctttctccttcatgccaggctcctatgctccccttgccctgccaggcatttgtgtgactgtcctgtttccagcccaggtggtctcaatcatcaggcagtgttctacccaaatgcaaacgcctctcccggaggcatgtcctggctggttctttggggttggcacagaagtcctgtctgaggtcctatccatgccccttactggctcaggtcgtgagatagatgtggaatgacctgagaggcacctggagcccactgttggccaccttgagctcttcaccatccatcacagggtgtggtgtgtgtagtcagggtctggttggctccccattgcctgcccgaggtgcaaggtggggtataaaactggataacccctgaagtattgtatattcatggatctgaagcactgatccactggtcacaggtagacatgtggagtcaactcaagaaaaagctgagtgaacagcatgatttagggctaaagccaatggcatttatcttcccttgtcttcctgctttgcatttgcctctgccatctaggaaagacatgtaagagcatggacattttactttggagaaacagaaaaatcttggggcttccaattgacccatctatctgccaccatgttgccccaccaggagctcagctctgtggagttttccctttgctgagcaagcatgtggttgcattgggtggcccaggatgacaatgcacagcacagatgccatcatttccctttcccctctgaatggcagacatcagtaatcaatctggaatgtttttcttccaaatctgagtggaattttcaaatgatcagcacagccactgccaacagatatgatgtaaagtgaaacctggttgccatcttctgccatgctgaggagcagtccatccctgcccgagcatgtatcggcaacatgggcagcctgtgaccgggtctggggcgaggccaggggccatcaaaaacaggctgatcaccaaagtcagtgtcaccctggatgcccagcagccctgtcctgtgtcttgggcctgtgagtcaaagaaaaggtccttttcagggagtgacaagtagtaattaggctgagttgggtggagaggtttgtctcagcctctgctgttctcggaaactgctgttctccttggagcagccactgggagttggagtgtttatttgatttctgacttgctaagcctgtaatttacctgctggaatagacagagtccagctgcccaaaccgtgtcattaaaagcagatcctgcgcccgccccatccacaggcacagcccggcagagtggttccacctccccatgggcccaaggatgcgcctctctggagttcacgtgctgcacccccagggaggggcctggggaaagctggtccagcagcaggggtggaggctggggccacactgcgggacagcagcccctccacctggaccagggagggcctccatgtgcaagcgcagaggaagagaccctcccatgtacgcaaagggcagccccaggctgtctggaagttggagaattccctatcagcacagggatctcagctctggcctggaggtgaagagacctgccttgtaggtggcttccttatctgcgcctccattttctatctgcactttttgatctccaaacaaccttcagccaaagaatctgtctaccaactcctcatagtgagccagaagcagcctcataaccctgaatgtggggctctggtggctgtcacgaagcagagttggcacataacatggaacctggccaggcatggtggctcacacctataaccccagcactttgggaggccaaggcaggcagatcacctgaagtcaggagttcaagaccatcctggccaacacagtgaaaccccatctgtactaaaaatacaagattacctgggcatggtggtgcatgcctataatcccagctactcaggaggctgaggcagaattgcttgaacctgggaggtggaggttgcagtgagcagagatcacaacattgcacttcagcctggtgacatgagcaaaactgttgtctcaacaaaatgaaattatg

SEQ ID NO: 13305 - DNA, 2550 bp, Homo sapiens
acacacagccattgggggttgctcggatccgggactgccgcagggggtgccacagcagtgcctggcagcgtgggctgggaccttgtcactaaagcagagaagccacttcttctgggcccacgaggcagctgtcccatgctctgctgagcacggtggtgccatgcctctgcaactcctcctgttgctgatcctactgggccctggcaacagcttgcagctgtgggacacctgggcagatgaagccgagaaagccttgggtcccctgcttgcccgggaccggagacaggccaccgaatatgagtacctagattatgatttcctgccagaaacggagcctccagaaatgctgaggaacagcactgacaccactcctctgactgggcctggaacccctgagtctaccactgtggagcctgctgcaaggcgttctactggcctggatgcaggaggggcagtcacagagctgaccacggagctggccaacatggggaacctgtccacggattcagcagctatggagatacagaccactcaaccagcagccacggaggcacagaccactccactggcagccacagaggcacagacaactcgactgacggccacggaggcacagaccactccactggcagccacagaggcacagaccactccaccagcagccacggaagcacagaccactcaacccacaggcctggaggcacagaccactgcaccagcagccatggaggcacagaccactgcaccagcagccatggaagcacagaccactccaccagcagccatggaggcacagaccactcaaaccacagccatggaggcacagaccactgcaccagaagccacggaggcacagaccactcaacccacagccacggaggcacagaccactccactggcagccatggaggccctgtccacagaacccagtgccacagaggccctgtccatggaacctactaccaaaagaggtctgttcatacccttttctgtgtcctctgttactcacaagggcattcccatggcagccagcaatttgtccgtcaactacccagtgggggccccagaccacatctctgtgaagcagtgcctgctggccatcctaatcttggcgctggtggccactatcttcttcgtgtgcactgtggtgctggcggtccgcctctcccgcaagggccacatgtaccccgtgcgtaattactcccccaccgagatggtctgcatctcatccctgttgcctgatgggggtgaggggccctctgccacagccaatgggggcctgtccaaggccaagagcccgggcctgacgccagagcccagggaggaccgtgagggggatgacctcaccctgcacagcttcctcccttagctcactctgccatctgttttggcaagaccccacctccacgggctctcctgggccacccctgagtgcccagaccccattccacagctctgggcttcctcggagacccctggggatggggatcttcagggaaggaactctggccacccaaacaggacaagagcagcctggggccaagcagacgggcaagtggagccacctctttcctccctccgcggatgaagcccagccacatttcagccgaggtccaaggcaggaggccatttacttgagacagattctctcctttttcctgtcccccatcttctctgggtccctctaacatctcccatggctctccccgcttctcctggtcactggagtctcctccccatgtacccaaggaagatggagctcccccatcccacacgcactgcactgccattgtcttttggttgccatggtcaccaaacaggaagtggacattctaagggaggagtactgaagagtgacggacttctgaggctgtttcctgctgctcctctgacttggggcagcttgggtcttcttgggcacctctctgggaaaacccagggtgaggttcagcctgtgagggctgggatgggtttcgtgggcccaagggcagacctttctttgggactgtgtggaccaaggagcttccatctagtgacaagtgacccccagctatcgcctcttgccttcccctgtggccactttccagggtggactctgtcttgttcactgcagtatcccaactgcaggtccagtgcaggcaataaatatgtgatggacaaacgatagcggaatccttcaaggtttcaaggctgtctccttcaggcagccttcccggaattctccatccctcagtgcaggatgggggctggtcctcagctgtctgccctcagcccctggccccccaggaagcctctttcatgggctgttaggttgacttcagttttgcctcttggacaacagggggtcttgtacatccttgggtgaccaggaaaagttcaggctatggggggccaaagggagggctgccccttccccaccagtgaccactttattccacttcctccattacccagttttggcccacagagtttggtcccccccaaacctcggaccaatatccctctaaacatcaatctatcctcctgttaaagaaaaaaaaaaaaaaaaaa

SEQ ID NO: 13306 - DNA, 16557 bp, Homo sapiens
aaagacagaaccccagagaaaaacgctgccaattcgttgctttattgttccctgcctggggacctcaatagccttttccattaaccttcccttcttacgcaacggttaatgactttgggggttgttttgctttctgtttctgctgagtcactaaattttgcctctttgtccccaggtgctgctcagcataaaagttaaaagtgcaattcaggaagtactgggattctgtgtagagccgaggaaaccatttccctaagagaagctctgttccttggcttgtccttccttcccgggaaggaagcttccgaggaacgaagggagaagctttgttttgcctgcagaagcagccctgtgctcggctgagggttctcagctggctgtgaactgcggagcattgtaggcgcctggctggctcaggccaatgcagaagtctctcccttctccaaagacccaaatccccacagaaccagcttcgagttactttcccttcaaggggattaaaataattgtgatttgtggcgctctccgttcgcggtggtattttcctgttgtgttaaatgcctcttattaagtaatagatgtgatttatgtgaacgacgaaggggtgtgtggtggattcggtgattaatcagtgaattcccatccgctggcatctctcactgcccctcttgcgtgatgtaagatcagacgtaccctgcattgaaaagtcaagacacacgggcgtctcgctcgcgctcacacacgctctgcctcctctctcccgcacgcgcgcatccctccaccttccacatcctgctccaggcaggagaaggctgactggctggactcattgagctgaagaatttccagtgacatttgtaaatgacgccgctcgattccaggctccaagcggcccctgccgccgccgccgccgccgggccgaaggtgccgccgagcagtctccagcgcaggcttccttaccgggcgaccacaatgtccgagtttctcctcgccttactcactctctcgggattattgccgattgccagggtgctgaccgtgggagccgaccgagatcagcagttgtgtgatcctggtgaatttctttgccacgatcacgtgacttgtgtctcccagagctggctgtgtgatggggaccctgactgccctgatgattcagacgagtctttagatacctgtcccgaggaggtagaaatcaagtgccccttgaatcacattgcttgccttggtaccaacaaatgtgttcatttatcccagctgtgcaatggtgtcttggactgcccagatgggtatgacgaaggagtacattgtcaggaactgttatccaattgccaacagctgaattgtcagtataaatgtacaatggtcagaaatagtacaagatgttactgtgaggatggattcgaaataacagaagatgggagaagctgtaaagatcaagatgaatgtgctgtttatggtacatgcagccagacctgcagaaacacacatggatcctacacttgcagttgtgtggaaggctacctaatgcagccagacaacagatcttgcaaggctaaaattgaacctacagatagaccacctatactattaattgcaaattttgaaacaattgaggttttctatcttaatggaagtaaaatggcaactctaagctcagtcaatggaaatgaaattcatactctggattttatttataatgaagatatgatttgttggattgaatcaagagaatcttcaaatcaactcaaatgtatccagataacaaaagcaggaggattaacagatgaatggacaatcaatattcttcaatccttccacaatgtgcaacaaatggcgattgactggctcactcgaaatctctattttgtggaccatgtcggtgaccggatctttgtttgtaattccaacggttctgtatgtgtcaccctgattgatctggagcttcacaatcctaaagcaatagcagtagatccaatagcaggaaaacttttctttactgactacgggaatgtcgccaaagtggagagatgtgacatggatgggatgaaccgaacaaggataattgattcaaagacagagcagccagctgcactggcactagacctagtcaacaaattggtttactgggtagatctttacttggactatgtgggagtagtggactatcaaggaaaaaatagacacactgtcattcaaggcagacaagttagacatctttatggtataactgtgtttgaagattatttgtatgcaaccaattctgataactacaatatcgtaaggataaaccgatttaatgggactgatattcactcattaattaaaattgagaatgcttggggaatccgaatttatcaaaaaagaactcaaccaacagtcagaagccatgcatgtgaagtcgatccatatggaatgccagggggctgttcacacatctgtctactcagcagcagttacaaaactcggacttgtcgctgcaggactggcttcaacttgggaagtgatggcaggtcatgcaaaagaccaaagaatgagttgttcctcttttatgggaaaggacgcccaggaattgttagaggaatggacttgaataccaagatagctgatgaatacatgatccccatagaaaatctggtaaaccctcgtgctttagactttcacgcagaaaccaattacatctactttgctgacaccaccagtttcctaattggccggcagaagatagatggcacagagagagaaaccatcctgaaagatgatctggataatgtagagggcattgctgtggactggattggaaataatctttactggaccaatgatggccataggaaaaccattaatgtggccaggctggaaaaagcttctcagagtcggaagactcttttagagggtgaaatgtctcatcccagaggaattgtggtggatccagttaatggttggatgtattggacagactgggaggaagatgaaatagatgacagcgtgggaaggattgagaaggcctggatggatggattcaatcggcagatttttgtgacttcaaagatgctgtggccaaacggtttaactctggactttcacaccaacacattatactggtgtgatgcctattacgatcatattgaaaaagtatttttgaatgggactcacaggaagattgtttacagtgggagagagttgaaccaccctttcggactgtcgcatcatggaaattatgtgttctggactgattatatgaatggttccatttttcaactagatttgataacaagtgaggtgacattgctgaggcatgaaagaccacccctatttgggcttcagatttatgatccacgaaagcaacaaggtgacaatatgtgccgagtaaataatgggggctgtagtacactttgcttggctatcccaggaggccgggtgtgtgcttgtgccgataatcaacttttggatgaaaatgggacaacttgcacatttaatcctggagaagcactacctcacatatgtaaagctggagagtttcgctgcaaaaacagacactgtatccaagctcggtggaaatgtgatggcgacgatgactgcctagacggaagcgatgaggattcagtaaactgcttcaatcatagctgtcctgatgatcagtttaaatgccagaataatcgctgcatccccaagagatggctttgtgatggagctaatgactgtgggagcaatgaagatgaatccaatcaaacttgcacagccagaacatgccaggtagaccagttttcttgcggaaatgggcgttgcattcccagagcatggctgtgtgacagggaagacgactgtggtgaccagacagatgaaatggcatcttgtgaattcccaacttgtgagccactaacccaattcgtatgcaaaagtggaagatgcattagcagcaaatggcactgcgactctgatgacgactgtggggacgggagtgatgaggtgggctgtgttcactcttgctttgataatcagttcagatgttccagtggcagatgcatcccaggccactgggcctgtgatggtgacaatgactgtggggacttcagtgatgaagcccagatcaattgtactaaagaagagattcattctcctgctggttgtaacggaaatgaatttcagtgccaccctgatggtaattgcgttcctgatttgtggcgctgtgatggagaaaaagactgtgaagatggtagtgatgaaaaaggttgcaatggtaccatacgattgtgtgaccacaaaaccaagttttcctgttggagtacagggagatgcatcaacaaagcatgggtgtgtgatggagatattgattgcgaagatcagtcagatgaagatgactgtgacagtttcttgtgtggaccacccaagcatccttgtgctaatgacacctcagtctgcctgcagccagagaaactctgcaatgggaaaaaggattgtcctgatggctctgatgaaggctatctctgtgatgagtgttcgctgaacaatggaggctgtagcaaccactgttctgttgttcctggaagaggaattgtctgttcctgccctgaaggacttcaactcaacaaagacaataaaacatgtgaaattgtggattattgtagcaatcatctaaagtgcagccaagtatgtgagcagcacaagcacacagtcaagtgctcatgttatgaaggttggaagctggatgtagacggtgaaagttgtacaagtgttgatccttttgaagcattcatcatcttttctattcgtcatgagatcagaaggattgatcttcacaaaagagactatagtctacttgttcctggattgagaaacacaatagcacttgattttcacttcaatcaaagtttactttattggacagatgttgtagaagacagaatataccggggaaagctttctgaaagtggaggtgtcagtgccattgaagtggttgtggagcatggcctggctactccagaaggcctgacagtcgactggatagcaggaaacatatactggatagacagcaatctggaccaaatcgaagtggccaaactagatggctccctaagaactacactaatagcaggagccatggaacaccccagggccattgctttggacccaagatatggaattcttttctggacagactgggatgcaaattttcctcgcattgaatctgcctctatgagtggtgctgggagaaaaaccatctataaagacatgaaaactggggcttggcctaatggactaactgtggaccactttgagaaaaggatagtgtggacagacgccaggtcagatgctatttattcagccctctatgatggaacaaacatgatagaaatcatccgaggtcatgaatacctttcccatccctttgctgtgtctctatatgggagtgaagtctactggacagactggaggaccaacacattgtccaaagccaataagtggacagggcagaatgtcagtgtgattcagaaaaccagtgcacagccatttgaccttcagatataccatcccagtcgccagccacaggctcccaatccttgtgcagctaatgatggcaaaggcccctgctctcacatgtgtctaatcaatcacaataggagtgctgcctgtgcgtgcccccacttgatgaagctttcttcagacaagaagacctgctatgaaatgaaaaaatttcttctttatgcaagacgttctgaaatcagaggagtggatattgacaatccatactttaacttcatcacggcatttacagtccctgatattgatgacgttactgtgatagacttcgatgcatctgaggaacgtttatactggacagatattaaaacacaaaccattaaacgagcttttattaacggaactgggttagaaactgttatttcaagagatattcagagtatcagagggctagcagtggattgggtgtcacgtaatttatactggattagctcagaatttgatgaaacgcaaattaatgtggcaaggctagatggctctttgaaaacctcaattatccatggaatcgataagccacagtgtcttgcagctcacccagtcaggggaaaactctactggaccgatggaaacacaattaacatggcaaatatggatggcagtaatagcaagattctgtttcagaatcagaaggagccagttggtctatcgatagactatgtggaaaacaagctttattggatcagttcagggaatggaaccataaatagatgcaacctggatggtggtaatttagaagtaatcgagtcaatgaaagaagaattaacaaaagctacagccctaaccatcatggataagaaactgtggtgggcagaccaaaacttagcccagctaggaacctgcagcaaaagagacggaagaaaccccaccatcctacggaataagacttctggggtagttcatatgaaagtctatgataaagaagcacagcaaggcagcaattcctgccaactaaacaatggtggatgctctcaactttgtttaccaacatctgaaactacaaggacttgtatgtgtacagtgggatattatctccaaaagaaccgtatgtcatgtcaaggtatagaatcatttcttatgtactctgttcatgaaggaatcaggggaatacctcttgaaccaagtgacaaaatggatgctttgatgcctatatcaggaacttcatttgccgtgggaatagatttccatgcagaaaatgataccatctactggacagacatgggcttcaataaaattagcagagctaaaagagatcagacttggaaagaagatatcattaccaatggcttgggaagagtggaagggatagctgttgactggattgctggtaacatatattggacagatcatggtttcaacttaattgaagttgcaagactcaatggttctttccgttatgtaattatttcccaaggcctggatcaaccaagatctatagctgtgcacccagagaaaggcctcttgttctggactgaatggggacaaatgccctgtattggaaaggctcgcttggatggctcagagaaggttgtccttgtaagcatgggaatagcatggccgaatggcatctccatcgactatgaggaaaataaattgtactggtgtgatgctcgcacagacaagatagagagaatcgaccttgagactggagggaatcgcgagatggtgctgtcaggaagcaatgtggatatgttttcagttgcagtctttggggcttacatctactggtctgacagagcacatgcaaacgggtctgtcagaaggggccacaagaatgatgccacagaaacgataaccatgagaaccggccttggagtcaacctgaaggaggttaaaatatttaaccgagtaagagagaaagggaccaatgtttgtgccagggacaatggtggctgtaagcaactctgtctttatcgaggaaattcccggagaacttgtgcttgtgcccatggatatttggcagaagatggagttacttgcctgaggcatgaaggctatttactgtattcaggaagaacaatattaaaaagtatacatctttctgatgaaaccaatttaaattccccaataaggccatatgagaatccacgttatttcaagaatgtcatagccttggcttttgactataatcaaagaagaaaaggtaccaaccgaatcttttacagtgatgcacactttggaaatatacagcttattaaagacaactgggaagacagacaagtaattgttgaaaatgtgggttctgtggaaggacttgcctatcacagagcctgggatacactgtactggacaagctctaccacctcatccatcaccagacacactgtggaccagactcggcctggagcatttgacagggaagctgtcatcaccatgtcagaagatgaccatccacatgtgctagccttggatgaatgtcaaaatttaatgttttggaccaactggaatgaacaacatccaagtatcatgagatctactctgactgggaaaaatgctcaagtggtggtcagtacagacatactcactccaaatggacttactatcgactaccgtgcagagaagctgtatttctcagatggcagtctaggaaaaattgaaaggtgtgaatacgatggatcccagagacatgtgatagttaaatctgggccagggactttcctcagtttggctgtttatgacaattatatattctggtcggactggggaagaagagctatactgcggtccaacaagtacacaggaggagatacaaaaattcttcgttccgatattccacatcagccaatgggaatcatagctgttgccaatgacaccaatagctgtgaactttctccatgtgcattattgaatggaggctgccatgacttgtgccttttaactcccaatgggagagtgaattgttcctgcagaggggaccgaatattgctagaggacaacagatgtgtgactaaaaattcctcctgcaacgcttattcggagtttgaatgtggaaatggtgagtgcattgactaccagctcacctgtgatggcattcctcactgtaaagataaatcagatgaaaaactgctctactgtgaaaacagaagctgtcgaagaggcttcaagccatgctataatcgccgctgcattcctcatggcaagttatgtgatggagaaaatgactgcggagacaactctgatgaattagattgtaaagtttcaacctgtgccacggttgagttccgctgtgcagatgggacttgtattccaagatcagcacgatgcaaccagaacatagattgtgcagatgcttcagatgaaaagaactgcaataacacagactgcacacatttctataagcttggagtgaaaaccacagggttcataagatgtaattctacctcactgtgtgttctgccaacctggatatgcgacgggtctaatgactgtggagactattcagatgaattaaagtgcccagttcaaaacaaacacaaatgtgaagaaaattattttagttgtcctagtggaagatgcattttgaatacctggatatgcgatggtcagaaagattgtgaggatggacgtgatgaattccactgtgattcttcttgctcttggaaccaatttgcttgttccgcacaaaaatgtatttctaagcattggatttgtgatggagaagatgactgtggggatgggttagatgaaagtgacagcatttgtggtgccataacctgtgctgctgacatgttcagctgccagggctctcgtgcctgcgtgccccgacattggctttgtgatggtgaaagggactgtccagatggaagcgatgagctttccacagcaggctgcgctcccaataatacatgtgatgaaaatgctttcatgtgccataataaagtatgcattcccaagcaatttgtttgtgaccatgatgacgactgtggagatggctctgatgagtcaccgcagtgtggatatcgacagtgtggtacagaagaatttagttgtgctgatgggcggtgtcttctaaatactcaatggcagtgtgatggagactttgactgtcctgaccattctgatgaagcacctttaaacccaaagtgtaaaagtgcagaacagtcatgcaacagttcattttttatgtgcaaaaatggcaggtgcattcccagtggaggtctttgcgacaataaggatgactgtggcgatggttcagatgagagaaactgccatataaatgaatgtttgagtaagaaagtcagtggatgttctcaagactgtcaagaccttccggtcagttataagtgcaaatgctggcctggattccaactgaaggatgacggcaaaacatgtgtagacattgatgaatgctcttcaggctttccctgtagccagcaatgcatcaatacatacgggacttacaagtgcctctgtacagatgggtatgaaatacaacctgataacccaaatggctgcaaatcgctctcagatgaagaaccttttttaattcttgctgatcatcatgagataaggaaaattagcactgatggctccaactacacacttttaaaacagggattaaacaatgttattgctatagactttgattacagagaagaattcatctattggatcgattctagccgacccaatggcagtcgcataaatagaatgtgtttaaatggaagtgacattaaggtagttcataacacagcggtccccaatgcacttgctgtcgattggattggaaaaaacctctattggtctgacacagaaaaaagaatcattgaagtatccaaactcaatggcttgtaccctactatactcgttagcaaaaggctgaagtttcccagagacttgtctttagatcctcaagctggatatttgtattggattgactgctgcgagtatcctcatattggccgtgttggaatggatggaaccaatcagagtgttgtcatagaaaccaagatttctagacctatggcactaacaatagattatgttaatcgtagactctactgggccgatgaaaatcacattgaatttagcaacatggatggatctcatagacacaaagtccctaatcaagatattccaggggtgattgcactaacattgtttgaagactacatctactggactgatgggaaaaccaagtcactcagccgtgcccataaaacatcgggagcagacagactctcactgatttactcatggcatgccatcacagatatccaggtgtatcattcttatagacaacctgatgtctccaaacatctctgcatgataaataatggtggttgcagtcatttgtgccttttagcccctggaaaaacccacacttgtgcatgtcccactaacttctatctggcagctgataataggacttgcttatccaactgcacagccagccagtttcgttgcaaaactgacaaatgtattccattctggtggaaatgtgacaccgtggatgactgtggtgatggatctgatgaacctgatgactgtcctgaatttagatgtcagccaggccgatttcagtgtgggactggactctgtgctctaccagctttcatctgtgatggagagaatgattgtggagacaattctgatgaactcaactgtgacacacatgtctgcctgtcaggtcaattcaaatgtaccaagaaccagaaatgtatcccagtaaacttaagatgtaatgggcaagatgactgtggtgatgaggaagatgaaagagactgtcctgaaaacagctgttctccagactatttccagtgtaagactacgaagcattgcatttccaagctgtgggtttgtgacgaggatccagactgtgcagatgcatcagacgaggccaactgcgataaaaagacttgtggacctcatgaattccagtgtaaaaacaacaactgtattcccgatcactggcggtgtgatagccaaaatgactgcagtgataattcagatgaagaaaactgtaagccacagacatgtacattgaaagatttcctctgtgccaatggggactgtgtttcttcaaggttttggtgtgatggagattttgactgtgcagatggctctgatgagagaaattgtgagacaagttgttccaaagatcagttccggtgttccaatggtcagtgtataccagcaaaatggaaatgtgatggccatgaagactgcaaatatggggaagatgagaaaagctgtgagccagcttctcctacttgctcatcacgtgaatatatatgtgccagtgatggatgtatttcagcatctttgaaatgtaatggagaatatgattgtgctgatggttcagatgagatggactgtgtgactgaatgtaaggaagatcagtttcggtgcaaaaataaagcccactgtattccaattagatggctgtgtgatggaattcatgactgtgtggatggcagtgatgaagagaactgtgaaagaggaggaaatatatgtagagctgatgagttcctttgcaataattctctctgcaaactacatttctgggtgtgtgatggagaggacgactgtggagacaactctgatgaagcccctgatatgtgtgtcaaatttctttgtccatccacgagacctcacagatgcagaaataacagaatatgcctacagtcggagcaaatgtgcaatgggattgatgaatgcggtgacaattcagatgaagatcactgtggtggtaagctgacatataaagcaaggccttgtaaaaaggatgagtttgcttgtagtaataaaaaatgcatccctatggatctccagtgtgatcgacttgatgactgcggagatggttcagatgagcaaggatgcagaatagctcctactgaatatacctgtgaagataatgtgaatccatgtggagatgatgcatattgtaatcaaataaaaacatctgttttctgtcgctgtaagcctggatttcagagaaacatgaaaaacagacaatgtgaagaccttaatgaatgtttggtgtttggcacatgttcccatcaatgtataaatgtggaaggatcatataaatgtgtgtgtgaccagaattttcaagaaagaaataacacctgcatagcagaaggctctgaagatcaagttctctacattgctaatgacactgatatcctgggttttatatatccattcaactacagtggcgatcatcaacaaatttctcatattgaacataattcaagaataacagggatggatgtatattatcaaagagatatgattatttggagtactcagtttaatccaggcggaattttctacaaaaggatccatggcagagaaaaaaggcaagcaaacagtggcttgatttgtcctgaatttaaaaggcccagggacattgcagttgactgggtggctggaaacatttactggactgatcattctagaatgcattggttcagttactacactactcactggaccagtctgaggtactctatcaacgtagggcagctgaatggccccaactgcaccagactcttaacaaatatggctggagaaccctatgctattgcagtaaatcctaaaagagggatgatgtactggactgttgttggggatcattcccatatagaagaagcagccatggatggtacactgagaaggattttagtacaaaagaacttacagagacccacaggtttggctgtggattattttagtgaacgcatatattgggctgactttgagctctccatcattggcagtgttctgtatgatggctctaattcagtagtctctgtcagcagcaaacaaggtttattacatccacataggatcgatatctttgaagattatatatatggagcaggacctaaaaatggtgtatttcgagttcaaaaatttggccatggttcagtagagtacttagctttaaatattgataaaacaaaaggtgttttgatatctcatcgttataaacaactagatttacccaatccatgcttggatttagcatgcgaatttctttgcttgctaaatccttctggggccacttgtgtgtgtccagaaggaaaatatttgattaatggcacctgcaatgatgacagcctgttagatgattcatgtaagttaacttgtgaaaatggaggaagatgcattttaaatgagaaaggtgatttgaggtgtcactgttggcccagttattcaggagaaagatgtgaagtcaaccactgtagcaactactgccagaatggaggaacttgcgtaccatcagttctagggagacccacctgcagctgtgcactgggtttcactgggccaaactgtggtaagacagtctgtgaggatttttgtcaaaatggaggaacctgcattgtgactgctggaaaccagccttactgccactgccagccggaatacaccggagacagatgtcagtactacgtgtgccaccactattgtgtgaattctgaatcatgtaccattggggatgatggaagtgttgaatgtgtctgtccaacgcgctatgaaggaccaaaatgtgaggttgacaagtgtgtaaggtgccatggggggcactgcattataaataaagacagtgaagatatattttgcaactgcactaatggaaagattgcctctagctgtcagttatgtgatggctactgttacaatggtggcacatgccagctggaccccgagacaaatgtacctgtgtgtctatgctccaccaactggtcaggcacacagtgtgaaaggccagccccaaagagcagcaagtctgatcatatcagcacaagaagcattgccatcattgtgcctctcgtcctcttggtgactttgataaccaccttagtaattggtttagtgctttgtaaaagaaaaagaaggacaaaaacaattagaagacaacctattatcaatggaggaataaatgtagaaattggcaatccatcttataacatgtatgaggtagatcatgatcacaacgatggaggtcttttagatcctggctttatgatagacccaacaaaggccaggtacatagggggaggacccagtgctttcaagcttccacacacagcgccgcccatctacctaaactctgatttgaaaggaccactaactgctgggccaacaaattactccaatccggtatatgcaaaattatatatggatgggcaaaactgtcgaaactccttaggaagtgttgatgaaaggaaagaactgcttccaaagaaaatagaaattggtataagagagacagtggcataatcagtgatatcttttatatgctgtataaatgtataaaatataaggattacttttgtatgttccaacagtattatacttgttttggcatcagcattacctctttctttatctttttcctggttaattgttttctgagttttttgggttttattttttgctgatgactattgattgaccatttgtatggtatttttatgaaaaagaactgcactacagtacaatttacaacaatgctgctgatatgacacacctttgaatttgttaaaattaaaaacaacgtattcctttgtagtgtgaatatgagcaatctattttatatgaacttttttggttgtacttaatcaacgaggagaatctctgcacttttccattatacggtttgaaggctgtaatacagtgtcatattatttttctgtttaaattgatggaaaaatgattgaatggtcaactctcttctttgtgcccataaagatcgattcagactctgctgaaaatatatagctctcacaagttcagcatcacctgctttgaaattagccttagattgccaaccaatagatgagaattttgaggaaaaaaattaaaaatatgtaaaattaataatttgcatgaacacagatgactacattttccaaaacttagtggactctatgtgatgtactaaatgtatacaccttgtaagcaatagttatatttaggtggtagaacatagcaaaaatataaccgaaagttggccgactgcacttgctatggaataagaccttttattctccctcagtctcgagataaatagccagcctagagcacaacagggcattgggtacttgcatcttaggtatttcttcccagtcacatccattttgtggaagattaacccaaccccttacactacactgaacactaaagaataatatataagcacacaaattggtgacagaatttcaattacgtgaacgcatcctctttgctaggtcaaaaaacaaagggcaaagcagacattttagtatacagagtgattggcaaatattttcaagatttaatatgagcaacccattatttgccctatccaaaatatattcaagggccttccaagttgtagaagaacaatgatcttcccataatcaaaagtggagagtcgaaatgctgtgccagttgctctggtattcaggtttctctgggttttacagaacgcatggaccccattcacgtttggtttgtttatcttcaaatttgagttgaaacgagtgcgatttatttaagttgtatataaaaataaaaggatagcatttttatacaaatatctttaaaggcacaaaagatttattcacaagttttggagggctttttgttcctctgatagacatgactgacttttagctgtcataatgtattaacctaacagatgaaatatgttaaatatgtggttgctctttatccctttgtacaagcattaaaaaaactgctgttttataagaagactttttgttgtactatgtgcatgcatactacctatttctaaactttgccatattgaggcctttataaactattgatttatgtaatactagtgcaattttgcttgaacaatgttatgcatatcataaactttttcaggttcttgtttaagtacattttttaaattgaacagtatttttcattttggttataatatagtcattttgcctatgtttctacaatgaagtgttaaatactttataaaaaattgttgactgacttatttaaatgaaattctacatataaaaaaaaaaaaaaaaaaaaaaaaaa

SEQ ID NO: 13307 - DNA, 3329 bp, Homo sapiens
cgctgacccagcccgccaggcgctcctgaccgtcgcttcctccggtcccaggtccccggccctcgcctcagccccggcccctggtccccagccctcgtcgcagccccggccgcccgccgccgccatgtccaaggaggagcgccccggtcgggaggagatcctggagtgccaggtgatgtgggagcctgacagtaagaagaacacgcagatggaccgcttccgggcggctgtgggcgccgcctgcggcctggcgctggagagttatgatgacttgtaccattggtccgttgagtcatattcagacttctgggcagagttctggaaattcagtggaattgtcttctcacgtgtgtatgatgaggttgtggacacatcgaaaggaatcgcagatgtccccgagtggttcaaaggcagtcggctcaactatgcagaaaacctcctgcggcacaaagagaatgacagagttgccctttacattgcaagggaaggcaaagaggaaattgtgaaggtgacttttgaagagctgaggcaagaagtggctttgtttgcagcagcaatgaggaaaatgggtgtgaagaaaggagatcgggttgttggttatttacccaacagtgagcacgctgtcgaggcgatgctggctgcggcaagcattggtgccatctggagctccacgtccccggacttcggtgtgaatggtgtgctggaccggttttctcaaattcagccaaagctcatcttctctgtggaggctgttgtctataatggcaaagagcacaaccacatggaaaagctgcagcaggtggttaaaggcctaccagacttgaagaaagtggtggtgattccttatgtgtcctccagagagaacatagacctttcaaagattccaaacagtgtgtttctggatgactttcttgccaccggcaccagtgagcaggccccgcagctggagttcgagcagctgcccttcagccacccactgttcatcatgttctcatcgggcaccacgggcgcacccaagtgcatggtgcattccgctgggggcaccctcatccagcatctgaaggagcacctgctgcacggcaacatgaccagcagtgacatcctcctgtgctacaccacggtcggctggatgatgtggaactggatggtgtcccttctggccacaggagcggccatggtcttgtacgatggctcccccctggtgcccacgcccaatgtgctctgggacctggttgacaggataggcatcactgtcctggtaactggggccaagtggctgtcagtgctggaagagaaggccatgaagccggtggaaacccacagtctccagatgctccacacgatcctgtccactggctccccactgaaagcccagagctacgagtatgtctacaggtgcatcaagagcagcatcctcctgggctccatctcaggaggcaccgacatcatctcctgcttcatgggccacaatttttctcttcctgtgtataaaggggagattcaggcccggaacctgggcatggccgtggaagcgtggaacgaggaaggaaaggcggtctggggagagagcggcgagctggtgtgtactaagccgatcccttgccagcccacacacttctggaacgatgagaacggcaacaagtacaggaaggcgtatttctccaaattcccaggtatctgggctcatggcgactactgcagaatcaaccccaagaccgggggcatcgtcatgcttggccggagtgacggcaccctcaaccccaacggggtgcggttcggcagctcggaaatctataacattgtggaatccttcgaggaggtggaggacagcctgtgtgtcccccagtataacaagtacagggaggagagggtgatcctcttcctgaagatggcctccgggcacgccttccagcctgacttggttaagaggatccgtgacgccatccgcatgggcttgtctgcgcgacacgtgcccagcctcatcctggaaaccaagggcatcccgtatacgctcaacggcaagaaagtggaagttgccgtcaaacagatcatcgctggaaaagccgtggagcaaggaggtgctttctcgaaccccgagaccctggatctgtaccgggacatccctgagctgcagggcttctgagtcagactggctggcgtgtcactcagccgcacccgtgtgcactgtaacttttgtgtgctcaagaaattatacagaaacctacagctgttgtaaaaggatgctcgcaccaagtgttctgtaggcttggggagggatcgtttctctgttttgttaaatctggtgggtacctggatcttccacacgagtgggattctggccttcagagaccaggagggagtgtctgggccgcaggtgtggcactgtggtgagagtgtgtgtctttgcacacacagtgcagtgggaacggtggggctggctggtgctgaagacagacacactcctgagccaaggtcttgtcttcaacctccccgtcccgttgtcccattttgctctgtgaaggtgcaaatccctttcttcccttcccatctcaggctctcctgttttccctcagggtccagtatgcctttgagctttagctgttagaaaggaacccccgtgacttgacacagctttcacagctggctgctaggaccggcgggctgggtgttcacgtgtgtctgtgtcatggatgcaatgcaggccctggaggactgtgcgtcacccgtcaaccagagcgtgcctccgggccagcttccctccaaggaatgagtggatttcatacaggatctctttattgcacagactgaatggctttacatgtttctaatgtgaattaggcatgtgaagcagtgggtgtccacccgtgtccctcatgggtgagccctccagctgtgagcccaggcagtgtggtcaccgagtgaggaccctcctcaccaggaaccgcatccctgtgctgcctccacctgagagttgctagggggttcttgtcgagatcatgtcatcagcacccctaagtcaagtcacgggtttccatagccaggcagttggtatgtacaattcagttcagcgtatgaacttgtatctctaatctgatgtccatttttatattttttgaaactgagcacaatgaaatcctttcttgaatcattttccttttggattataaaaatatgggggaaagtgctatgatgagttttatgcaataaatgtatacatgtgtgcacatgcacccaaaaaaaaaaaaaaaaaaaaaaaaaaaaaaaaaaaaaaaaaaaaaaaaaaaaaaaaaaaaaaaaaaaaaaaaaaaaaaaaaaaaaaaaaaaaaaaa

SEQ ID NO: 13308 - DNA, 5699 bp, Homo sapiens
ggagttctcagacctccagtttcagccctgccctcagcctccaatccgtaagagacacccagccccagcaattggattgggcagcccgtcttgacacaccactgtgctgagtgcttgaggacgtgtttcaacagatggttggggttagtgtgtgtcatcacattcgagtggggattaagagaaggaaggctgccttgctggagctgtgtggtcttctccaagtgagagtcgcaggcaatagaactactttgcttttggaggaaaaggaggaattcattttcagcagacacaagaaaagcagtttttttttcagggattcttcacttctcttgaacaaggaactcactcagagactaacacaaaggaagtaatttcttacctggtcattatttagtctacaataagttcatccttcttcagtgtgaccagtaaattcttcccatactcttgaagagagcataattggaatggagaggtggtgctgacggccacccaccatcatctaaagaagataaacttggcaaatgacatgcaggttcttcaaggcagaataattgcagaaaatcttcaaaggaccctatctgcagatgttctgaatacctctgagaatagagattgattattcaaccaggatacctaattcaagaactccagaaatcaggagacggagacattttgtcagttttgcaacattggaccaaatacaatgaagtattcttgctgtgctctggttttggctgtcctgggcacagaattgctgggaagcctctgttcgactgtcagatccccgaggttcagaggacggatacagcaggaacgaaaaaacatccgacccaacattattcttgtgcctaccgatgatcaagatgtggagctggggtccctgcaagtcatgaacaaaacgagaaagattatggaacatgggggggccaccttcatcaatgcctttgtgactacacccatgtgctgcccgtcacggtcctccatgctcaccgggaagtatgtgcacaatcacaatgtctacaccaacaacgagaactgctcttccccctcgtggcaggccatgcatgagcctcggacttttgctgtatatcttaacaacactggctacagaacagccttttttggaaaatacctcaatgaatataatggcagctacatcccccctgggtggcgagaatggcttggattaatcaagaattctcgcttctataattacactgtttgtcgcaatggcatcaaagaaaagcatggatttgattatgcaaaggactacttcacagacttaatcactaacgagagcattaattacttcaaaatgtctaagagaatgtatccccataggcccgttatgatggtgatcagccacgctgcgccccacggccccgaggactcagccccacagttttctaaactgtaccccaatgcttcccaacacataactcctagttataactatgcaccaaatatggataaacactggattatgcagtacacaggaccaatgctgcccatccacatggaatttacaaacattctacagcgcaaaaggctccagactttgatgtcagtggatgattctgtggagaggctgtataacatgctcgtggagacgggggagctggagaatacttacatcatttacaccgccgaccatggttaccatattgggcagtttggactggtcaaggggaaatccatgccatatgactttgatattcgtgtgcctttttttattcgtggtccaagtgtagaaccaggatcaatagtcccacagatcgttctcaacattgacttggcccccacgatcctggatattgctgggctcgacacacctcctgatgtggacggcaagtctgtcctcaaacttctggacccagaaaagccaggtaacaggtttcgaacaaacaagaaggccaaaatttggcgtgatacattcctagtggaaagaggcaaatttctacgtaagaaggaagaatccagcaagaatatccaacagtcaaatcacttgcccaaatatgaacgggtcaaagaactatgccagcaggccaggtaccagacagcctgtgaacaaccggggcagaagtggcaatgcattgaggatacatctggcaagcttcgaattcacaagtgtaaaggacccagtgacctgctcacagtccggcagagcacgcggaacctctacgctcgcggcttccatgacaaagacaaagagtgcagttgtagggagtctggttaccgtgccagcagaagccaaagaaagagtcaacggcaattcttgagaaaccaggggactccaaagtacaagcccagatttgtccatactcggcagacacgttccttgtccgtcgaatttgaaggtgaaatatatgacataaatctggaagaagaagaagaattgcaagtgttgcaaccaagaaacattgctaagcgtcatgatgaaggccacaaggggccaagagatctccaggcttccagtggtggcaacaggggcaggatgctggcagatagcagcaacgccgtgggcccacctaccactgtccgagtgacacacaagtgttttattcttcccaatgactctatccattgtgagagagaactgtaccaatcggccagagcgtggaaggaccataaggcatacattgacaaagagattgaagctctgcaagataaaattaagaatttaagagaagtgagaggacatctgaagagaaggaagcctgaggaatgtagctgcagtaaacaaagctattacaataaagagaaaggtgtaaaaaagcaagagaaattaaagagccatcttcacccattcaaggaggctgctcaggaagtagatagcaaactgcaacttttcaaggagaacaaccgtaggaggaagaaggagaggaaggagaagagacggcagaggaagggggaagagtgcagcctgcctggcctcacttgcttcacgcatgacaacaaccactggcagacagccccgttctggaacctgggatctttctgtgcttgcacgagttctaacaataacacctactggtgtttgcgtacagttaatgagacgcataattttcttttctgtgagtttgctactggctttttggagtattttgatatgaatacagatccttatcagctcacaaatacagtgcacacggtagaacgaggcattttgaatcagctacacgtacaactaatggagctcagaagctgtcaaggatataagcagtgcaacccaagacctaagaatcttgatgttggaaataaagatggaggaagctatgacctacacagaggacagttatgggatggatgggaaggttaatcagccccgtctcactgcagacatcaactggcaaggcctagaggagctacacagtgtgaatgaaaacatctatgagtacagacaaaactacagacttagtctggtggactggactaattacttgaaggatttagatagagtatttgcactgctgaagagtcactatgagcaaaataaaacaaataagactcaaactgctcaaagtgacgggttcttggttgtctctgctgagcacgctgtgtcaatggagatggcctctgctgactcagatgaagacccaaggcataaggttgggaaaacacctcatttgaccttgccagctgaccttcaaaccctgcatttgaaccgaccaacattaagtccagagagtaaacttgaatggaataacgacattccagaagttaatcatttgaattctgaacactggagaaaaaccgaaaaatggacggggcatgaagagactaatcatctggaaaccgatttcagtggcgatggcatgacagagctagagctcgggcccagccccaggctgcagcccattcgcaggcacccgaaagaacttccccagtatggtggtcctggaaaggacatttttgaagatcaactatatcttcctgtgcattccgatggaatttcagttcatcagatgttcaccatggccaccgcagaacaccgaagtaattccagcatagcggggaagatgttgaccaaggtggagaagaatcacgaaaaggagaagtcacagcacctagaaggcagcgcctcctcttcactctcctctgattagatgaaactgttaccttaccctaaacacagtatttctttttaacttttttatttgtaaactaataaaggtaatcacagccaccaacattccaagctaccctgggtacctttgtgcagtagaagctagtgagcatgtgagcaagcggtgtgcacacggagactcatcgttataatttactatctgccaagagtagaaagaaaggctggggatatttgggttggcttggttttgattttttgcttgtttgtttgttttgtactaaaacagtattatcttttgaatatcgtagggacataagtatatacatgttatccaatcaagatggctagaatggtgcctttctgagtgtctaaaacttgacacccctggtaaatctttcaacacacttccactgcctgcgtaatgaagttttgattcatttttaaccactggaatttttcaatgccgtcattttcagttagatgattttgcactttgagattaaaatgccatgtctatttgattagtcttatttttttatttttacaggcttatcagtctcactgttggctgtcattgtgacaaagtcaaataaacccccaaggacgacacacagtatggatcacatattgtttgacattaagcttttgccagaaaatgttgcatgtgttttacctcgacttgctaaaatcgattagcagaaaggcatggctaataatgttggtggtgaaaataaataaataagtaaacaaaatgaagattgcctgctctctctgtgcctagcctcaaagcgttcatcatacatcatacctttaagattgctatattttgggttattttcttgacaggagaaaaagatctaaagatcttttattttcatcttttttggttttcttggcatgactaagaagcttaaatgttgataaaatatgactagttttgaatttacaccaagaacttctcaataaaagaaaatcatgaatgctccacaatttcaacataccacaagagaagttaatttcttaacattgtgttctatgattatttgtaagaccttcaccaagttctgatatcttttaaagacatagttcaaaattgcttttgaaaatctgtattcttgaaaatatccttgttgtgtattaggtttttaaataccagctaaaggattacctcactgagtcatcagtaccctcctattcagctccccaagatgatgtgtttttgcttaccctaagagaggttttcttcttatttttagataattcaagtgcttagataaattatgttttctttaagtgtttatggtaaactcttttaaagaaaatttaatatgttatagctgaatctttttggtaactttaaatctttatcatagactctgtacatatgttcaaattagctgcttgcctgatgtgtgtatcatcggtgggatgacagaacaaacatatttatgatcatgaataatgtgctttgtaaaaagatttcaagttattaggaagcatactctgttttttaatcatgtataatattccatgatacttttatagaacaattctggcttcaggaaagtctagaagcaatatttcttcaaataaaaggtgtttaaacttt

SEQ ID NO: 13309 - DNA, 1205 bp, Homo sapiens
acagaaggaggaaggtcagcagccccgacagccgacagtcacagcagctctgacaagagcgttcctggagcccagctcctctccacagaggacaagcaggcagcagagaccatgggccccccctcagccgctccccgtggagggcacaggccctggcaggggctcctgatcacagcctcacttttaaccttctggcacccgcccaccactgtccagttcactattgaagccctgccgtccagtgctgcagagggaaaggatgttcttctactggcctgcaatatttcagaaactattcaagcctattattggcacaaggggaaaacggcagaagggagccctctcattgctggttatataacagacattcaagcaaatatcccaggggccgcatacagtggtcgagagacagtataccccaatggatccctgctgttccaaaacatcaccctggaggacgcaggatcctacaccctacgaaccataaatgccagttacgactctgaccaagcaactggccagctccacgtacaccaaaacaacgtcccaggccttcctgtgggggccgtcgctggcatcgtgactggggtcctggttggggtggctctggtggccgccctggtgtgttttctgcttctctccaggactggaagggccagcatccagcgtgacctcagggagcagccgcccccagcctccacccctggccatggtccctctcacagatccaccttctcggcccctctacccagccccagaacagccactcccatctatgaggaattgctatactctgatgcaaacatttactgccagatcgaccacaaagcagatgtggtctcttaggttcctctgggagctgctcttgtgggttgatggagcgtccccaaagctcccagccctggggacggggaaggacatggagcctgagccagagaaccagctctgagtcctgaggagacacaggcctggggacagggagggatgggagtccctgctgaatatctggagaccctgacaggttgccctgggctctgggtgggccgggacaaaggcctctcatcaccacaggaagcgggggcttgcaaggaaagtgaatgggcctgtggcccacccggggtcaccaggaaaggatctgaataaagaggacccttcctctcattggctctttttctgctcacgggaacttagcagaaactcacctg

SEQ ID NO: 13310 - DNA, 2422 bp, Homo sapiens
atgtggtggagagttctcagcttgctggcatggttccccttgcaagaggcctctctgactaaccacacagaaaccatcaccgtggaggaaggccagacgctcactctaaagtgtgtcacttctctgaggaagaactcctccctccagtggctgaccccctcagggttcaccatttttttaaatgagtatcctgctttaaaaaattccaaataccagcttcttcatcactcggccaatcagctctccatcactgtgcctaacgtaaccctgcaagatgaaggcgtgtacaagtgcttacattacagcgactctgtaagcacaaaggaagtgaaagtgattgtgctggcaactcctttcaagccaatcctggaagcttcagttatcagaaagcaaaatggagaagaacatgttgtactcatgtgctccaccatgagaagcaagccccctccgcagataacctggctacttgggaatagcatggaagtgtccggtggaacgctccatgaatttgaaactgatgggaagaaatgtaatactaccagcactctcataatccacacttatggcaaaaattcaacggtggactgcattatccgacacagaggcctgcaagggagaaaactagtagcacccttccggtttgaagatttggttactgatgaagagacagcttcagatgctctggagagaaactctctatcctctcaagacccacagcagcccaccagtactgtctcagtaacggaagattctagtacatcggagattgacaaggaagagaaagaacaaaccactcaagatcctgacttgaccaccgaagcaaatcctcagtatttaggactggcaagaaagaaaagtggcatcctgctgctcacgctggtgtccttcctcattttcatactcttcatcatagtccagctcttcatcatgaagctgaggaaagcacatgtgatatggaagaaagaaaacgaagtttcagaacacacactagaaagttacagatcaaggtcaaataatgaagaaacatcatctgaagagaaaaatggccaatcttcccaccctatgcgttgcatgaactacatcacaaagttgtactcagaagcaaaaacaaagaggaaggaaaatgtacaacattcaaaattagaagaaaagcacatccaagtaccagagagtattgtgtagtgctctctgcaatggaacatgtgatttcagggttgccgcagtgtcacctcagtggaccagcctgggggaaggagcttaattgctgagacattaataatgacctcttagtgcaatgcaagatggtgtcctcggataatgatctgccccggagctagggcagcaacatgaggaccaaaccatgcacataaagcttgtagtttaaaaaagaaaagcaaaaaaataattatgcctgacactacttcagagcaggaggattctacgaagccttggggatcagggtcagtgtgagcagctaacatcctacctcaaatggaacaggattttttgatgctttgctctaatggaactgttttaaaaatttttttttctttttaatattttcttctggtcacaaaataaagaaatttgggatgcaaagtacctaaagatctctgatcctaagaagttacttctggccaggcgcggtggctcatgcctgtaatcctagcactttgggaggctgaggtaggcagatcacttgaggtcaggagttggagaccagcctggccaacatagtgaaaccccgtctctactaaaaatgcaaaaattagccaggcgtagtggtgcgcacctgtagtctcagatacttgggaggctgagggtggagaatcgcttgaacctgggaggtggagattgcagtgagtcaagatctcaccactgcactccagcctgggcgacagagggagactctgtctcaaaaaaaaagaagttacttccaagacagacttttaacatgtaaccagcacaaagcaatgtcagggaggagtgatacatgacaataaatgagtcagatgagcaagaaggccccagaacccatgccccaaggcacaaagaggagctcagggtaggcccaaagattcgaattccttagattactaaatcacatgagcggaccttgtctgtcagataagatttttacctggaaattccatgaccaatacatgtgcaaaagaaaatgatgggttgaatttactgattattgacctaatggatggctttttaaaatgttttaataaaaagcagaatagatgtttgtttttctagtggttataccaagttatacttcctgttttcacgtgtgaaagtaacatgggacatgcctttcttttccgatcagtttatttaagctatacagcaaactttggcatttatgtggagcatttctcattgttggaatctgaataaaccaattacaaaataa

SEQ ID NO: 13311 - DNA, 9046 bp, Homo sapiens
cttgactcaatcctgcaagcaagtgtgtgtgtgtccccatcccccgccccgttaacttcatagcaaataacaaatacccataaagtcccagtcgcgcagcccctccccgcgggcagcgcactatgctgctcgggtgggcgtccctgctgctgtgcgcgttccgcctgcccctggccgcggtcggccccgccgcgacacctgcccaggataaagccgggcagcctccgactgctgcagcagccgcccagccccgccggcggcagggggaggaggtgcaggagcgagccgagcctcccggccacccgcaccccctggcgcagcggcgcaggagcaaggggctggtgcagaacatcgaccaactctactccggcggcggcaaggtgggctacctcgtctacgcgggcggccggaggttcctcttggacctggagcgagatggttcggtgggcattgctggcttcgtgcccgcaggaggcgggacgagtgcgccctggcgccaccggagccactgcttctatcggggcacagtggacgctagtccccgctctctggctgtctttgacctctgtgggggtctcgacggcttcttcgcggtcaagcacgcgcgctacaccctaaagccactgctgcgcggaccctgggcggaggaagaaaaggggcgcgtgtacggggatgggtccgcacggatcctgcacgtctacacccgcgagggcttcagcttcgaggccctgccgccgcgcgccagctgcgaaacccccgcgtccacaccggaggcccacgagcatgctccggcgcacagcaacccgagcggacgcgcagcactggcctcgcagctcttggaccagtccgctctctcgcccgctgggggctcaggaccgcagacgtggtggcggcggcggcgccgctccatctcccgggcccgccaggtggagctgcttctggtggctgacgcgtccatggcgcggttgtatggccggggcctgcagcattacctgctgaccctggcctccatcgccaataggctgtacagccatgctagcatcgagaaccacatccgcctggccgtggtgaaggtggtggtgctaggcgacaaggacaagagcctggaagtgagcaagaacgctgccaccacactcaagaacttttgcaagtggcagcaccaacacaaccagctgggagatgaccatgaggagcactacgatgcagctatcctgtttactcgggaggatttatgtgggcatcattcatgtgacaccctgggaatggcagacgttgggaccatatgttctccagagcgcagctgtgctgtgattgaagacgatggcctccacgcagccttcactgtggctcacgaaatcggacatttacttggcctctcccatgacgattccaaattctgtgaagagacctttggttccacagaagataagcgcttaatgtcttccatccttaccagcattgatgcatctaagccctggtccaaatgcacttcagccaccatcacagaattcctggatgatggccatggtaactgtttgctggacctaccacgaaagcagatcctgggccccgaagaactcccaggacagacctacgatgccacccagcagtgcaacctgacattcgggcctgagtactccgtgtgtcccggcatggatgtctgtgctcgcctgtggtgtgctgtggtacgccagggccagatggtctgtctgaccaagaagctgcctgcggtggaagggacgccttgtggaaaggggagaatctgcctgcagggcaaatgtgtggacaaaaccaagaaaaaatattattcaacgtcaagccatggcaactggggatcttggggatcctggggccagtgttctcgctcatgtggaggaggagtgcagtttgcctatcgtcactgtaataaccctgctcccagaaacaacggacgctactgcacagggaagagggccatctaccgctcctgcagtctcatgccctgcccacccaatggtaaatcatttcgtcatgaacagtgtgaggccaaaaatggctatcagtctgatgcaaaaggagtcaaaacttttgtggaatgggttcccaaatatgcaggtgtcctgccagcggatgtgtgcaagctgacctgcagagccaagggcactggctactatgtggtattttctccaaaggtgaccgatggcactgaatgtaggccgtacagtaattccgtctgcgtccgggggaagtgtgtgagaactggctgtgacggcatcattggctcaaagctgcagtatgacaagtgcggagtatgtggaggagacaactccagctgtacaaagattgttggaacctttaataagaaaagtaagggttacactgacgtggtgaggattcctgaaggggcaacccacataaaagttcgacagttcaaagccaaagaccagactagattcactgcctatttagccctgaaaaagaaaaacggtgagtaccttatcaatggaaagtacatgatctccacttcagagactatcattgacatcaatggaacagtcatgaactatagcggttggagccacagggatgacttcctgcatggcatgggctactctgccacgaaggaaattctaatagtgcagattcttgcaacagaccccactaaaccattagatgtccgttatagcttttttgttcccaagaagtccactccaaaagtaaactctgtcactagtcatggcagcaataaagtgggatcacacacttcgcagccgcagtgggtcacgggcccatggctcgcctgctctaggacctgtgacacaggttggcacaccagaacggtgcagtgccaggatggaaaccggaagttagcaaaaggatgtcctctctcccaaaggccttctgcgtttaagcaatgcttgttgaagaaatgttagcctgtggttatgatcttatgcacaaagataactggaggattcagcactgatgcagtcgtggtgaacaggaggtctacctaacgcacagaaagtcatgcttcagtgacattgtcaacaggagtccaattatgggcagaatctgctctctgtgaccaaaagaggatgtgcactgcttcacgtgacagtggtgaccttgcaatatagaaaaacttgggagttattgaacatcccctgggcttacaagaaacactgatgaatgtaaaatcaggggacatttgaagatggcagaactgtctcccccttgtcacctacctctgatagaatgtctttaatggtatcataatcattttcacccataatacacagtagcttcttcttactgtttgtaaatacattctcccttggtatgtcactttatatcccctggttctattaaaatatccatatatatttctataaaaaaagtgtttgaccaaagtaggtctgcagctatttcaacttccttccgtttccagaaagagctgtggatattttactggaaattaagaacttgctgctgttttaataagatgtagtatattttctgactacaggagataaaatttcagtcaaaaaaccattttgacagcaagtatcttctgagaaattttgaaaagtaaatagatctcagtgtatctagtcacttaaatacatacacgggttcatttacttaaacctttgactgcctgtatttttttcaggtagctagccaaattaatgcataatttcagatgtagaagtagggtttgcgtgtgtgtgtgtgatcatactcaagagtctaaaaactagtttccttgtgttggaaatttaaaaggaaaaaaatcgtatttcactgtgttttcaatttatattttcacaactactttctctctccagagctttcatctgatatctcacaatgtatgatatacgtacaaaacacacagcaagttttctatcatgtccaacacattcaacactggtatacctcctaccagcaagcctttaaaatgcatttgtgtttgcttatttgttttgttcaagggttcagtaagacctacaatgttttgtatttcttgacttattttattagaaacattaaagatcacttggtagttagccacattgagaagtggttatcattgttaatgtggttaatgccaaaaagtggttaatattaataagactgtttccacaccataggcaataatttcttaatttaaaaaatctaagtatattcctattgtactaaatatttttcccaactggaaagcacttgattgtacccgtaagtgtttgagtgatgacatgtgatgattttcagaaagttgttgtttttgtttccatagcctgtttaagtaggttgtaagtttgaatagttagacatggaaattattttataagcacacacctaaagatatctttttagatgataaaatgtacacccccccatcaccaacctcacaacttagaaaatctaagttgtttgatttctttgggatttcttttgttgtgaaacactgcaaagccaatttttctttataaaaattcatagtaatcctgccaaatgtgcctattgttaaagatttgcatgtgaagatcttagggaaccactgtttgagttctacaagctcatgagagtttatttttattataagatgtttttaatataaaagaattatgtaactgatcactatattacatcatttcagtgggccaggaaaatagatgtcttgctgttttcagtattttcttaagaaattgcttttaaaacaaataattgttttacaaaaccaataattatcctttgaattttcatagactgactttgcttttgacgtagaaattttttttctcaataaattatcactttgagaaatgaggcctgtacaaggctgataacctatatgtgatggagatcacccaatgccaagggcagaaagcaaacctagttaaataggtgagaaaaaaaataataatcccagtgccatttgtctgtgcaaagagaattaggagagaggttaatgttacttttttccattttggaaataattttaatcaagtaactcaaatgtgacaaaatttatttttattttttgtggttatattcccaacaacattaaaaaatactcgaggcataaatgtagttgtctcctactctgcttctcttactatactcatacatttttaatatggtttatcaatgattcatgtttccctcaaatagtgatggtttacacctgtcatggaaacaatcctagagagctcagagcaattaaaccactattccatgcttttaagtagttttctccacctttttcttatgagtctcactagattgactgaggaatgtatgtctaaattcctggagaagatgatatggattggaaactgaaattcagagaaatggagtgttcaatagataccacgaattgtgaacaaagggaaaattctatacaactcaatctaagtcagtccactttgacttcgtactgtctttcacctttccattgttgcatcttgaattttttaaaatgtctagaattcaggatgctaggggctacttctttaaaaaaaaaaaaaaaaaagaattcgtctgaaaatgctcaggtttgtaagaatctaatctcacttacataactaagcactccataataagttttattaagtacaaagggagccagaaaaaatgacatttatttcttctagatcagaaaaatttaaattaagccctgccttgctgtttagaaatatgtgggcattgttataatttattcaataaatttatgttcctttgccttcctgtggaaacagttttatcccactaaactaggaattaggggataaatcacaaacaaaaaaaaagttgcagcactgaaaaaaagtaatttattgtttttgcaactggtatgtgaatttgtgtgataaaattatttattcttatttaacaaaaatatgttcaaatttttctatatttaaaatgttttgctgttgtcctactttttaatttatgcttcatgtttgtgtataaagtacacttttacactttgtgagtttacataatatacagcactggttgcttttgtatttttttacagaaagctttctgtgtgaagcaggtgtatatgtatatattcctcatgtattcttattctgatactatcatttttctttccaaggaaattttaatctgtcatgaccaatagtgttcattacttgtgcctatgataataggttttttacatcacattaacactattttttccaagtcacaaataagaaaaacacttattcaatgaaacaaggtgcaagttttaaatttgggtacacaaatagcctagaagcttcctacagacgctaagacacagccaataatcagatcctttcacttcatcgagaaacttggacaagtcgatattgatgtattagatgaaagttgtctacacacaacttctgagggatacaaacgataataaaaccaaatgttgtctgtttctcctttagaaacacctcctaaaattaatatcatttagtctctagtgtctgtaggattctacagatgagcacaaatagattgggtttgtataacaaatgctaatagtcataactgtttctacaaatatggggtgtccattaagagaatgtgatgttttcctactgctgttgaatcccatggggtgattataggacttgaaataggcagagtcacctctgatgacatcagcttgcctctgtgatttcacagtctgatcctggcaacaagacaaagcacccttggacacacagccaatctctggttgtgatatttccccattgattccttccttgttaacaaggtcattttaatggttcaggtgaggacagcagccagattcaaagtccagaatttgtgctgttacatagagttcacactgtcaaataacattgaatttaataatgatcaaatttttctagtagtctttggcagagtgtataatctcattggcatgattggtgaatattactaatctctttataatgaaagatgctttacaaataccttatatttgctaacatttcaaaactactaaataaatgaaatagccatgtgtacagaaatggtcatttaaagctttaatagaaccaaattcaagacaatgtatcatttagacacacagaaaaggaacttgtatgttttccctattatttttctcatttgccaacaatctatagttttaggttatcaaacagatagatcaacttaactggctagtacattgaaaaatcttcctaagaatcctttgttagcataatctatagagataatttctcaaattatatcatcatgatgcatataaactctataatgtataattgtgtttcatttatttaatgtatgagaacatattgaaatacaaaaccatgcattagccaaaaaattggaatacaggtagtgttcagatcagcaaaacattcagtctggtaaatgcctgcctggggctatgatatcattctcaatgcaggttttatggaaaaactaaaagaatatgttgttagatgatgttggttttgaaaaaaaaaagacattaacatacacattagttagcccagttaattgcattctactaatatagttgcacattagcaataattttgctgtctctggtctttattttgtggcttcaactaactggaccatgtggactgtaaaggtcaaatggaaaaaacgagcagtggcccctcatcctgtaaggtactgctacatcagagtgacctaaaagtctaacactgtgaggaaaactgtgatttgtaggaaaaaaaaaaaaaacaaataaaaaacagggcatgctttttaatttttttccactttcctttggcacacccaatgaacaattctaatttttattgaggtgctaacatctttcgtgaccgactgtcaaatgtggtatttttgagttactatttttctacatgattttacagtttgcaagaaagacctctaagctttgtgtcacggtagggcacaacttgatactcaaaatttgaaaaataagcacatccaatgattgttttgaccaacagtggtcagtgacgtaaactgcatgtgcatctgaggacatttaaggggtcattaaaatttgaggagcatcaggccggagtagcagacttttagatgagtcatatttcagcattcactaagtcctcagcattccattcaaactgtcgtgtatatttggcctgattttttttcaagctttgcaataatttatgttattggtaaacacttggtgactatatctcagccttttctttaacaactcacaatatattagaaacacgtctacctatactgagagtatatttacaatagaagaacatactgtatgtgactttgtaaagctagacttttgattaagaaatatataatctctggatgctatttttgcattatacactcaggcacaacgtaaaccttgatggctcatcttgctacaattacgagttgaaaaacactacttacgtatttgtatgacctattagtcagaggaaatcatacatatgctttgtaaatagactttgcagataactaaatagactgaagaaatatgttgcatttgatagaagcaattgcataaatatttggtttctatattagagtctgtgagtaaagtcaagtaataaacctaagtaggtataacagatttttaaaccttgaaacttgctttgatggtagagaaaatcattgaagatttacatactgtatataagatgtaaaatgtacgctgcttattaccctcaattttccagaagcaatggtatataatgcagttgaaaaaccaaaaatcttggaaaactaagacgggtcttgtttaaaatgtctctcagctttggcaaccttcaaatcttaatcaactatttaaagcattactgtgtcttgtagcctgcattccacaacagctctgttattcaggtaaaagacttgaactgagccgtttgggacctatactgtaatattttcattgaggaacaatatcctattttgtaaagcatttccctatgtgtgactttaaactgtaaaattaaacactgcttttgtgggttcagtgggcataataaatataaattgtaaacta

SEQ ID NO: 13312 - DNA, 4117 bp, Homo sapiens
tccccgcaggagtcggagaggatggcaggggccggaggccagcaccaccctccgggcgccgctggaggagcggccgccggagccggcgccgcggtcacctccgccgctgcctcggcggggccgggagaggattcgtctgacagcgaagcggagcaagagggaccccagaaactgatccgcaaagtgtctacctcggggcagatccggaccaagaccagtattaaagagggacagctattgaagcaaaccagttctttccaaaggtggaaaaagcgatacttcaaacttcgaggccgcaccctttactatgcaaaggactcaaagtctctgatatttgatgaagttgacctctcagatgctagtgtagctgaagcaagcacgaaaaatgctaacaacagcttcacgatcatcactccattcagaaggctaatgctgtgtgctgagaacagaaaggagatggaggattggatcagctcactgaagtctgtacagaccagagaaccctacgaggtggcccagtttaatgtggaacatttctcagggatgcacaactggtacgcctgctcccacgcccgacccaccttctgtaacgtgtgcagagagagtctttctggagtcacctcccatggcctgtcctgcgaagtgtgtaaattcaaggctcacaaaagatgtgcagtgagagcaacaaataactgtaaatggactaccctggcctccatcgggaaggacattatagaagatgaagatggcgtcgcgatgcctcaccagtggcttgagggcaacctgcctgtaagtgccaagtgtgctgtctgcgacaaaacatgtggcagtgttctccgtctacaggattggaaatgcctttggtgtaagacaatggtacacactgcctgcaaagatttataccatccaatatgtccacttggtcaatgtaaagtatctatcatacctccaattgcactaaacagcaccgattccgatggtttctgtagagcaacattttcgttctgtgttagtcctctattggtttttgtcaattctaagagtggagataatcagggagtaaagttcctccgtcgctttaaacagttgctaaatccggctcaggtgtttgatttaatgaatggaggtcctcatttaggtttaagattatttcagaagtttgacaatttccggattcttgtttgtggaggcgatggaagtgtaggttgggttttgtcagaaatcgataagctcaacttgaataaacagtgtcagctgggagtgttgcctttgggtacaggaaatgaccttgcccgagttcttggctggggaggttcatatgacgatgacacccaacttcctcagatcctagagaaactggaacgagccagtaccaaaatgttggacaggtggagtataatgacatatgaactcaaattgccaccaaaagcttccctacttccaggacctccagaagcatctgaagaattttatatgacgatttatgaagactcagttgcaacgcatcttacaaaaatcctcaattctgatgaacatgcagtggtcatatcttctgccaagacgctatgtgaaactgtaaaggacttcgttgccaaagtagaaaagacgtatgacaaaaccttggaaaatgccgttgtagctgatgccgtggccagtaaatgttcagtcctaaacgagaagctcgaacaactgctgcaggctttgcacacagattcccaggctgcgcctgttctccctggcctcagccctctcattgtggaagaagatgctgtggaatcgtccagtgaagagtccctgggtgaaagcaaagagcagcttggggatgacgttacaaaaccttcctcccagaaagccgtcaaaccaagggaaatcatgttgcgggcaaatagtttaaagaaagcagtgaggcaagtcattgaggaagccggaaaagttatggatgacccgacagttcacccctgtgaaccagctaatcagtcctctgattatgacagcacagaaacagatgaatctaaggaggaagctaaagatgatggtgccaaagaatcaataactgttaaaactgcacctcggtctccagatgcccgggcaagttatggccattcccaaactgattctgtccctggtccagctgtggcagccagcaaagaaaacctccctgtgctcaataccagaataatctgcccaggtttaagagcaggactggctgcctcaattgctgggagttcgattatcaacaaaatgttactggcaaacattgatccttttggtgccacgccgtttattgacccggatctagattccgtagatggatattcagaaaaatgtgtcatgaacaattactttgggattggattagatgcaaaaatttcattagaatttaataataaaagagaggagcaccctgaaaaatgcaggagccgaactaaaaacttgatgtggtatggagtccttggaacccgggagttattacagagatcgtacaagaatttagaacaaagggttcaacttgagtgtgatgggcagtatattcctcttcccagcttgcaaggcatagccgtgttgaacattcccagctatgctggaggcactaacttttggggtggaactaaagaggatgatatatttgctgcaccatcctttgatgacaagatcctggaagttgtagcaatatttgatagcatgcaaatggcagtttcaagggtcattaaactgcagcatcatcgaatagcccagtgccgtacagtgaaaatcactatatttggtgacgaaggagtcccagtgcaagtggatggtgaagcgtgggttcagcctccagggattatcaaaattgtgcacaaaaacagagcacaaatgctaacaagggacagagcctttgagagcactctgaaatcttgggaagataagcagaagtgtgattctggtaaaccagttctccgaacccatttgtacatccatcacgccattgacttggcaacagaagaggtgtcgcagatgcagctatgctcccaggctgcagaggagctcattactaggatatgtgacgcagccacaattcactgtcttttggagcaagaactggcccatgctgtgaatgcctgctcccatgccctgaataaagccaacccaaggtgcccggagagtcttacaagagacactgccactgaaatagccatcaatgtgaaggcgctgtataatgaaacagaatctttgctagttggcagggttcctttgcagctggaatcgccacatgaagagcgagtatccaatgccttacactctgtggaggtggaattacagaaactgacagagattccttggctttattatatcttacacccaaatgaggatgaggaacctcctatggattgcaccaaaaggaacaacagaagcaccgtatttcgaatagtgccaaagtttaaaaaggaaaaggttcagaagcagaagacaagttcacagcctggatctggggataccgaaagtgggtcatgtgaagcgaattctccagggaattaaagagcttggaaggagcactccacagtcggaggtgtaatcatattggtgctatttcttggaagagaagttattgccacttaatacaaagtccttggaagcaagtggctgttcttgtagttttctgcatagataagtaagcaccactgaagcacctctgtggcttgatattttgctgtgggtgaaattttgatttgaggtattagaaaatatttttgtgccgaacaatacattccacaaagccattttctttttgtgcaaacctgacatgttcaaatatattcacaatggtaataaggtaggaggaatctgagacgattgcattgtctaaacagtggaattgcaaaatgtttactttccatagatctggtctgatggaatgttcctactgtgcaactgcataacaatatgtggttaaaacttcctaggtttcattacgggggggcattggccattttcttaaaatcataggttaggagactaaaatataaattaagttgtgatttgaatgtagattggtatcacctccaactcctagtgcttagtggtcaaatatgttgaaaacctttccaatactatgaatgaatgcaaatcttaatgcacg

SEQ ID NO: 13313 - DNA, 4248 bp, Homo sapiens
tccccgcaggagtcggagaggatggcaggggccggaggccagcaccaccctccgggcgccgctggaggagcggccgccggagccggcgccgcggtcacctccgccgctgcctcggcggggccgggagaggattcgtctgacagcgaagcggagcaagagggaccccagaaactgatccgcaaagtgtctacctcggggcagatccggaccaagaccagtattaaagagggacagctattgaagcaaaccagttctttccaaaggtggaaaaagcgatacttcaaacttcgaggccgcaccctttactatgcaaaggactcaaagtctctgatatttgatgaagttgacctctcagatgctagtgtagctgaagcaagcacgaaaaatgctaacaacagcttcacgatcatcactccattcagaaggctaatgctgtgtgctgagaacagaaaggagatggaggattggatcagctcactgaagtctgtacagaccagagaaccctacgaggtggcccagtttaatgtggaacatttctcagggatgcacaactggtacgcctgctcccacgcccgacccaccttctgtaacgtgtgcagagagagtctttctggagtcacctcccatggcctgtcctgcgaagtgtgtaaattcaaggctcacaaaagatgtgcagtgagagcaacaaataactgtaaatggactaccctggcctccatcgggaaggacattatagaagatgaagatggcgtcgcgatgcctcaccagtggcttgagggcaacctgcctgtaagtgccaagtgtgctgtctgcgacaaaacatgtggcagtgttctccgtctacaggattggaaatgcctttggtgtaagacaatggtacacactgcctgcaaagatttataccatccaatatgtccacttggtcaatgtaaagtatctatcatacctccaattgcactaaacagcaccgattccgatggtttctgtagagcaacattttcgttctgtgttagtcctctattggtttttgtcaattctaagagtggagataatcagggagtaaagttcctccgtcgctttaaacagttgctaaatccggctcaggtgtttgatttaatgaatggaggtcctcatttaggtttaagattatttcagaagtttgacaatttccggattcttgtttgtggaggcgatggaagtgtaggttgggttttgtcagaaatcgataagctcaacttgaataaacagtgtcagctgggagtgttgcctttgggtacaggaaatgaccttgcccgagttcttggctggggaggttcatatgacgatgacacccaacttcctcagatcctagagaaactggaacgagccagtaccaaaatgttggacaggtggagtataatgacatatgaactcaaattgccaccaaaagcttccctacttccaggacctccagaagcatctgaagaattttatatgacgatttatgaagactcagttgcaacgcatcttacaaaaatcctcaattctgatgaacatgcagtggtcatatcttctgccaagacgctatgtgaaactgtaaaggacttcgttgccaaagtagaaaagacgtatgacaaaaccttggaaaatgccgttgtagctgatgccgtggccagtaaatgttcagtcctaaacgagaagctcgaacaactgctgcaggctttgcacacagattcccaggctgcgcctgttctccctggcctcagccctctcattgtggaagaagatgctgtggaatcgtccagtgaagagtccctgggtgaaagcaaagagcagcttggggatgacgttacaaaaccttcctcccagaaagccgtcaaaccaagggaaatcatgttgcgggcaaatagtttaaagaaagcagtgaggcaagtcattgaggaagccggaaaagttatggatgacccgacagttcacccctgtgaaccagctaatcagtcctctgattatgacagcacagaaacagatgaatctaaggaggaagctaaagatgatggtgccaaagaatcaataactgttaaaactgcacctcggtctccagatgcccgggcaagttatggccattcccaaactgattctgtccctggtccagctgtggcagccagcaaagaaaacctccctgtgctcaataccagaataatctgcccaggtttaagagcaggactggctgcctcaattgctgggagttcgattatcaacaaaatgttactggcaaacattgatccttttggtgccacgccgtttattgacccggatctagattccgtagatggatattcagaaaaatgtgtcatgaacaattactttgggattggattagatgcaaaaatttcattagaatttaataataaaagagaggagcaccctgaaaaatgcaggagccgaactaaaaacttgatgtggtatggagtccttggaacccgggagttattacagagatcgtacaagaatttagaacaaagggttcaacttgagtgtgatgggcagtatattcctcttcccagcttgcaaggcatagccgtgttgaacattcccagctatgctggaggcactaacttttggggtggaactaaagaggatgatatatttgctgcaccatcctttgatgacaagatcctggaagttgtagcaatatttgatagcatgcaaatggcagtttcaagggtcattaaactgcagcatcatcgaatagcccagtgccgtacagtgaaaatcactatatttggtgacgaaggagtcccagtgcaagtggatggtgaagcgtgggttcagcctccagggattatcaaaattgtgcacaaaaacagagcacaaatgctaacaagggacagagcctttgagagcactctgaaatcttgggaagataagcagaagtgtgattctggtaaaccagttctccgaacccatttgtacatccatcacgccattgacttggcaacagaagaggtgtcgcagatgcagctatgctcccaggctgcagaggagctcattactaggatatgtgacgcagccacaattcactgtcttttggagcaagaactggcccatgctgtgaatgcctgctcccatgccctgaataaagccaacccaaggtgcccggagagtcttacaagagacactgccactgaaatagccatcaatgtgaaggcgctgtataatgaaacagaatctttgctagttggcagggttcctttgcagctggaatcgccacatgaagagcgagtatccaatgccttacactctgtggaggtggaattacagaaactgacagagattccttggctttattatatcttacacccaaatgaggatgaggaacctcctatggattgcaccaaaaggaacaacagaagcaccgtatttcgaatagtgccaaagtttaaaaaggaaaaggttcagaagcagaagacaagttcacagcctgttcagaaatggggcacagaggaagttgctgcttggctggatctgctcaatttgggagagtacaaagatatcttcatccgtcatgacatcagaggggctgaacttttgcatctggaaaggcgagatcttaaggatctggggataccgaaagtgggtcatgtgaagcgaattctccagggaattaaagagcttggaaggagcactccacagtcggaggtgtaatcatattggtgctatttcttggaagagaagttattgccacttaatacaaagtccttggaagcaagtggctgttcttgtagttttctgcatagataagtaagcaccactgaagcacctctgtggcttgatattttgctgtgggtgaaattttgatttgaggtattagaaaatatttttgtgccgaacaatacattccacaaagccattttctttttgtgcaaacctgacatgttcaaatatattcacaatggtaataaggtaggaggaatctgagacgattgcattgtctaaacagtggaattgcaaaatgtttactttccatagatctggtctgatggaatgttcctactgtgcaactgcataacaatatgtggttaaaacttcctaggtttcattacgggggggcattggccattttcttaaaatcataggttaggagactaaaatataaattaagttgtgatttgaatgtagattggtatcacctccaactcctagtgcttagtggtcaaatatgttgaaaacctttccaatactatgaatgaatgcaaatcttaatgcacg

SEQ ID NO: 13314 - DNA, 14734 bp, Homo sapiens
cggcggcagtggcggcaccgcctcctcctcacattcccggggtggcggggttagatgagcggccccagtcgcggcgccgggggcgctgttcatgccggttcccgacggctccgtggctgctgcggggctggggctggggctacccgccgcggactccccgggtcactaccagctgctgctgtcaggccgggccctggccgaccgctaccggaggatttataccgctgcgctcaatgacagggaccaggggggcggcagcgctggacacccagcctccaggaataagaaaattttaaataagaagaaattgaaaagaaaacagaagagcaaatcaaaagtgaagacaagaagcaagtctgaaaacttagagaatacagtaatcataccagatatcaaactacatagcaatccttctgctttcaatatttactgtaatgtacgccattgcgttctggaatggcagaaaaaggaaatatcattggcagccgcatctaagaactctgtgcagagtggagaatcagatagtgatgaagaagaggaatccaaagagccccctatcaagcttccaaagattattgaggttggcctttgtgaagtttttgaattgatcaaagagacacgattttctcatccatccctgtgtctcaggagtctccaagccctgctcaacgtgctgcagggccagcagccagaagtgctccagtctgagccacctgaggtcctagagtctctcttccagcttcttttggaaatcaccgttcgaagtactgggatgaatgacagcacaggacagtccttaacagcactttcctgtgcttgcctctttagtctggtggcttcttggggagaaacaggaaggacacttcaggccatctctgctatcctcaccaacaatggaagccatgcttgccaaactattcaggtgccaacaattctaaattcgctacagagaagtgtacaagcagttttggtgggaaaaattcaaattcaggactggtttagtaatggcattaagaaagcagctttaatgcacaagtggccattaaaagaaatatctgttgatgaagatgaccaatgtctacttcagaatgatggattttttctttatctattatgcaaggatggattatataaaataggctctggatacagtggaacagttaggggccatatatacaattctacatcccgtattagaaacagaaaagaaaaaaagtcttggttagggtatgctcagggttatttattatatagagatgtgaataaccacagcatgacagccataaggataagccctgaaacactggagcaagatggtactgtgatgttaccagattgccacactgaaggtcaaaatattttattcactgatggagaatatattaatcagatagctgcttcaagagatgatggctttgttgtcagaatatttgccacaagcactgaacctgttctacagcaagaattgcaacttaaactggctagaaaatgcttacatgcctgtggtatctcactattcgatctggaaaaggacttgcatattataagtacaggatttgatgaggagtcagcaattcttggtgcaggacgagagtttgcgctaatgaaaacagcaaatggaaagatatattacactggcaaataccagagtcttggaatcaaacaaggtggtccttcagcaggaaaatgggttgagctaccaattacaaaatctccaaagatagtacacttctcagttggacacgatggctctcacgcccttttagttgcagaagatgggagcatattctttacaggatctgctagtaaaggagaagatggagaatcaactaagagcagacggcaatccaaaccttataaacctaaaaagataattaagatggaaggaaagattgtggtatatacagcctgcaataatggaagtagttctgttatttctaaagatggagaactctacatgtttggaaaagatgccatttactctgatagttcaagtttggtaactgatttgaagggccattttgtaactcaggtagctatgggcaaagctcacacttgtgttttaatgaagaatggagaggtgtggacatttggtgtaaataataaaggacagtgtggacgagatactggtgccatgaaccaaggtgggaaagggtttggagttgaaaatatggcaacagcaatggatgaagacctggaagaagaactagatgaaaaagatgagaagtctatgatgtgccctccaggcatgcacaaatggaagctggagcagtgcatggtttgcactgtctgtggagactgtacaggttatggagccagctgtgtcagtagtggacggccagacagagtccccggagggatctgtggttgtggttccggagaatctggttgtgctgtgtgtggatgttgcaaggcctgtgcaagagagttagatggtcaagaggcaagacaaagaggaattcttgatgcagtgaaagaaatgatacctttagatcttcttttagctgtcccagtgcccggggttaacattgaagaacaccttcagttacgacaagaagaaaaacggcaacgtgtaatcagaaggcacagattagaggaaggaagaggcccccttgtatttgctggtcctatttttatgaaccatcgagaacaggctctagccagactcagatcccatccagcacagctaaagcataaacgggacaagcacaaagatggaagtggagaaagaggcgaaaaggatgcaagcaaaatcacaacataccctccaggctctgtgcgatttgactgtgagctccgggcagtccaagtcagctgtggatttcaccattcagtggttttaatggaaaatggagatgtctatacatttggttatgggcagcatgggcagctaggacatggagatgtcaactccaggggatgtcccactcttgttcaagcattgccaggccctagcacacaagtcactgcaggcagcaaccatacggcagtacttttaatggatggacaggtcttcacatttggaagtttttctaaaggacaactgggcagaccaattttggatgtgccatattggaatgcaaagccagctcccatgcctaacattggatcaaaatatggaagaaaagctacttggataggtgcaagtggggaccaaacttttttacgaattgatgaagcacttattaattctcatgtacttgctacatcagaaatttttgccagtaaacacataataggcttggtacctgcttctatatcagaacctcctccatttaaatgccttctgataaataaagtggatgggagttgtaaaacttttaatgactcagaacaagaggatctgcaaggatttggtgtgtgtcttgatcctgtatatgatgtaatttggaggtttcgaccaaatactagagagctgtggtgttacaatgcggtggttgctgatgccaggcttccctctgcagcagacatgcagtccagatgtagtatcctaagtcctgaacttgccttaccaacaggatcaagggccctcactacccgatctcatgcagctttgcacattttaggttgtcttgataccttggcagctatgcaggacttaaaaatgggtgttgcaagtacagaggaagagactcaagcagtaatgaaggtttattctaaagaagattatagtgtggtaaacaggtttgaaagtcatggaggaggctggggttattctgcccattcagtagaagctatacgtttcagtgccgacactgatattttacttggtggtcttggtctgtttggaggtagaggagaatatactgctaaaattaagctgtttgaattgggtcctgatggaggagatcatgaaactgatggtgaccttcttgcagagactgatgtattggcttatgactgtgctgctagagaaaaatatgcaatgatgtttgatgagcctgttctcctgcaagctgggtggtggtatgtggcatgggcccgagtgtcaggacccagcagtgactgtggatctcatggacaggcatctattaccacagatgatggggttgttttccagttcaagagttcaaagaaatcaaataatggtacagatgttaatgcgggtcagatacctcagttattatacagacttccaaccagtgatggcagtgcttcaaaaggcaaacagcaaaccagtgaacctgtacacattttaaagaggtcttttgcaagaactgtctcagtggaatgttttgagtcattgttgagtattcttcactggagctggaccaccttagtcttaggagttgaagaacttagaggattaaaaggattccagttcacagctacactcctagatttagagagactgcgctttgtgggtacctgttgtctgaggttattgcgtgtctatacctgtgaaatttacccagtgtcagctacaggaaaagcagttgtagaagaaactagcaaattagcagagtgtattggaaaaaccagaactttgttaagaaaaattttatcagaaggagttgatcactgcatggtgaaattggataatgatcctcaaggatatctcagtcaacccttgagtcttctagaagctgtccttcaggaatgtcataatactttcactgcctgctttcattctttctacccaactcctgccttacagtgggcttgcctttgtgatctgctgaattgtttggatcaggatatccaagaagcaaacttcaagacatcaagtagccgactccttgcagctgttatgtcagctctgtgtcacacgtctgttaagctgacttccatcttcccgattgcgtatgatggagaagtattactacgatcaattgttaaacaagttagtacagagaacgactcaacactagttcatcgttttccccttttggtggcacatatggaaaaactcagccagagtgaagagaatatctcagggatgacaagcttccgtgaagttctggagaaaatgctggtcattgttgtgctaccagtcaggaacagcctgaggagagaaaatgaactcttctcctcccacctcgtctctaacacctgtggattactggccagcattgtcagtgaactgacagcgtcagccctgggatctgaggttgatggacttaattctcttcactctgtaaaagctagtgctaaccgatttacaaaaacaagtcagggcagaagttggaacactgggaacgggtcccctgatgcaatctgtttttcagtagacaaacctggaatagttgtggttggtttctctgtctatggaggaggtggaattcatgaatatgaattagaggtgttggttgatgatagtgaacatgcaggagattcaactcattcccacagatggacatctctggaattagtgaaaggaacgtacacaacggatgactcacccagtgatatagctgagatcagacttgacaaagtggttcctttaaaggaaaatgttaaatatgctgtgcgcttgaggaactatggaagccgtacagccaatggagatggaggaatgaccacagttcagtgccctgatggtgtgacattcacattcagcacgtgcagcttgagcagtaacggcacaaaccaaaccagaggacagatcccacagatactctactataggagtgaatttgatggagatttacaatcccaacttctgagtaaagccaatgaagaagataaaaactgtagcagagcattgtctgttgtaagcactgtcgttcgagcctctaaggacctcctgcacagagctcttgctgtggatgctgatgacattccagaactgctgagttcttccagtctgttttccatgctgctcccccttattatagcctacataggaccagtagctgctgctattcccaaggtggctgtagaagtctttggccttgtccaacaattgcttccgtcagttgccattttgaatcagaagtatgcaccgcctgccttcaaccctaatcagtcgacagatagcaccacaggaaaccagcctgaacagggcctctctgcttgtacaacctccagtcactatgctgtcatagagagtgagcacccgtataaacctgcctgtgtgatgcattacaaggtgacattcccagaatgtgtgaggtggatgacaatcgaatttgaccctcagtgtggtactgcacagtcagaagatgtccttcgtttgttgattcctgtcagaactgttcagaattcaggatatggaccaaaattgacatctgttcatgaaaatcttaattcatggatagaattaaagaaattttcaggatcctctgggtggcctactatggttttggtgttgccaggaaatgaggcccttttttcattggagactgcatcagattatgtgaaagatgacaaagcttctttctatggttttaagtgttttgcaattggatatgaatttagccctggacctgatgagggagtcatccaattggaaaaagaattagccaatcttggtggggtttgtgcagcagctctgatgaagaaggacctagcacttcctattggtaatgaattagaagaagaccttgaaattcttgaggaggctgcattgcaggtgtgcaaaacccattctggaattcttggaaagggtctagctctttctcattcaccaactatattagaagcacttgagggaaatttaccactccaaatccaaagcaatgaacagtcttttctggatgattttattgcctgtgtcccaggatcaagtggtggaaggcttgcaaggtggcttcagccagattcatatgcggatcctcagaaaacatctttgatcctgaataaggatgatattcgttgtggttggcctaccaccataactgttcaaacaaaagaccagtatggggatgtggtacatgttcccaatatgaaggtggaagtgaaagctgtccctgtttctcagaaaaaaatgtctttacaacaagatcaagcaaagaaacctcaaaggattcctggcagtcctgcagtaacagctgcatcttctaatactgacatgacttatggagggctggcatcaccaaagctagatgtttcatatgaaccaatgatagtgaaggaagctcgatatattgccataacaatgatgaaggtttatgaaaattattcatttgaagaactacgttttgcatcaccaactcctaagagacccagtgagaatatgctgatccgtgtcaataatgatgggacttattgtgcaaattggactccaggggctattggactctacactcttcatgttaccattgatggcattgaaatcgatgctggtctggaagtaaaagtaaaagacccaccaaaagggatgataccaccaggaactcagttggtcaaaccaaagtctgaacctcagcctaataaggttcgaaaatttgtggccaaggacagtgcggggcttcgcatccgtagccacccttcccttcagagtgagcagataggcatagtgaaagtcaatggaactatcacttttattgatgagatccataatgatgatggtgtgtggctgaggctgaatgatgagacaataaagaagtatgtccctaacatgaatggttacactgaagcctggtgcctctcttttaatcaacatcttggcaagagtcttctggtccctgttgacgaatctaaaactaatactgatgactttttcaaagacataaactcctgctgcccacaggaagcaacaatgcaagaacaagatatgccattcttgcgaggagggccaggcatgtacaaggtagtgaagacgggaccttcaggtcacaacatcagaagctgccctaaccttagaggtatcccaattggaatgttagttctgggaaacaaagtcaaagcagtgggagaggtaaccaattctgaagggacatgggtgcaactggatcagaacagcatggtagagttctgtgagagtgatgaaggagaggcatggtccttagctagagacagaggcggaaaccagtacctccgacatgaagatgaacaagctcttctggatcagaattctcaaactcctcctccaagccctttctcagtgcaagcttttaataaaggggcaagttgcagtgcccaaggatttgattatggactcggaaatagcaaaggtgatcgaggaaacatctcaacatcttctaaaccagcctctacatcaggaaaatcagagctgtcctctaaacacagcagatcgcttaaacctgatggacgtatgagccggactactgctgatcagaagaagccaaggggcacagaaagtttatctgctagtgaatccctcatcttaaaatctgatgctgcaaagttgaggtcagattcccacagtaggtcattatcccccaaccataacaccttgcagacattgaaatctgatgggaggatgccttctagctccagagctgaatccccaggaccaggttctcggttgtcatctcctaagccaaagactctcccagccaataggtctagcccatcgggtgctagttctccacgctcctcctcaccacatgataaaaatctacctcaaaaaagtactgctcctgttaagacaaagcttgatcctcctcgggaacgttctaaatcagactcttacacacttgatccagataccctccgcaagaagaaaatgcccctcacagaacctttgagaggacggtcaacgtcaccaaaaccaaaatcagtaccaaaggattctacagattcccctggatctgaaaatagagctccctctccccatgtggtacaggaaaacctccacagtgaggtggtcgaagtctgcacctcaagtactttaaaaacaaatagtctaacagacagcacctgcgatgacagcagtgaatttaagagtgtggatgaaggttcaaataaagttcattttagcattggaaaagcaccactgaaagatgaacaggaaatgagagcatctcccaaaataagtcgaaaatgtgctaatagacacaccaggcccaaaaaagaaaaatcgagttttcttttcaaaggagatggatccaagcctttagagccagccaagcaagccatgtctccttctgtggccgaatgtgccagagctgtgtttgcttccttcctctggcatgaaggcatagtacatgatgcaatggcttgttcttctttcctaaagtttcatcctgaactttccaaagaacatgctcctataaggagtagtttaaatagccaacaacctacagaggaaaaagaaaccaagttaaaaaatagacattcattagaaatatcatctgcactgaatatgtttaatattgcaccccatggaccagatatatctaagatgggtagcatcaacaaaaacaaggtattgtctatgcttaaggaaccacctctgcatgaaaaatgtgaggatgggaaaaccgagaccacttttgaaatgtccatgcataacacaatgaagtctaagtctcctcttcccttaactttacaacatttagtggctttttgggaagacatctctttggctactatcaaagctgcttcccagaatatgatttttccaagtcctggttcctgtgcagttcttaaaaagaaagagtgtgagaaagagaataagaagtccaaaaaggaaaaaaagaaaaaagaaaaggcagaagttaggcccaggggtaatttgtttggagagatggcccagctggcagtaggaggaccagagaaagataccatctgtgaactgtgtggggagtcacatccatacccggtgacctatcacatgagacaagctcacccaggttgtggccgatatgctggtggacaaggttacaatagcattgggcatttttgtggaggatgggctggtaactgtggtgatggtggcataggaggaagcacttggtatctggtatgtgatcgctgtagagaaaaatacctccgcgaaaaacaggctgctgcaagggagaaggtcaaacaatctaggagaaaaccaatgcaagtcaagacccctcgtgccttgcccaccatggaagctcaccaggtgattaaagccaatgcactcttcctgctgtccctgagcagtgcagcagaaccgagcattctgtgttaccatcctgcaaagccattccaatctcagttgcccagtgtaaaagaaggcatttctgaggatcttcctgtgaaaatgccttgtctctacctgcagacattagctaggcatcatcatgaaaattttgtgggctatcaagatgacaatctattccaggatgaaatgagatatctacgttcaacatctgtacctgccccgtatatatcagtaactcctgatgcaagtcctaatgtatttgaagagccagagagcaatatgaagtctatgccaccaagtttagaaaccagtcccataactgatactgatcttgcaaagagaactgtcttccaaagatcatactcagttgttgcttccgaatatgataaacaacactccattttacctgcacgagttaaagctattcctagaagaagagttaacagtggagacactgaagttggttcttcccttttgagacatccgtctcctgagctttctcggctaatctcagcccacagctctctttctaaaggagaacgaaatttccagtggccagttttagcttttgttatacaacatcatgatctagaaggtcttgaaatagcaatgaaacaggccctaaggaaatctgcttgtcgagtttttgctatggaggctttcaactggcttctgtgtaatgtcatccaaaccacttctctccatgatattctgtggcattttgtggcatcactgactcctgcaccagtggaaccagaggaagaagaggatgaagaaaataaaacaagcaaagaaaattcagaacaagagaaagatacaagagtatgtgaacatccactctcagacatagtgattgccggggaagctgctcatcctttaccacacacctttcaccgcttgctgcagaccatctcagaccttatgatgtctctccccagcggcagttcattacagcaaatggccctgaggtgctggagtctcaaattcaagcaatctgatcaccagttccttcatcagagcaacgtctttcatcacattaacaatattttgtcaaagtcagatgatggcgatagtgaagagagttttagcatcagtatacagtctggctttgaagctatgagtcaggaattatgcatagtaatgtgcttaaaggacttaaccagcattgttgacataaaaacttcaagccgacctgccatgattggcagtttgacagacggctccacagaaaccttttgggaatcaggagatgaagataaaaacaaaactaagaacatcaccatcaactgtgtaaaaggaatcaatgcccgctatgtgtctgttcacgtggacaattcccgagatcttgggaataaagttacctcaatgaccttcttaactggcaaagcagtagaagatttgtgcagaataaagcaggttgatctggattccaggcacattggctgggtaacaagtgaacttccaggaggggataatcacatcataaaaattgaattaaaaggcccagaaaatacactgagagttcgacaagtcaaagtcctgggctggaaagatggtgaaagcacaaaaatagctggccagatttcagccagtgtggcccagcagaggaactgtgaagctgagactctgcgagtattcagactgattacgtctcaagtatttggaaagctcatctctggagatgctgaacctacaccagaacaagaggaaaaagcactattgtcatcacctgaaggagaagaaaaagtatacaatgcaacatcagatgctgacctgaaagaacatatggttggaatcatattcagcaggagtaagctgactaacttacaaaaacaggtgtgtgctcatattgtccaagctattcgcatggaagctaccagagtccgtgaagaatgggaacatgctatatcaagcaaagaaaatgccaattctcagccaaatgatgaagatgcctcctctgatgcctactgctttgagctgctctctatggttttagcactgagtggctctaacgttggccggcaatatctggctcaacagctaaccctgcttcaggatctcttctcgctgcttcacacagcctctcctagagtccagagacaggtaacctctttactaagaagagttttgcctgaagtaacccctagtcgtctggccagcatcataggagtgaaatccctccccccagcagatatcagtgatatcattcactcaacagagaaaggagactggaataagctgggtatcttggacatgtttctaggatgcattgccaaagcactcactgtacagctaaaagccaaaggaaccaccatcactggaacagctggtaccactgtgggcaaaggagttacaacagttactcttccgatgattttcaattccagttatctccgacgaggtgaaagtcattggtggatgaagggctcaacccctacccagatctcagagatcatcattaaacttatcaaggatatggcagcaggtcatctgtcagaagcttggtcccgagtgacaaaaaatgctattgcagaaaccatcattgccttgaccaagatggaagaagaatttaggtctccagtgagatgtattgcaacaactagactctggcttgctctcgcatccctatgtgttcttgatcaggaccacgtagatcgtctctcctcggggagatggatgggaaaggatggacaacaaaaacaaatgcctatgtgtgataaccatgatgatggtgaaactgcagcaatcattttatgcaatgtctgtggaaatttatgtacagactgtgacagattccttcaccttcatcgaagaaccaaaactcatcaaagacaggtcttcaaagaagaagaagaagctataaaggttgaccttcatgaaggttgtggtagaaccaaattgttctggttgatggcactggcagattctaaaacaatgaaggcaatggtggaattccgagaacacacaggcaaacccaccacgagtagctcagaagcatgtcgcttctgtggttccaggagtggaacagagttatctgctgttggcagtgtttgttctgatgcagattgccaggaatacgctaagatagcctgtagtaagacgcatccttgtggccatccatgcgggggtgttaaaaacgaagagcactgtctgccctgtctacacggctgtgacaaaagtgccacaagcctgaagcaagacgccgatgacatgtgcatgatatgtttcaccgaagcgctctcggcagcaccagccattcagctggattgtagtcacatattccacttacagtgctgtcggcgagtattagaaaatcgatggcttggcccaaggataacatttggatttatatcttgtcccatttgcaagaacaaaattaatcacatagtactaaaagacctacttgatccaataaaagaactctatgaggatgtcagaagaaaagccttaatgagattggaatatgaaggtctgcataagagtgaagctatcacaactcctggtgtgaggttttataatgacccagctggctatgcaatgaatagatatgcatattatgtgtgctacaaatgcagaaaggcatattttggtggtgaagctcgctgcgatgctgaggctggacggggagatgattatgatcccagagagctcatttgtggtgcctgttctgatgtttccagggctcagatgtgtcccaaacatggcacagactttttggaatataaatgtcgctactgctgttcagtggctgtttttttctgttttggaacaacacatttttgtaatgcttgtcatgatgattttcaaagaatgactagcattcctaaggaagaactaccacactgtcctgcaggtcccaaaggcaagcagttagaaggaactgaatgtccactccatgttgttcatccacccactggggaagagtttgctctgggatgtggagtgtgcagaaatgcccacactttttagaacacgcagatcctttgtctacagagagaaaaattgccttcatcccccaagaggatgcggtgaagtttaaactctgctcaggataaggacgggaccatttttacatccatgaaaatgaaccattcacagtgcaagaaggataccaaataccatgtacataattcttgctatgaaaagtttccccattattttggtttatcttcttttgaacaaatgacatcaaacttgtgaggtgtttgcatgtggccattaccgtcattggcctgtgaagcattggacatttatagataattgatataaaagaatcgccatgcccatggactaagaacgatgctggctttcaagcaaaaaagaaaaataatcattgtttattgtatactgcctttttgtaatcctgtacaattgcatcacgggtggggataaaaagaggaatattctggtttatttcctagactgttatttaaaaaaaaaaaaaacattgtgttaggacagcatataaatgtaataagtatcacactgtatataaacatatcaatgtttgtcctgtataagaattactaaattacaaatgcaatttcatttaaacttctaggttaagtttgagcctgaaattttaatgaagtgcaatactgagtgtgcctcattatcttgcagctgtaaacatattggaatgtacatgtcaataaaaccactgtacatttttatacagtgataaagtct

SEQ ID NO: 13315 - DNA, 2103 bp, Homo sapiens
gcaggcaggtgccatgggcccgcttgaggcacactgaggggacgcggggctgggccatggccggcgctcgggccgccgccgccgctgcctcggcggggtcctcggcctcttcaggcaaccagccgcctcaggagctggggcttggggagctgctggaggagttctcccggactcagtaccgggccaaggatggcagcgggaccggcggctctaaggttgagcgcattgagaagagatgtctggagctgtttggccgagactactgtttcagcgtgattccaaacacgaatggggatatctgtggccactatccccggcacatcgtgttcctggagtatgagagttctgagaaggagaaagacacgtttgagagtaccgtacaggtgagcaagttgcaagacctcatccaccgcagcaagatggcccggtgcagaggacggtttgtctgcccagtaatcctgttcaagggcaagcacatttgcaggtcggccacactggctggatggggagagctgtatggacgctcaggctacaactattttttctcagggggtgcagatgatgcctgggcagatgtggaggacgtcacggaggaggactgtgctcttcgaagtggtgacacgcatctttttgataaggtcagaggctatgacatcaagctgcttcgatacctgtcagtcaaatacatctgtgacctgatggtggagaacaagaaggtgaagtttggcatgaatgtaacctcctctgagaaggtggacaaagcccagcgctatgccgacttcactctcctctccatcccgtatccaggctgtgaatttttcaaggaatataaagatcgggattacatggcagaagggctcatatttaactggaagcaggactacgttgatgccccattgagcatccccgacttcctgactcactctctgaacattgactggagccagtatcagtgttgggatctggtgcaacaaacacaaaactacctgaagctgctgctttccttagttaacagtgatgatgacagcgggctgctggtacactgtatctcaggctgggatcggacccccctcttcatctccctcctgcgcctttccttgtgggctgatgggctcatccacacgtccctgaagcccactgagatcctctacctcactgtggcctatgactggttcctcttcgggcacatgttggtagatcggctcagcaaaggggaggagattttcttcttctgcttcaattttttgaagcatattacctccgaggagttctctgctctgaagacccagaggaggaagagtttgccagcccgggatggaggcttcaccctggaagacatctgcatgctgagacgaaaggaccgtggcagcaccaccagccttggcagcgacttctccctggtcatggagagttccccaggagccactgggagcttcacctatgaggccgtggagctggtcccagcaggagcgccaactcaggcagcttggcttgcagccctgagtgatcgagagactcggctgcaggaggtgcgctcagccttcttggctgcgtacagcagcacagtggggcttcgggcagtagcccccagtccttccggtgccatcgggggcctgctggagcaatttgcccgtggtgttggactccggagcatcagcagcaatgccttgtgaagaagccagcccatgacattttcctgctcctctctcagctgagcccttagcagagaatcaaagccatgcctggccgaaggggtacttccaggtcaggggaaatttcagtcccccatctccatcatgaacatggcagccccaaagctgagcaaggccaaagacagggttttccaacccccagcctcttgactggtgaccaccaccccttcttgtcactgtctcccacccaccccatctttgctgggattcccatcaactctcagaactgtgtggggtttccctggggccttgtggaagccatgacttcacaaagaccctacctgtcagttcttgtttctggggaggagggatcacctgcactgagaatgaggcagtttgacacagatcacaaaataaaatcaaagtctttttgaaaaaaaaaaaaaaaaaa

SEQ ID NO: 13316 - DNA, 3679 bp, Homo sapiens
atggacaacccacaggctctgccactcttcctactcctggcctccttggtagggatcctcaccctcagagcctcttctggacttcagcaaaccaacttctcctctgccttctcttcagactcaaagagctcttcccaggggctgggtgtggaagttccctccatcaaacctcccagctggaaagttccagatcagttcctggattcaaaagcctctgctggaatctctgattccagctggtttcctgaggccctgagttccaacatgtctgggtccttctggtcaaatgtttctgctgagggccaagatttgagcccggtttcccccttctctgaaacccctggttctgaagtatttcctgatatttcggatcctcaagttcctgccaaagaccccaagccttccttcactgttaagaccccagcttcaaacatttctactcaagtctcccataccaaactgtctgttgaggccccagattcaaaattctccccggatgatatggatcttaaactctctgcccagagccctgaatccaaattttctgcagagacccactcagctgcaagctttccccagcaggtggggggcccactcgctgtgctggtggggaccaccatccggctccccctagtcccaatccccaaccctgggccccccacctctctggtggtctggcgccggggctcaaaggtgctggcagctgggggcctggggccaggggcacctctgatcagcctggaccctgctcaccgagaccacctgcgatttgaccaggcccggggggttctggagctcgcctctgcccagctggacgatgcaggggtctacacggctgaggtcatccgggcaggggtctcccagcagactcacgagttcacggtgggtgtgtatgagcccctaccccagctgtcggttcagcccaaggctccagagacagaggagggggcggccgagctccggctgcgctgcctggggtgggggccaggtcgcggggagctgagctggagccgggacggacgcgccctggaggcggcggaatcggagggagccgagacgccccggatgcgctcagagggcgaccagctgctcatcgtgcgccctgtgcgcagcgaccacgcccggtacacttgccgcgtccgcagccccttcggccacagggaggctgccgccgacgtcagcgtcttctacggcccggacccgccgaccatcacggtctcctcggaccgcgacgccgcgcctgcccgctttgtcaccgcgggcagtaacgtgaccttgcgctgcgccgccgcctcgcggccgcccgccgacatcacgtggagcctggcggacccggccgaggccgcggtgcccgcggggtcgcgcctcctgctgcccgcggtcggaccgggccacgcaggcacctacgcctgcctggcggcgaacccgcgtaccggccgccgccgccgctcgctgctcaaccttacagtggcggacctgccccccggggccccacagtgctcagttgaagggggtcccggggaccgcagcctccgcttccgctgctcgtggcccggcggggcccctgctgcctccctgcagttccagggtctccccgaaggcatccgcgccgggccagtgtcctctgtgctgctggcggccgtccccgcccacccccggctcagcggcgtccccatcacctgccttgctcgccacctggtggccacgcgtacctgcacagtcacgccggaggccccccgagaggtgctgctgcatccgctggtggcagagacacggttgggggaggcagaggtggcactggaggcctctggttgtcccccaccctcacgggcatcctgggcccgggaagggaggcccctggctccaggaggcgggagtcgcctgcggctcagtcaagatgggcggaaactccacatcggcaacttcagcctggattgggacctgggaaattactccgtgctgtgcagtggggcgctgggtgctggcggtgaccagatcaccctcattggaccctccatatcctcgtggaggcttcagagagccagagatgcagccgtgctgacttgggatgtggagcgcggggccctgatcagcagttttgagatccaggcatggccagatgggcctgctctgggcaggacttccacctacagggactgggtctccctgctcatcctggggcctcaggagcggtcagccgtggtgccccttccacctcggaacccagggacctggacctttcggatcctgcccatcctggggggccagccagggactccatcacaaagccgggtctaccgggccggccccacgttgagccatggggccatcgctggcatcgtcctgggctccctgctgggcctggcgctgctagccgtacttctcctcctttgcatctgctgcctgtgccgctttcgtggaaagactcctgagaaaaagaagcatccttctaccttggtccccgtggtcaccccctcagaaaagaagatgcatagtgtgaccccagtggagatttcatggcctctggacctcaaagtccctctggaggaccacagctcaactagggcctaccaagcacagaccccagttcagttgtctctgtaggcggaggctcaaagactgttcgcgcagccacacaggtgtgatcagagccagtggtctgccctgcacagggcgttttgggccagaacttcctatttcactccagcagcagccagggcctgctatgactgagggttggaccctgaaagtgggactttctgtctccctctcttgctgcagaagaagagtcttcctgtatttgtgcaagtaaggagatgtgacttcttggctgggaaactcttgctgatctaactgtgtggtttgcacaacctccaagcctctgcagcagacaggcagggcttgctgtgttgctctgagctagagagggagcttggccatgttctctgaaaaggtccccttacattcactttgccacctgtaggccacaccccatccagctcccagcatcttcatcttaaaacagatcagatcatgtcactcttctctttaaacgcttctacggcctgtgcatttcccttcagatattatccaaactcatcgtcgtgaccttcaaaaccttgtggtctggcctctgttggcctccctgacctcccctcccaattctttctctgcccccggactccagtatcacagtctgtctctcagccacaatttattttgcccctagagtttgctgtgcttataacacttctttttcccatatgtcattcatttctcaagtctaagagtagcagttaccatcttagacgaccgttcccttacccctcccttagtcttgggttaagtcccagaatccttgaatttgccgttcctgatacataaatatgtaatttcttgtgtggcctgagactctctctctaaactaagggctttacaaaagcagagaccacatcattaactcagcacttaacccagagcctcacacacagcaggcaatcaataaatatttgttgactgatcaaatgttttggtgccagtgaagagttgggcttgctgctgctgtcttcagcgtaagtcttgctttttcagctgggtttctaattgagaatttagagagtgcattggtgaggattcttttgactgcaagtaacaaaataaaatggtggcaagaactatg

SEQ ID NO: 13317 - DNA, 3479 bp, Homo sapiens
agcggagatggacaagggaagagagagaatggccgctgccgccgccgctgctgccgccgccgccgccgccgctcagtgccggagccctcggtgcgcggcggagagaagaggattccggcgggaactcgactcttggcgccaccgcctcatgcactgtgtaggttttgagagtattttagaagggctttatggaccacggctacgaagagacctcagtttatttgaagactgtgaaccagaagagctgactgactggtctatggatgaaaaatgttcattttgtaacctacagagagaagcagtcagtgattgtataccatctcttgattcttcacagtcaacaccaacagaggagctatcatctcagggccagtccaacactgataagattgaatgccaagcagaaaattacctaaatgcactctttcgaaagaaagatcttcctcagaactgtgatcctaacattcccctagttgctcaggaattaatgaaaaagatgatacgtcaatttgcgattgagtacatttcaaaaagtggtaaaactcaagagaatagaaatggttcaattggaccaagtatagtatgtaaaagtatccaaatgaatcaagcagaaaactcccttcaggaagagcaggaaggccccttagacctcactgtgaatcgaatgcaagaacaaaatactcagcaaggggatggagtgttagatctctctacaaagaaaaccagcataaaatctgaagagtcatccatatgtgatccttcttctgaaaattcagtggctggcatgctacaagtgaaaactgatgagaaactgaatgtgtctgatgagaatacagcaagttgccctttgagccccattaagatgtgccttaatcgtcccattgaatggaatctgaatttgacaacagcatctctaacgagctgtacagttcataaccaaaatctcaaaagcgaagagaaatagattgcagttcttcttgcactatctttattttgtatgtcagtattccttctgaacaataagcatttatcaattgatcttgaagtatttctagtcctgtgatttgtctttatattaaatcattagcattaatcattttgattatattctttatatgtttttttacatgttttacatcagatcattgtggaattttgtaaacggattttgatgtttctcttttagtggtattatgtgaattttttatgccctaagtttaaatacgtaattgtccctagttttatttctgtgcacaaagttttaatatataacacattgtgatttataaagctagtattgtaaagatttgtgatgataacctgacccatgagcagttgtaaaacaggtggataccaactacctcgaagcaaattggtgaaagaaaaggcaaaggtatctcttagaagtaaatctccttcaacgttatatatgtacagaagaaaaaaagttgatcatagctttttgtcaagtagcatgtttcccattcacaggaaaatgtgagcttatcagttctttctctgtattttaaatctaagtctgtgggctttaagagcaatggcacaattgcatgtttactgttcagcaaatctgtgcctcttgatagagaaaaatactatgtggtttctgtaagttaccagttttgaatgaaaaatggtaaatggatttacatctgttttattgtaccttagccttttattttaaagttaaagggatgacttttaaaagcaggacattccctacctttaatagtgcaaagcacagtttcagcaatggctacatgactatgtctaaaaactgaatactcagaatactaaaggtttggtgcttaaatttatttttcccatgccagagaaagcaagctttggtatggtaaaccacatgagaacatggctcctttctttttggatagcctggccatgtgtgaatgggattttagcttattatgtttctaagacttttccttacagcacacttaatgtaccttttcagtccttctcccaaccccctgcaaattgtctttaaaacaacaacacataaggaatctgaagcacaggagaacacagagccaacaaacagaatgaagaacaatcatctatttttaactgactttctatcattaccatttttccttttgcttaataactatcttgctttgaaactttgactccttttataagttctatgaggcacatatgtatagcaatttggttctaaaaaccagtgatcttactttagctccatcttaaaatttcaccttaagtaaatggcctctagtagatgataagcctaaaaaaagcacaattattaaaacaaacagatccatgttaggacatttctgaataataaagagaaaaggtgtttcgttgggtattgcagaaaagaggaccaatttcatatagtacaagtttcgtaagtcaggccaagtgtcaatttcaaaagacaagaaatgaaattgacagtgaatagtgctcataaattggtagcgtatataaagagaagttcctgtcacattatattcccactagaattattatccacagtaaataaatattattttgttatgccaaaaatatagcgagcagcttcatggttaataatacatttatgttgacacctccctaatccaggaaacattcacaaacaaggactcccatatacaaatactttaggaagagagatttcccaggcagatatcaccaaaaatgttttcactgtaggaatcacaaaataagtttttgtcaaaataactgttgttgaacgttatactggtcttcctcactggtgattgataagctcctttctagccagtttgtggtacttccttcattttccctagaaatgttacttgttaaatgtgtcctcaggcggtttcatctttgttgattctgcccatctaagtcataagcttctcaaatgcaagctactagctagttacacttgtaagttttccataatgacatgattttaaacataaagagttcataagaatcacttggagagactatttaaaaatgagattcctaggcccacctcagattgtgataaatctgtgtgactgactgatgcacactttttctggactataataactgatgctgctctactgctttaatacaggccaaagtaacgtggaagcgcacagcagaaaatcttcagaaagacatcaggtttgttctgattttgacaagggtaacttcttctttattaaagcaaataactggacataatcttaaaggattccacctccatcgtctttcctaacttagatcttcattgagaaattgggcaaggttaagtttacttttttctagtgctgcggttttggctcgtcttggtagtctcatcttcatttctgattctggttctggaacttcatgatcactaaatagatgttgaaaatacacgaatttagatacaagctttaaaaccagtttatttataaataaaacttttttgtttctgaaaaaaaaaaaaaaaa

SEQ ID NO: 13318 - DNA, 3504 bp, Homo sapiens
ctcccacggtctctagttcgcgttatggccgctgccgcggctgtggaggcggcggcgcctatgggtgccctatggggcctcgtgcacgacttcgtcgtgggtcagcaagagggccccgctgaccaggtggctgcagatgtgaaatctggcaactatacagtgttacaagttgtggaagcccttgggtcctctctagagaatccagaaccccgaactcgggcacgaggaatccagcttttgtcacaggtgctactccactgtcacaccttgctcctggagaaggaagtggtacacctgatactgttctatgagaaccggctgaaggaccatcatcttgtgatcccatctgtcctgcagggtttgaaggcacttagcctgtgtgtggccctgcccccagggctggctgtttctgtgcttaaagccatcttccaggaagtgcatgtacagtccctgccacaggtggaccgacacacagtctacaatatcatcaccaattttatgcgaacccgggaagaagagctaaagagcctaggagctgacttcacctttggcttcatccatgtgatggatggggaaaaggatccccgtaatcttctggtggccttccgcatcgtccatgacctcatctccagggactatagcctgggaccctttgtggaggagttgtttgaagtgacatcctgttatttccctatcgattttacccctccacctaatgatccccatggtatccagagagaagacctcatcctgagtcttcgcgctgtgctggcttctacaccacgatttgctgagtttctgctgcccctgttgattgagaaagtggattctgaggttctgagtgccaagttggattctctacagactctgaatgcttgctgtgctgtgtatggacagaaggaactgaaggacttcctccccagcctttgggcttctatccgcagagaggtgttccagacggcaagtgagcgggtggaggcagagggcctggcggccctccactccctgactgcgtgtttgtctcgctctgtgctgagggctgatgctgaggacctccttgactccttccttagcaacattctacaggactgcagacaccacctgtgtgaaccggacatgaaactggtgtggcctagtgccaagctgttgcaggcagctgcaggtgcatctgcccgggcctgtgactctgacaccagcaatgtaccgcctttactgctggaacagttccacaagcacagtcagagcagccagcggcggacaatccttgaaatgctcctgggtttcttgaagctgcagcagaaatggagctatgaagacaaagatcaaaggcctctgaatggcttcaaggaccagctgtgctcactggtattcatggctctaacagaccccagcacccagcttcagcttgttggcatccgtacactgacagtcttgggtgcccagccagatctcctatcttatgaggacttggagctggcagtgggtcacctgtacagactgagcttcctgaaggaggattcccagagttgcagggtggcagcactggaagcatcaggaaccctggctgctctctaccctgtggccttcagcagccacctcgtacccaagctcgctgaggagctgcgtgtaggggagtcaaatttgactaacggagatgagcccacccaatgctcccggcatctgtgctgtctgcaagccttgtcagctgtatcaacacatcccagcatcgtcaaggagacactgcctctgctgctgcagcatctctggcaagtgaacagagggaatatggttgcacaatccagtgacgttattgctgtctgtcagagcctcagacagatggcagaaaaatgtcagcaggaccctgagagttgctggtatttccaccagacagctataccttgcctgcttgccttggctgtgcaggcctctatgccagagaaggagccctcagttctgagaaaagtactattggaggatgaggtgttggctgccatggtgtctgtcattggcactgctacaacccacctgagccctgagttagctgcccagagtgtgacacacattgtgcccctcttcttggatggcaacgtgtcctttctgcctgaaaacagcttcccgagcagattccagccattccaggatggctcctcagggcagaggcggctgattgcactgcttatggcctttgtctgctccctgcctcgaaatgtggaaatccctcagctgaaccaactcatgcgggagtttttggaactgagctgctgccacagctgccccttttcttccaccgctgctgccaagtgctttgcaggactcctcaacaagcaccctgcagggcagcagctggatgaattcctacagctagctgtggacaaagtggaggctggcctgggctctgggccttgtcgtagtcaggccttcactcttcttctctgggtaacaaaggccctagtgctcagataccatcctctcagctcctgccttacagcccggctcatgggcctcctgagtgacccagaattaggtccagcagcagctgatggcttctctctgctcatgtctgactgcactgatgtgctgactcgtgctggccatgccgaagtgcggatcatgttccgccagcggttcttcacagataatgtgcctgctttggtccagggcttccatgctgctccccaagatgtgaagccaaactacttgaagggtctttctcatgtacttaacaggctgcccaagcctgtactcttgccagagctgcccacgcttctttccttgctgctggaggccctgtcctgccctgactgtgtggtgcagctctccaccctcagctgccttcagcctcttctactggaagcaccccaagtcatgagtcttcacgtggacaccctcgtcaccaagtttctgaacctcagctctagcccttccatggctgtccggatcgccgcactgcagtgcatgcatgctctcactcgcctgcccacccctgtgctgctgccgtacaaaccacaggtgattcgggccttagccaaacccctggatgacaagaagagactggtgcgcaaggaagcagtgtcagccagaggggagtggtttctgttggggagccctggcagctgagccctcagtcctggcctagactgttctgacaatctaacctgggattactaactgttgagccatcttccccaaagcagggaaaccactggtctctgactgcctttcccacagacacagcacaaatgctaggcctctgttgcatggctgtacaaagaacataagagtccatatttctagtggatttgtaaaataagtgtgtgtgagacacttgcgtttgaagaaagatctagggtcctgggtctcttgcatttatatgtcagaaaaggggcgatatgctgctgaggggtgagtgcatatgagtgtggccctgaggaccagggctggcagatgttgtctacctgctgaagaataaagatttcttttggtaaaaaaaaaaaaaaaaaaaaa

SEQ ID NO: 13319 - DNA, 894 bp, Homo sapiens
ggcggcgctatgctgtcctgcttcaggctcctctccaggcacatcagcccttcgctggcgtctctgcgcccggtgcgctgctgcttcgcgctcccgctgcgttgggccccggggcgccccttggaccccaggcagatcgccccccgccgccccctggccgcagccgcctcctcccgggaccctaccgggcccgccgccggcccctctcgggtgcgccagaacttccaccccgactccgaggctgccatcaaccgccagatcaacctcgagctctatgcgtcctacgtgtacttgtccatggcctattacttctcccgggatgacgtggccttgaacaacttctccaggtatttccttcaccagtcccgggaggagaccgagcacgcggagaagctgatgaggctgcagaaccagcgaggaggccggatccgcctgcaggacatcaagaagccggaacaggacgactgggaaagcgggctgcatgccatggagtgtgctctactcttggaaaagaacgtgaaccagtcgttgctggaattgcacgctctagcctcagataaaggtgacccccatttgtgcgatttcctggaaacctactacctgaatgagcaggtgaagtctatcaaagaactaggtgaccacgtgcacaacttagtgaagatgggggccccggatgctggcctggcggagtacctttttgacacacatacccttggaaatgaaaacaagcagaactaagccacgagctgccttcctcccaggctagtggatccaaagaccaaagtcagctgtctcctgctttcttgcccttaaaatcacctccatctttatattcttctgttatactattcctccaataaagtgatttgtagaaaaaaaaaaaaaaaaaaaaaa

SEQ ID NO: 13320 - DNA, 2425 bp, Homo sapiens
ctagaccctggaaggcaggggactgcgagctgggctggcggagcagaggtgcagaagcaactgagtccaagttgtctggcggcttcaggtggacccagaagacgtccccaactcagggagattcagcgatcactcactcgctgtacagaatgatattcctcacggcactgcctctgttctggattatgatttcagcctcccgagggggtcactggggtgcctggatgccctcgtccatctcggccttcgaaggcacgtgcgtctccatcccctgccgctttgacttcccggatgagctgcggcccgctgtggtgcatggtgtctggtacttcaatagcccctaccccaagaactaccccccggtggtcttcaagtcgcgcacccaagtagtccacgagagcttccagggccgcagccgcctcctgggggacctgggcctgcgaaactgcaccctcctgctcagcaacgtcagccccgagctgggcgggaagtactacttccgtggggacctgggcggctacaaccagtacaccttctcagagcacagcgtcctggatatcgtcaacacccccaacatcgtggtgcccccagaggtggtggcaggcacggaggtggaggtcagctgcatggtgccggacaactgcccagagctgcgccctgagctgagctggctgggccacgaggggctgggggagcccgctgtgctgggccggctgcgggaggacgagggcacctgggtgcaggtgtcactgctgcacttcgtgcccacgagggaggccaacggccacaggctgggctgccaggcctccttccccaacaccaccctgcagttcgagggctacgccagcatggacgtcaagtaccccccggtgattgtggagatgaactcctcggtggaggccatcgagggctcccacgtgagcctgctctgtggggctgacagcaaccccccgccgctgctgacctggatgcgggacgggacagtcctccgggaggcggtggccgagagcctgctcctggagctggaggaggtgacccccgccgaagacggcgtctatgcctgcctggccgagaatgcctatggccaggacaaccgcaccgtggggctcagtgtcatgtatgcaccctggaagccaacagtgaacgggacaatggtggccgtagagggggagacggtctctatcttgtgctccacacagagcaacccggaccctattctcaccatcttcaaggagaagcagatcctgtccacggtcatctacgagagcgagctgcagctggagctgccggccgtgtcacccgaggatgatggagagtactggtgtgtggctgagaaccagtatggccagagggccaccgccttcaacctgtctgtggagttcgcccctgtgctcctcctggagtcccactgcgcggcagcccgagacacggtgcagtgcctgtgcgtggtgaagtccaacccggagccgtccgtggcctttgagctgccatcgcgcaatgtgaccgtgaacgagagcgagcgggagttcgtgtactcggagcgcagcggcctcgtgctcaccagcatcctcacgctgcgggggcaggcccaggccccgccccgcgtcatctgcaccgcgaggaacctctatggcgccaagagcctggagctgcccttccagggagcccatcgactgatgtgggccaagatcgggcctgtgggcgccgtggtcgcctttgccatcctgattgccatcgtctgctacattacccagacacgcaggaaaaagaacgtgacagagagccccagcttctcggcaggggacaaccctcccgtcctgttcagcagcgacttccgcatctctggggcaccagagaagtacgagtccaaagaggtttctaccctggaatctcactgagtgccccaggagagcgagaggcgcctgggatctgagaggaggctgctgggccttcggggtgagcccccagagctggacctgagctattctcactcggacctggggaaacggcccaccaaggacagctacacgctgacggaggagctagctgagtatgctgaaatccgggtcaagtgaaggagctgggggcagcctgcgtggctgacccccctcaggaccctcgctggcccccactggctgtgggctcccttcctcccaaaagtatcgggggctggggcaggaggggagtgaggcaggtgacagtgaggtcctgggggcctgacctccccctccttcccagctgcccctccctgccagcacccccacgccctcattacggctcctctctaacctcctttaccctcatctgtctggaggggagctctgtctgtccgtgttatttattgctacttcctgcctggtctcctgcccccacacctggccctggggcctgtacaaaagggacatgaaataaatgccccaaagcc

SEQ ID NO: 13321 - DNA, 2380 bp, Homo sapiens
ctagaccctggaaggcaggggactgcgagctgggctggcggagcagaggtgcagaagcaactgagtccaagttgtctggcggcttcaggtggacccagaagacgtccccaactcagggagattcagcgatcactcactcgctgtacagaatgatattcctcacggcactgcctctgttctggattatgatttcagcctcccgagggggtcactggggtgcctggatgccctcgtccatctcggccttcgaaggcacgtgcgtctccatcccctgccgctttgacttcccggatgagctgcggcccgctgtggtgcatggtgtctggtacttcaatagcccctaccccaagaactaccccccggtggtcttcaagtcgcgcacccaagtagtccacgagagcttccagggccgcagccgcctcctgggggacctgggcctgcgaaactgcaccctcctgctcagcaacgtcagccccgagctgggcgggaagtactacttccgtggggacctgggcggctacaaccagtacaccttctcagagcacagcgtcctggatatcgtcaacacccccaacatcgtggtgcccccagaggtggtggcaggcacggaggtggaggtcagctgcatggtgccggacaactgcccagagctgcgccctgagctgagctggctgggccacgaggggctgggggagcccgctgtgctgggccggctgcgggaggacgagggcacctgggtgcaggtgtcactgctgcacttcgtgcccacgagggaggccaacggccacaggctgggctgccaggcctccttccccaacaccaccctgcagttcgagggctacgccagcatggacgtcaagtaccccccggtgattgtggagatgaactcctcggtggaggccatcgagggctcccacgtgagcctgctctgtggggctgacagcaaccccccgccgctgctgacctggatgcgggacgggacagtcctccgggaggcggtggccgagagcctgctcctggagctggaggaggtgacccccgccgaagacggcgtctatgcctgcctggccgagaatgcctatggccaggacaaccgcaccgtggggctcagtgtcatgtatgcaccctggaagccaacagtgaacgggacaatggtggccgtagagggggagacggtctctatcttgtgctccacacagagcaacccggaccctattctcaccatcttcaaggagaagcagatcctgtccacggtcatctacgagagcgagctgcagctggagctgccggccgtgtcacccgaggatgatggagagtactggtgtgtggctgagaaccagtatggccagagggccaccgccttcaacctgtctgtggagttcgcccctgtgctcctcctggagtcccactgcgcggcagcccgagacacggtgcagtgcctgtgcgtggtgaagtccaacccggagccgtccgtggcctttgagctgccatcgcgcaatgtgaccgtgaacgagagcgagcgggagttcgtgtactcggagcgcagcggcctcgtgctcaccagcatcctcacgctgcgggggcaggcccaggccccgccccgcgtcatctgcaccgcgaggaacctctatggcgccaagagcctggagctgcccttccagggagcccatcgactgatgtgggccaagatcgggcctgtgggcgccgtggtcgcctttgccatcctgattgccatcgtctgctacattacccagacacgcaggaaaaagaacgtgacagagagccccagcttctcggcaggggacaaccctcccgtcctgttcagcagcgacttccgcatctctggggcaccagagaagtacgagagcgagaggcgcctgggatctgagaggaggctgctgggccttcggggtgagcccccagagctggacctgagctattctcactcggacctggggaaacggcccaccaaggacagctacacgctgacggaggagctagctgagtatgctgaaatccgggtcaagtgaaggagctgggggcagcctgcgtggctgacccccctcaggaccctcgctggcccccactggctgtgggctcccttcctcccaaaagtatcgggggctggggcaggaggggagtgaggcaggtgacagtgaggtcctgggggcctgacctccccctccttcccagctgcccctccctgccagcacccccacgccctcattacggctcctctctaacctcctttaccctcatctgtctggaggggagctctgtctgtccgtgttatttattgctacttcctgcctggtctcctgcccccacacctggccctggggcctgtacaaaagggacatgaaataaatgccccaaagcc

SEQ ID NO: 13322 - DNA, 2737 bp, Homo sapiens
tgacgaaggggcccgaccgcgccgcgtttcgggagcggacgtccgagccacggccgaggcccgattagtccgtccggcaccgctcgggcactttcggaagggaagaggtggagaaccgacgttcgggagcattcggcctcggggacattcggctcgtctcggctcggcctcgggctgactcggcttccgccggcggcgggaacgggcgaaacccgcggcactaagctctctctgagaggcagaattgcgccggccgccggcgagaatctgcctagagccgtccagccctgtcggccggggacgacagccgcctcagcctgtcaggacagtgaggagagcaggggccgagtctctcggaagccctcgtgaggactcggacctattcggactgattcggcttcccacttcggggaacttcgaccctcctcggttcaggactcggtctcggctcggcggcttcgtgcaggttcggctcctactcgggcagcctctgttcgcctcggctccgctccgcgggcggactcggctcggctctgctcggcggctggctgccttttcggtccctattcgggcggcggcttcgggcggcctcggcccagctcgggcgtcctcttcgggccccgcttcgggctccgcgaccggcgcttcgggcggtcccggacggcgccttcgggaaggctcggcggagtccggatggaggactcggactcggcggcaaagcagctgggcctggctgaggcggcggcggtggcggccgcggccgctgtggcggcggcggccgcggccgcggcaggaggcgaggcggaggagccggtgctgagcagggacgaggactcggaggaggacgcagactcggaggcggagcgggagacgccgcgggtcacggcagtggcggtgatggcggcggagcccgggcacatggacatgggcgccgaggccctgcccggccccgacgaggccgccgctgccgcagccttcgcagaggtgaccacagtgacagtggccaacgtgggggctgctgcagacaatgtcttcaccacgtctgtggcgaacgcggcatccatctcaggacatgttctgtctggtaggacggcccttcagatcggggacagcctgaacaccgaaaaagcgacactgattgtcgtccacacagatgggagcatcgtggagaccaccgggctgaaaggcccggcagctcccctcaccccaggtcctcagtctcctccaacccctctggctcccggccaagaaaaaggtggaactaaatacaactgggacccttctgtgtacgacagtgagctgcccgtacggtgccggaacatcagcggcactctgtacaagaacaggctcggctcaggcggccggggacggtgcatcaagcagggggagaactggtacagtcccaccgagtttgaggccatggcaggaagagccagcagtaaggactggaaaagaagcattcgctacgcgggccgacccttgcagtgcctcatccaggatgggatcttaaaccctcacgctgcctcttgcacctgtgctgcctgctgcgacgacatgaccttaagtggcccagtcaggctttttgtgccttacaaaaggcgcaagaaggagaatgaactgcccacaactcccgtgaagaaggactcccccaagaacatcacattgcttccagccaccgcggctaccaccttcaccgtgaccccctcgggacagatcacgacctcgggggcactgacctttgaccgagcgtccacggtagaggccactgctgtcatatcagagagtccggcccagggcgacgtcttcgcaggggccacagtccaagaggccagcgtgcagcccccatgcagggccagccaccctgagcctcactaccccggctatcaggacagctgccagatcgcaccgtttccagaagctgcgttgccaacgtcacatcccaaaatagtgttgacatccctgcctgcgctggcggtcccacccccgactcccaccaaagcggcacctcccgcgttggtcaatgggctggagctgtcagagccgcggagctggctgtacctagaagagatggtcaactccttgctcaacacagcgcagcagctgaagacgctgtttgagcaagccaagcatgccagcacctaccgagaagctgccacaaaccaggccaagatccacgctgacgcagagcggaaggagcagtcctgcgttaactgcggccgggaggctatgagcgagtgcaccggctgccacaaggtcaactactgctccaccttctgccaacgcaaggactggaaggatcaccagcacatatgcggccagtcagcagctgtcaccgtccaggcagacgaagtccacgtggctgaaagcgtgatggagaaggtgaccgtgtgaggctccatcggccgccctgggagctggggcccctcgcactcctgtgaggcttttgcaggtcgaaggcccccctgaggactctggggggacgttgagaagaggggtgtgggaaggtaaagaaacttgctggacaagtcattaacacactttaagcgaatggtgccctgggaagcgcactccccctgcccgggccccctgcccgctcgcggacagattttttatccctgggatcatgagcgtccggtcttgcccacagggcctgtgctgcgacgcacatacatacgtgttgtgtctgtcaataaagtgtaaataaggtctccctgccaaaaaaaaaaaaaaaaaaaaa

SEQ ID NO: 13323 - DNA, 722 bp, Homo sapiens
gtcggcgcgggaggctcaaatggctggaggcggcgggcacgcacactgcgggctccgaggggcacaggtccaggctcctgcgtgaagtgatgctcctctttgccttactcctagccatggagctcccattggtggcagccagtgccaccatgcgcgctcagtggacttacagtttgagatgccatgactgtgcggtcataaatgacttcaactgtcccaacattagagtatgtccgtatcatattaggcgctgtatgacaatctccattcgcataaattctcgtgaactacttgtttataagaactgtacaaacaactgcacatttgtatatgcagctgaacagcctcctgaagccccaggaaaaatcttcaaaactaatagcttctactgggtttgttgttgtaatagcatggtttgcaatgcaggaggacctactaatcttgaaagggacatgttacccgatgaagtaactgaggaggagcttccagaaggaactgtgaggctgggggtatcaaaactgttgctgagttttgcctctatcatagtcagcaatatattgccatgaggaccccaccttggagggtctgaccatcttcacctgttccgcagagaaatgttgctctccattattcccttctaagccagagacccttatccactgctcctctaggtggcccatttatggtttgttgtaagagaaaaattaaaaaaatattgttta

SEQ ID NO: 13324 - DNA, 1747 bp, Homo sapiens
atggggaggcgctgctgccggcggcgcgtgctggcggccgcctgtctgggcgccgcgctcctgctcctatgcgccgcgccccgctccctgcgcccggcatttggaaacagagccctgggctccagctggcttggtggggagaagagaagccccctgcagaagctctatgacctggatcaggacccgcgctcgaccctggcgaaggtgcaccgtcagcggcgcgacctgctgaacagcgcctgtagccgccactcacgccggcagcgcctgctacagccggaggacctgcggcacgtgctggtggacgacgcgcatggcctgctctactgctacgtgcccaaggtggcctgcaccaactggaagcgcgtgctgctggcgctgagcggccaagcccgcggcgacccgcgcgccatctccgcgcaagaggcgcacgcgcctggccgcctgccctcactggccgacttcagccccgccgagatcaaccggcgcctgcgcgcctacttggccttcctgttcgtgcgggagcccttcgagcgcctggcatcggcttaccgcaacaagctcgcgcgcccctacagcgccgccttccagaggcgctacggtgcacgcatcgttcagcgcctgcggccgcgcgcgctccccgacgcccgggcccgcggccacgacgtgcgcttcgcggagttcctggcctacctgctggacccgcgcacgcggcgtgaggagcccttcaacgagcactgggagcgcgcgcacgcgctctgccacccgtgtcgcctccgctacgacgtcgtgggcaagttcgagacgctggcggaggacgcggccttcgtgctgggcctggcgggcgcatccgacctgagcttccctgggccgccgcggccccggggagccgccgcctcccgcgacctggcagcgcgcctcttccgggacatcagccccttctaccagcggcgcctcttcgacctctacaagatggacttcctgcttttcaactactccgccccctcctacctgcggctgctctagcggtcctggaggtcctgtggccacgcggggcaagtgcctttccgacaagacccccggggaatgcaggtgctgccggccccaggacccctcttcaagagccactgcgtgcactcacctggccgccgggccagcgggcgcagggcacacctggccaggcttgggggcagcccatctcaggtggccctgcacgcgtgtgcctgcctcggcctgtcgcctgaggcctgcttcctccacttgctccagctgacaggcacctctccaggccccgtagatgggcaaggacttgataaccagggttttaggcttttaaaggccattttgggggtcagccctgcccctgaacctgttcatggtgcatcagaacataatgctgacaccggtgtcagtgtggcccgagcctgtgtcctccccacctcgcccaccctggcaaggacagctgcggccaaggacgaaagccctcccttggctggcctcacgatggggccgtcccgggagccaggtgggagctgccttccactgccatcgggtctcctctcctctcccacgcggctggccctacccaggcgccaccttcggtctcagtctggcaagacgctgggtcttcaggctccatgccaacagagcccctggtgcaatgcggtcacaggttttatgggactttggtgagctgggcggtcatggttttgaaataaatgtattttgttactttctgaaaaaaaaa

SEQ ID NO: 13325 - DNA, 3495 bp, Homo sapiens
ccagtctgcggaccgttcggagcaacgtggcggcccttgcccgccagcaatgcctaggagcagccaagcagggacccgtcggaaacccttcatccagcctttctctggcgcatggagaacctgggggtcggcgaaggggcagaggcttgcagcaggttgagtcgctctcgcggccgccacagcatgaccagagccccgaagcacctgtggcggcaaccccggcgccccatccgcatccaacagcgcttctattcggatccggacaagtccgcgggctgccgcgagagggacctgagcccgcggccggagctcaggaagtcgcggctctcctggcccgtttcctcctgcaggcgctttgacctggaaaatgggctctcgtgtgggaggagggccctggaccctcagtccagccctggcctgggccggattatgcaggctccagtcccgcacagccagcggcgcgagtccttcctgtaccgctcagatagcgactatgaactctcgcccaaggccatgtctcggaactcctctgtggccagcgacctacatggagaggacatgattgtgacgccctttgcccaggtcctggccagtctgcggaccgttcggagcaacgtggcggcccttgcccgccagcaatgcctaggagcagccaagcagggacccgtcggaaacccttcatccagcaatcagctccctcctgcagaggacacggggcagaagctggcattggagacgctagacgagctggactggtgcctggatcagttggagacgctgcagacccggcactcggtgggggagatggcctccaacaagttcaagcggatcctgaaccgggagttgacccacctgtccgaaaccagccgctccgggaaccaggtgtccgagtacatctcccggaccttcctggaccagcagaccgaggtggagctgcccaaggtgaccgctgaggaggccccacagcccatgtcccggatcagtggcctacatgggctctgccacagtgccagcctctcctcagccactgtcccacgctttggggtccagactgaccaggaggagcaactggccaaggagctagaagacaccaacaagtggggacttgatgtgttcaaggtggcggacgtaagtgggaaccggcccctcacagctatcatattcagcatttttcaggagcgggacctgctgaagacattccagatcccagcagacacactggccacctacctgctgatgctggagggtcactaccacgccaatgtggcctaccacaacagcctacatgccgccgacgtggcccagtccacgcatgtgctgctggctacgcccgccctcgaggctgtgttcacagacttggaaatcctggctgccctctttgcaagcgccatccacgacgtggaccatcctggggtctccaaccagtttctgattaacaccaactcagacgtggcgcttatgtacaacgacgcctcggtgctggagaaccatcacctggctgtgggcttcaagctgctgcaggcagagaactgcgatatcttccagaacctcagcgccaagcagcgactgagtctgcgcaggatggtcattgacatggtgctggccacagacatgtccaaacacatgaacctcctggccgacctcaagaccatggtggagaccaagaaggtgacaagcctcggtgtcctcctcctggacaactattccgaccgaatccaggtcttgcagaacctggtgcactgtgctgatctgagcaaccccaccaagccgctgcccctgtaccgccagtggacggaccgcatcatggccgagttcttccagcagggagaccgcgagcgtgagtcgggcctggacatcagtcccatgtgtgacaagcatacggcctcagtggagaagtcccaggtgggtttcattgactacattgctcacccactgtgggagacttgggctgacctggtccacccagatgcacaggacctgctggacacgctggaggacaatcgagagtggtaccagagcaagatcccccgaagtccctcagacctcaccaaccccgagcgggacgggcctgacagattccagtttgaactgactctggaggaggcagaggaagaggatgaggaggaagaagaggagggggaagagacagctttagccaaagaggccttggagttgcctgacactgaactcctgtcccctgaagccggcccagaccctggggacttacccctcgacaaccagaggacttagggccagccctgcgtgaactgcaggggcaatggatggtaaagccctttggctcttggcaggcagactttccaggaagaggctccatgtggctcctgcttcactttcccacccatttagggagacaatcaagctcttagttataggtggctcccagggtctaattggaggcacctggctggggtccactctgaccctagacttgcctaaaagagctctctaaggggcagcctcttacgatgccctggtgtctttctcctgggcttctatccctgtgaggagaggtgctgtctgctggagcctctagtccaccctctccagtggtcactcttgagtcacatctgtcacttaattatttccttctttatcaaatatttattgctcatctacttcgggccagctttctgcctctgtagtagccctgcacaaagggtggggagtcaggagaccatcccaaaggcatctccctgtcttcctctaccaagcggctctctgcaagagcatggaaatgtgagtggggaaaattttcagcaccaaagcttcactcatacccagttttgtttctgaaactacggtagggggcaggaagaggagcagaaaagaagggctgggcaaggcatagtggcttatgcctgtaatcccggtactttgggaggctgaggtgggaggactgcttaagctcaggagtttgagaccagcctgggcaacatagcaagacccccaccatctctgaaaaaaaaaattagccaggcatggtggtgtgcacctgagaatcccagctactcagaaggttgagacaaaggggatcgcttgagcccaggagttggaggctgaagagagctatgactgcatcactgcactccagcctgggcaacacagcaagatcctgtctaaaaataaaaagaaaagagaaggaaaggaaagagacggggctctgaggccgagcacagtggcccatgcctataatcccagcactttgggaggctgaggcaggtggatcacctgaggttaggagttcgagaccagcctggccaacatggtgaaaccccatctctactaaaaatacaaaaattggctgggcatggtggcgggtgcctgtaatcccagctactggggaggctgaggcaggagaatcacttgaattcaggaggtggaggttgcagtgagccgacatcatgccactgcactccagcctggggctgacagagcaagacactgtctcaaaaaagaaaaaaaaaaaaaaaaaaa

SEQ ID NO: 13326 - DNA, 3193 bp, Homo sapiens
gccgcgtccggcccggtcctgtcccgcagcgtcccgccagccagctccttgcacccttcgcggccgaggcgctccctggtgctccccgcgcagccatggctcagcacttctccctggccgcctgcgacgtggtcggattcgacctggaccacactctgtgtcgctacaacctgcccgagagcgccccgctcatttataatagctttgcccagttcctagttaaggagaaagggtacgataaggaattgctcaatgtgaccccagaggattgggatttctgttgcaaaggtttggcattggatctagaagatgggaacttccttaaacttgcaaataatggcactgttctcagggcaagccatggcaccaagatgatgactccagaggtgctggcagaggcatatggcaagaaagagtggaagcacttcttgtcggacactggaatggcttgccgctcaggaaagtattacttttacgacaactactttgacctgccaggagctcttctgtgtgccagggtggtggactatttaacaaaactgaacaatggtcaaaaaacatttgatttttggaaggatatagttgctgctatacaacacaattataaaatgtcagcttttaaggaaaactgtggaatatattttccagaaataaaaagagatccaggcagatatttacatagttgtcctgaatctgtgaaaaaatggcttcgacagctaaagaatgctgggaaaattcttctgttaattaccagttctcacagtgattactgtagacttctctgcgaatatattcttgggaatgattttacagacctttttgacattgtgattacaaatgcattgaagcctggtttcttctcccacttaccaagtcagagacctttccggacactcgagaatgatgaggagcaggaggcactgccatctctggataaacctggctggtactcccaagggaacgctgtccacctctatgaacttctgaagaaaatgactggcaaacctgaacccaaggttgtttattttggtgacagcatgcattcagatattttcccagctcgtcactatagtaattgggagacagtcctcatcctggaagaactcagaggggatgaaggcacgaggagtcagaggcctgaggagtcagagcctctagagaagaaaggaaaatatgagggaccaaaagcaaaacctttaaatacttcatctaaaaaatggggctctttttttattgattcagttttgggactggaaaatacagaagactccttggtttatacatggtcttgtaagagaatcagtacttacagcactattgcaattccaagtattgaagcaatcgcagaattacctctggactacaaatttacaagattctcttcaagcaattcaaaaacagctggctactatccaaatcctccactggtcttatcaagtgatgagacactgatatccaaataagttgtctttactgaaaaatgaagtgaagacccatatatgcagttaaaaaaaagttaattttcaaaaaatactgtaaaagactttaaggaacaagttttattgaccaataagttgatatttgtccataggtctcctttctataaatcatcttgatgtttaacaactcttattatattaaaatctcagtatcctaaaacttagaaccttattgatattttctatacagtagttttgtgattagaattcacctggggacacacactcacacgcacagtcactcttacacatatgcctagtccagtggttctcaaagtgtgatccatagactaatagcatagcattacctgagaacttgataatgcatatttgcaggccccacgcaaaacctgctgaatcagaagctctgagagtaaggcctaccaatctggtttaacaagcccgtcaggtgattctgatttacagtacagtttgagacccactggctagaacatatcctccagagacttggcttaattggtctgggtaaatatggctgagcgttgttatcttttgttatcttttatatgccctaggaaagtacaaccagaattgaaaaccaactgatctataccagttctttcaattaatagtcaagaacattgagtccagtgagattaagtgatttttgcaggctatgaggttttatgctattcctgtgttctccaaaacaagaaaataaaaagacatgacttattctctgttcatacagcaagtatggaaaaaagatgatctagaagtcaactatctcaacctccattgttacccactaggtttttttctaataatgttaaaggctatttaatttatttaatcaactttaagcattacattctcaattggggacaaaaattggttcttggggtgaaaaaatattagatatggcttgtggacttccaatatcatcctatccaacaaaatcttattccttagtattaatttatctcattgggaagaaatttgtagttaaaactatttaatgtaatttgaatttaatttctgtaattgggaaggagggtaataatgaacaaaaagtttgagaaaaaaatgctttaatgggttttacaggcatgctacaatccaggactgtggtgttctatgtgccgtgtatggtcatattagtagctatttgttgcaagatacttgaagccaaatgtttgcagtataggttcctggctactgtttatgctgtgatttcactctgtctatcatgggcagtattagaaaacacactggttttcactatctggtttacaaacactatcattattttacctggattgaagtgcagaatttggcatatcgatgcatgcaatggaaagaaaaaaaatttgttaaaatttgtaaatgttcagctaaatctcagatatactgtgggatgagtatctcagggtaagtaacaaaaaaacaaacaaaaaaaatcactgaaatttttccctcacagtcagtagctttgtttgatatttaacaataagtatatggtgatatacttgaaatttatgtccagaatgtcactggaatattacaatgagcataaataatcaagcttaggactaaatgaaagatactatctcatgtatgctttaaatagagaatttatttcttttaaaaataaagctatttttccttaaaaaaaaaaaaaaaaaaaaaaaaaaaaaaaaaaaaaaaaaaaaaaaaaaaaaaaaaaaaaaaaa

SEQ ID NO: 13327 - DNA, 3163 bp, Homo sapiens
cggaagctgagagggcccgcgggtaggcatggcggcgcaccttaagaagcgggtttatgaggaattcacgaaagtggttcagccacaggaggaaattgctactaagaaactccgactaacaaaaccaagtaaatctgcagcactccacatagatctgtgtaaagctacctccccagcagatgctttgcaatacttgctccagtttgccaggaagcctgtcgaggcggaaagcgtagagggagtagtcaggattctcttggaacattattacaaggagaatgatccatctgtgagactgaaaattgcatcattgttgggtttattatcaaagacagcaggattttcaccagactgcattatggatgatgccatcaacatcctgcagaatgaaaagtctcatcaagtcctagctcaactgctggatactttgcttgcaattggcactaagctaccagagaatcaagctatccaaatgcgattagttgatgtggcctgcaagcatctgacagatacgtctcatggtgtaagaaataagtgcctgcagttacttggcaatcttggctctttggagaaaagtgtcacaaaagatgcagaaggcctagctgccagagatgtccagaagattataggggattacttcagtgaccaagacccacgtgtcagaacagcagctataaaagccatgttgcagctccatgaaagaggactgaaattacaccaaacaatttataatcaggcctgtaaattactctctgatgactatgaacaagtgcgcagtgctgcagtccagcttatctgggtcgtcagtcagctctatcctgaaagcattgtcccaattccttcttctaatgaagaaatacgcttagttgatgatgcgtttggcaaaatttgtcacatggtcagtgatggctcttgggtggttcgtgttcaggcagcaaaactgttgggctctatggagcaagtcagttctcatttcttggagcagacccttgacaagaagctgatgtcagatctgaggaggaaacgtactgcacatgagcgtgccaaggaactttacagttcgggggagttttccagtggcagaaagtggggagatgatgctcccaaggaagaagtagataccggggctgtgaacttgattgagtcaggagcttgtggagcttttgttcatgggttggaagatgagatgtatgaggttcgtattgctgctgtggaggccctctgcatgttggcccagtcttcaccctcttttgctgagaagtgccttgatttcctagttgacatgttcaacgatgaaattgaggaagtacgtctgcagtctatacataccatgagaaaaatctctaacaacatcaccctccgagaagatcagcttgacactgtcctggctgtgctagaggattcatccagagatattcgagaggctcttcatgaactcttatgctgtactaatgtttcaaccaaagaagggattcatcttgcattggtggagctgctgaaaaatttaaccaagtaccctactgatagggactccatatggaagtgcttgaagtttctgggaagtcggcatccaaccctggtgcttcccttggtgccagagcttctgagcacccacccattttttgacacagctgaaccagacatggatgatccagcttatattgcagttttggtacttattttcaatgctgctaaaacctgtccaacaatgccagcattgttctcagatcacaccttcaggcactatgcctacctccgagacagtctttctcatcttgttcctgccttgaggttaccaggtagaaaactggtgtcatcagctgtttctcccagcatcatacctcaagaggatccttcccagcagttcctgcagcagagccttgaaagagtgtatagtcttcagcacttggaccctcagggagcccaggagctgctggaattcaccatcagggatctgcaaagacttggagaacttcaatctgaattggcaggagtagctgatttctctgccacctatcttcgctgtcaactacttctcatcaaggccttgcaggaaaagttgtggaatgtagctgcccctttgtatttgaagcagagtgatttggcctcagcagcagcgaaacagattatggaagagacctacaaaatggaattcatgtacagtggtgtggagaataagcaggtggtgattatacatcacatgaggctgcaggccaaagctttgcaacttatagtaacagcacgaactacacgaggacttgaccccttatttgggatgtgtgaaaaatttttacaggaagtagacttttttcagaggtatttcatcgctgatttgccccacttgcaggacagctttgtggacaaactccttgaccttatgccccgactcatgacatccaaacctgcagaagtggtcaaaattctacagaccatgctgcgacagagtgcctttctgcatctcccgcttccagagcagatccacaaagcctcagccaccatcatcgagccagcgggcgagtcagacaaccctttgcggtttacctctgggttggtggttgccctggatgttgatgcaaccctggagcatgtgcaggatcctcagaacactgttaaggtccaggtcttatatccagatggccaggctcagatgattcaccccaagcctgcagacttccggaatcctggcccagggcggcaccggctcatcactcaggtttatctctcccacaccgcttggacagaggcatgccaggtggaagtgaggctgctgctggcctacaactccagtgctcgcattccaaaatgcccctggatggagggtggtgagatgtcaccacaggtggaaaccagcatcgagggcaccattcccttcagcaagcctgtaaaagtttatataatgcccaaacctgcacggcgctaaggcaaaaacagtcttcccaaccgtggcctagagggcccttcttaggtgtcagaatgagccaagcctgaagcacttcacctggaattgatgtgtaggcttaaggagtatgtgacccttacagtctcatctggtatcaaacacaggataaattgtttcttcattaaaaaataaaaaaccttcaagtctacttacccttctcctgtccacaataaagttgagaaaacaccaaaaaaaaaaaaaaaa

SEQ ID NO: 13328 - DNA, 2561 bp, Homo sapiens
gttgggcggtggcgggggtgatgcagcggccgctgagggtggcgcaggggccccggccagcccggggctgcagcagtgcggacagctccagaagctcatcggcatctccattggcagcctgcgcgggctgggcaccaagtgcgctgtgtccaacgaccttaccgagcaggagatacggaccctggaacattgtcccaattccttcttctaatgaagaaatacgcttagttgatgatgcgtttggaaaaatttgtcacatggtcggtgatggctcttgggtggttcatgttcaggcagcaaaactgttgggctctatggagcaagtcagttctcatttcttggagcagacccttgacaagaagctgatgtcagatctgaggaggaaacgtactgcacatgagcgtgccaaggaactttacagttcaggggagttttccagtggcagaaagtgggaagatgatgctcccaaggaagaagtagataccggggctgtgaacttgattgagtcaggagcttgtggagcttttgttcatgggttggaagatgagatgtatgaggttcgtattgctgctgtggaggccctctgcatgttggcccagtcttcaccctcttttgctgagaagtgccttgatttcctagttgacatgttcaacgatgaaattgaggaagtacgtctgcagtccatacataccatgagaaaaatctctaacaacatcaccctccgagaagatcagcttgacactgtcctggctgtgctagaggattcatccagaggtattcgagaggctcttcatgaactcttatgctgtactaatgtttcaaccaaagaagggattcatcttgcattggtggagctgctgaaaaatttaaccaagtaccctactgatagggactccatatggaagtgcttgaagtttctgggaagtcggcatccaacgctggtgcttcccttggtgccagagcttctgagcacccacccattttttgacacagctgaaccagacatggatgatccagcttatattgcagttttggtacttattttcaatgctgctaaaacctgtccaacaatgcgagcattgttctcagatcacaccgtcaggcactatgcctacctccgagacagtctttctcatcttgttcctgccttgaggttgccaggtagaaaactggtgtcatcagctgtttctcccagcatcatacctcaagaggatccttcgcagcagctcctgcagcagagccttgaaggagtgtgtagtcttcagcacttggaccctcagggagcccaggagctgctggaattcaccatcaggccttgcaggaaaagtcgtggaatgtagctgccccttcgtatttgaagcagagtgatttggcctcagcagcagcgaaacagactttaccccttatttgggatgtgtgaaaaatttttacaggaagtagacttttttcagaggacacatgaaccattaacaagaaaaatatttaaataagaaactcaccaagccaggagaatatgaatacctggatgtgccccctaggaatctggatctcttctcttttccccaccctgccctcaactccccttacatacatacagcctggatcacaagacccaagaaaaccattccaccagctgctgagagaagagccacaaaaggacccagaacttctccatggctaccttagagcaccctaaaatgtgctaacagccattgttagtattcaggagctgtttattcccattttcacactacactaaagaattttaaacaatcacaagatagactggctggaagttggtgcttggaacatcccacgtcaccgaaaagcacagtgctgcaatctcagaaaccccaggctcagccagcagagagaggaggagcagctggacattggagactatgattggacattagagagaaggagcttgacttcacagagaaagcacagtgggctgagtgagtggagtttgcccctgccagcacccgtgcactccagttcccacctgtgaaggtgtcagagagatattctgcttaaaaatcagagtgactccatcttaaatagcagctgggtgagataaggctgagacctactgggctgcattcccaggaggttaggcattctaaccttctatcaggatgagatagaaggccagcataagatataggtcacgaagactctgctgataaaacaggatgtggtttaaaaaaatgccagccagaacccaccaaaaccaagatggtgatgctcattctcactgctcattatatgccagtataatgcatttgcatgcaaaaagactctaccaccagtgccatgacagcttacagatgccatggcaagatctggaagttaccctgtagcctctaaaatggggaagaaccctcagttctggaaaatttctgcccctttcctgaaaaactcatgaataatctaccctttgtttagcatataatcaagaaacaactataagtatagtcaatcgagcagccaatctcaccgctctgtctatggagtagtcattcttttctttacatctctaataaaattgctttcacttt

SEQ ID NO: 13329 - DNA, 2348 bp, Homo sapiens
ttccttcctagtcgcggggagtctgagaaagcgcacctgttccgcgaccgtcacgcacccctcctccgcctgccgcgatgtaccgctacctggccaaagcgctgctgccgtcccgggccgggcccgctgccctgggctccgcggccaaccactcggccgcgttgctgggccggggccgcggacagcccgccgccgcctcgcagccggggctcgcattggccgcccggcgccactacagcgagttggtggccgaccgcgaggacgaccccaacttcttcaagatggtggagggcttcttcgatcgcggcgccagcatcgtggaggacaagttggtgaaggacctgaggacccaggaaagcgaggagcagaagcggaaccgggtgcgcggcatcctgcggatcatcaagccctgcaaccatgtgctgagtctctccttccccatccggcgcgacgacggctcctgggaggtcatcgaaggctaccgggcccagcacagccagcaccgcacgccctgcaagggaggtatccgttacagcactgatgtgagtgtagatgaagtaaaagctttggcttctctgatgacatacaagtgtgcagtggttgatgtgccgtttgggggtgctaaagctggtgttaagatcaatcccaagaactataccgaaaatgaattggaaaagatcacaaggaggttcaccatggagctagcaaagaagggctttattggtcctggcgttgatgtgcctgctccagacatgaacacaggtgagcgggagatgtcctggattgctgatacctatgccagcaccatagggcactatgatattaatgcacacgcctgtgttactggtaaacccatcagccaagggggaatccatggacgcatctctgctactggccgtggtgtcttccatgggattgaaaacttcatcaatgaagcttcttacatgagcattttaggaatgacaccagggtttagagataaaacatttgttgttcagggatttggtaatgtgggcctacactctatgagatatttacatcgttttggtgctaaatgtattgctgttggtgagtctgatgggagtatatggaatccagatggtattgacccaaaggaactggaagacttcaaattgcaacatgggtccattctgggcttccccaaggcaaagccctatgaaggaagcatcttggaggtcgactgtgacatactgatcccagctgccactgagaagcagttgaccaaatccaacgcacccagagtcaaagccaagatcattgctgaaggtgccaatgggccaacaactccagaagctgataagatcttcctggagagaaacattttggttattccagatctctacttgaatgctggaggagtgacagtatcttactttgagtggctgaagaatctaaatcatgtcagctatggccgtttgaccttcaaatatgaaagggattctaactaccacttgctcctgtctgttcaagagagtttagaaagaaaatttggaaagcatggtggaactattcccattgtacccacggcagagttccaagacagtatatcgggtgcatctgagaaagacattgtgcactctgccttggcatacacaatggagcgttctgccaggcaaattatgcacacagccatgaagtataacctgggattggacctgagaacagctgcctatgtcaatgccattgaaaaagtcttcaaagtgtacagtgaagctggtgtgaccttcacatagatggatcatggctgacttcctcactaacctcttcacgtgtaacttctgcagacctaccacaagtttacatgtaaccacagaaatccctttctctcctgactcattactaatggataccattctcaacaagtcaatccaaatcagcccgttaaggagaaagaaattaatatacaagctgagtgtgaaagtagaaatcacctacaccagagagctattttggtattttgcctttaaataaaaagcctcctccatatggctgtgcagccttgctctgtggcttttcccagcacaatcagtgctagtgctggggaagggacagtcaagagcagtcagttgcttacttattttgctctggatgagtctgggacacgctgtaactttaacacatttaagaagaaggtgtgtggccttttcagaaggtggcatggtcctcaagtgagttcttagtattttatatcagcaaaataactcaattttgcagattgcaaacaaatataaaagctgtttctgtttatgaattttattcttttagaatagaataagtacatgctgctgtaataaaattgcctttaatcacttaaaaaaaaaaaaaaa

SEQ ID NO: 13330 - DNA, 5094 bp, Homo sapiens
gcgaaacggcagaggagccgagccccctccgcccaaggcgccctccctccgtccgcgcacaggcgccgtcgcttggaggagcaaggtgcctcccagcccgcaggggcgccgcgcgcaagcccgcgggctcttcggtggctctgccccgggactgcacctggaggcggccccggacggggatggtcagcggctgctgccgtctggctcgcgagcgggacgctgtgagggcaccatggcgctgactcccgggtgggggtcctcggcggggccggtccggccggagctctggctgctgctgtgggcagccgcgtggcgcctgggtgcctcggcgtgccccgccctctgcacctgcaccggaaccacggtggactgccacggcacggggctgcaggccattcccaagaatatacctcggaacaccgagcgcctggaactcaatggcaacaacatcactcggatccataagaatgactttgcggggctcaagcagctgcgggtgctgcagctgatggagaaccagattggagcagtggaacgtggtgcttttgatgacatgaaggagctggagcggctgcgactgaaccgaaaccagctgcacatgttaccggaactgctgttccagaacaaccaggctttgtcaagactggacttgagtgagaacgccatccaggccatccccaggaaagcttttcggggagctacggaccttaaaaatttacggctggacaagaaccagatcagctgcattgaggaaggggccttccgtgctctgcgggggctggaggtgctgaccctgaacaacaacaatatcaccaccatccccgtgtccagcttcaaccatatgcccaagctacggaccttccgcctgcactccaaccacctgttttgcgactgccacctggcctggctctcgcagtggctgaggcagcggccaaccatcgggctcttcacccagtgctcgggcccagccagcctgcgtggcctcaatgtggcagaggtccagaagagtgagttcagctgctcaggccagggagaagcggggcgcgtgcccacctgcaccctgtcctccggctcctgcccggccatgtgcacctgcagcaatggcatcgtggactgtcgtggaaaaggcctcactgccatcccggccaacctgcccgagaccatgacggagatacgcctggagctgaacggcatcaagtccatccctcctggagccttctcaccctacagaaagctacggaggatagacctgagcaacaatcagatcgctgagattgcacccgacgccttccagggcctccgctccctgaactcgctggtcctctatggaaacaagatcacagacctcccccgtggtgtgtttggaggcctatacaccctacagctcctgctcctgaatgccaacaagatcaactgcatccggcccgatgccttccaggacctgcagaacctctcactgctctccctgtatgacaacaagatccagagcctcgccaagggcactttcacctccctgcgggccatccagactctgcacctggcccagaaccctttcatttgcgactgtaacctcaagtggctggcagacttcctgcgcaccaatcccatcgagacgagtggtgcccgctgtgccagtccccggcgcctcgccaacaagcgcatcgggcagatcaagagcaagaagttccggtgctcagccaaagagcagtacttcattccaggcacggaggattaccagctgaacagcgagtgcaacagcgacgtggtctgtccccacaagtgccgctgtgaggccaacgtggtggagtgctccagcctgaagctcaccaagatccctgagcgcatcccccagtccacggcagaactgcgattgaataacaatgagatttccatcctggaggccactgggatgtttaaaaaacttacacatctgaagaaaatcaatctgagcaacaacaaggtgtcagaaattgaagatggggccttcgagggcgcagcctctgtgagcgagctgcacctaactgccaaccagctggagtccatccggagcggcatgttccggggtctggatggcttgaggaccctaatgctgcggaacaaccgcatcagctgcatccacaacgacagcttcacgggcctgcgcaacgtccggctcctctcgctctacgacaaccagatcaccaccgtatccccaggagccttcgacaccctccagtccctctccacactgaatctcctggccaaccctttcaactgcaactgccagctggcctggctaggaggctggctacggaagcgcaagatcgtgacggggaacccgcgatgccagaaccctgactttttgcggcagattcccctgcaggacgtggccttccctgacttcaggtgtgaggaaggccaggaggaggggggctgcctgccccgcccacagtgcccacaggagtgcgcctgcctggacaccgtggtccgatgcagcaacaagcacctgcgggccctgcccaagggcattcccaagaatgtcacagaactctatttggacgggaaccagttcacgctggttccgggacagctgtctaccttcaagtacctgcagctcgtggacctgagcaacaacaagatcagttccttaagcaattcctccttcaccaacatgagccagctgaccactctgatcctcagctacaatgccctgcagtgcatcccgcctttggccttccagggactccgctccctgcgcctgctgtctctccacggcaatgacatctccaccctccaagagggcatctttgcagacgtgacctccctgtctcacctggccattggtgccaaccccctatactgtgactgccacctccgctggctgtccagctgggtgaagactggctacaaggaaccgggcattgctcgttgtgctgggccccaggacatggagggcaagctgctcctcaccacgcctgccaagaagtttgaatgccaaggtcctccaacgctggctgtccaggccaagtgtgatctctgcttgtccagtccgtgccagaaccagggcacctgccacaacgacccccttgaggtgtacaggtgcgcctgccccagcggctataagggtcgagactgtgaggtgtccctgaacagctgttccagtggcccctgtgaaaatgggggcacctgccatgcacaggagggcgaggatgccccgttcacgtgctcctgtcccaccggctttgaaggaccaacctgtggggtgaacacagatgactgtgtggatcatgcctgtgccaatgggggcgtctgtgtggatggtgtgggcaactacacctgccagtgccccctgcagtatgagggaaaggcctgtgagcagctggtggacttgtgctctccggatctgaacccatgtcaacacgaggcccagtgtgtgggcaccccggatgggcccaggtgtgagtgcatgccaggttatgcaggtgacaactgcagtgagaaccaggatgactgcagggaccaccgctgccagaatggggcccagtgtatggatgaagtcaacagctactcctgcctctgtgctgagggctacagtggacagctctgtgagatccctccccatctgcctgcccccaagagcccctgtgaggggactgagtgccagaatggggccaactgtgtggaccagggcaacaggcctgtgtgccagtgcctcccaggcttcggtggccctgagtgtgagaagttgctcagtgtcaactttgtggatcgggacacttacctgcagttcactgacctgcaaaactggccacgggccaacatcacgttgcaggtctccacggcagaggacaatgggatccttctgtacaacggggacaacgaccacattgcagttgagctgtaccagggccatgtgcgtgtcagctacgacccaggcagctaccccagctctgccatctacagtgctgagacgatcaacgatgggcaattccacaccgttgagctggttgcctttgaccagatggtgaatctctccattgatggcgggagccccatgaccatggacaactttggcaaacattacacgctcaacagcgaggcgccactctatgtgggagggatgcccgtggatgtcaactcagctgccttccgcctgtggcagatcctcaacggcaccggcttccacggttgcatccgaaacctgtacatcaacaacgagctgcaggacttcaccaagacgcagatgaagccaggcgtggtgccaggctgcgaaccctgccgcaagctctactgcctgcatggcatctgccagcccaatgccaccccagggcccatgtgccactgcgaggctggctgggtgggcctgcactgtgaccagcccgctgacggcccctgccatggccacaagtgtgtccatgggcaatgcgtgcccctcgacgctctttcctacagctgccagtgccaggatgggtactcgggggcactgtgcaaccaggccggggccctggcagagccctgcagaggcctgcagtgcctgcatggccactgccaggcctcaggcaccaagggggcacactgtgtgtgtgaccccggcttttcgggcgagctgtgtgagcaagagtccgagtgccggggggaccctgtccgggactttcaccaggtccagaggggctatgccatctgccagaccacgcgccccctgtcatgggtggagtgccggggctcgtgcccaggccagggctgctgccagggccttcggctgaagcggaggaagttcacctttgagtgcagcgatgggacctcttttgccgaggaggtggaaaagcccaccaagtgtggctgtgccctctgcgcatagcgctgggcgtggacaggccggtgagggcgggcaaggggccccagccgctgcagcagcggagacagtcgccagcagctgggctggggtgcaggtcatcacaggacggctcctgggcagctgggccctcctgggtggggtggtgccagagcagccttttaaaagcaaattgcgccatagctgggggcagcgggggtgggcgaggcctgagctgcgggctgccctctccggaagtccttgcacaaataggcgcttaataa

SEQ ID NO: 13331 - DNA, 4848 bp, Homo sapiens
gccggccgaagcgtggcggccacagactgtgggtaccgggtccgagggactcgcgcttttctctccgtgccatggcgccagcgaaagccacgaacgtggtgcggctgctactaggctccacagcgctgtggctttcgcagctcggctccgggacggtcgccgcgtccaagtcggtgactgcccacttggccgcgaagtggcccgagaccccgctgctgctggaggcaagtgaatttatggcagaagaaagtaatgaaaaattttggcagtttttggaaactgtgcaagaattagcaatttataagcaaacagaatcagattattcttattacaacttaatcctgaagaaagctggacagtttctagacaatttacacatcaaccttttaaagtttgctttctctataagggcatactccccagctattcagatgtttcagcagattgcagctgatgagccaccaccagatggttgtaatgcatttgtggttattcataagaagcacacctgtaaaattaatgagattaaaaagctgctgaagaaagctgcttcaaggactagaccttatctatttaaaggagatcacaaatttcctacaaacaaagagaacttaccagtggtgattctctatgccgaaatgggtactagaacatttagtgcatttcacaaagtattgtctgaaaaagctcaaaatgaggaaattctgtatgttcttcgccattatattcagaaaccaagctcacggaaaatgtacttatctgggtatggtgtggagctagcaattaagagtacagaatacaaagcactggatgatacccaagttaaaactgtgactaatactactgtagaggatgagactgaaacaaatgaagttcaaggatttctctttgggaaactaaaagaaatatattcagatcttagagataatctgacagcattccaaaaatacctgattgagagtaacaaacaaatgatgcctttgaaagtctgggaactacaagatcttagttttcaagcagcttctcaaataatgtccactccagtttatgatgccattaaattaatgaaagacatttcacagaacttccccataaaagccagatctctaaccagaattgctgtaaatcaacatatgagagaagaaataaaggaaaatcaaaaggatcttcaagttagatttaaaattcagccaggcgatgctcgtctatttataaatggccttcgtgttgatatggatgtttatgacgcttttagtattttggatatgctgaaattagaaggaaaaatgatgaatggccttcgcaatcttgggatcaatggggaagatatgagcaaatttttaaaattaaattcacacatttgggaatatacttatgtattagatattcgacattcttctataatgtggattaatgacttagaaaatgatgatttgtatattacatggcctacaagttgccagaaacttctgaagccagtatttcctggaagtgtaccttccataaggcgcaattttcataatttggttctgtttattgatccggcccaagaatataccttggattttataaaacttgctgatgttttctattctcacgaagttcctcttagaattggttttgtgttcattcttaatacagatgatgaagttgatggagcaaatgatgctggagttgctctctggcgagctttcaactatattgcagaagaatttgatatatcagaagcatttatttctatagtacacatgtaccaaaaagtgaagaaggatcaaaatatactcactgtggacaatgtgaagagtgttctccaaaatacatttcctcatgctaatatttgggatattttgggaattcattctaaatatgatgaagaaagaaaggctggagcaagcttttataagatgactggcctgggtcctttgcctcaagctctttataatggtgaaccctttaaacatgaagagatgaatattaaagaactaaaaatggctgttcttcaaagaatgatggatgcatctgtatatttacaaagagaagtttttttgggcacattaaatgatcgcacgaatgcaattgattttctaatggataggaataatgttgtaccccgtataaatactttgattttgcgtactaaccagcagtacctcaatttaatatctacatcagtaactgctgatgttgaagatttctctactttctttttcttggattcacaagataagagtgctgtaattgcaaagaacatgtattatttaacccaagacgatgagagtataatttctgcagtcactctctggattattgcagattttgataagccttctgggagaaaacttctttttaatgcattaaagcacatgaaaacaagtgttcatagtcggttggggattatttataatcctacatcaaaaataaatgaagagaacacagctatttctagagggattttggcagcttttcttacacagaagaacatgtttttgagaagctttcttgggcaactggcaaaggaagaaattgctacaactatttactctggagataaaattaaaacattccttattgaggggatggataagaatgcttttgagaaaaaatataatactgttggagtgaatatttttcgaactcaccagttgttctgtcaagatgtacttaaattacgtcctggagaaatgggtattgtcagcaatgggagattcttaggacctttagatgaagatttttatgcagaagatttttacttgttggaaaagataacatttagtaatttaggagagaaaattaaaggcattgttgaaaatatgggaatcaacgcaaataacatgagtgactttattatgaaagttgatgcccttatgtcctctgtgcctaagcgtgcatctcgatatgatgtcacatttcttagggagaatcacagtgttataaagacgaatcctcaagagaatgatatgttcttcaatgtcattgctattgttgatccattaacaagagaagcacagaaaatggcacagttgttggttgtacttggcaagattatcaacctgaagataaagttgttcatgaactgtaggggcaggctttcagaagcccctttagaaagcttttaccgttttgttctggaaccagaactgatgtcaggggctaatgacgtttcttctcttggaccagtggcaaaatttttggatattcctgaatcacccctcctaatcctcaacatgattactccagaaggctggttggttgaaacagtgcacagcaactgtgaccttgataatattcacttaaaggatactgagaaaactgttacagcagaatatgaactagaatacttactactggaaggacaatgctttgataaagtgacagaacagcctcctcggggtctgcagttcacactaggcacaaaaaataaacctgctgtggttgatacaatagtgatggcacatcatgggtattttcaattaaaagcaaacccaggtgcttggatactgaggttacaccaaggaaaatctgaagatatttatcaaatagttgggcatgaaggaactgactctcaagcagacctagaagatatcattgttgtattaaacagcttcaaaagcaagatactcaaagtaaaagtgaaaaaagaaacagacaaaattaaggaagatatccttaccgatgaagatgaaaaaacaaaaggactgtgggattccattaaaagtttcacagtaagcttgcataaagaaaacaaaaaggaaaaagatgtcctaaacattttttcagttgcttctggtcatttatatgaacgttttttaagaattatgatgctttctgttttgcgtaacaccaaaacaccagtgaaattctggttgctaaaaaattatctctcaccgacatttaaagaagtaattcctcacatggctaaagagtatggattccgatatgaactagttcaatataggtggccccgttggcttcgtcaacagactgaaagacagaggattatttggggttacaaaattcttttccttgatgttcttttcccactagcagtggacaaaatcatttttgttgatgctgaccagattgtgagacatgatctaaaagaacttcgagatttcgatctggatggagctccttatgggtatactccattttgtgatagccgcagggaaatggatggatatcgtttctggaaaacaggatactgggcatcacatcttttaagacggaaataccatatcagtgctttatatgtagtggatctcaagaagttcaggagaattggagcaggtgacaggctcaggagccagtatcaagctctcagtcaagatccaaacagtctttcaaacctagatcaggatctccccaataatatgatttaccaagtcgccattaagtctcttcctcaagactggctgtggtgtgaaacctggtgtgatgatgaatccaaacaaagagccaaaacaattgatctgtgcaataatcccaaaacaaaagaatccaaactaaaagctgctgccagaattgtcccagaatgggtggagtatgatgctgagataagacaactattagatcatcttgaaaacaagaagcaagatacaattttgacacatgatgaactctagcactggtgtatatgagaaggaaggcgaaagcatgacaggaaacctgccgcctgctggggaagtctggagcccctgctgagacgatttggaagtctcgttaagatcagtgacatattctttaattttaaaaaattgtaattatttaaaacagttatttaatgtattgaatgagtttaagttatataataaatgaccattgagtatttaaaaaaaaaaaaaaaaaaaa

SEQ ID NO: 13332 - DNA, 6300 bp, Homo sapiens
gaccaggactgtgcggctgccggagtcctgggaagttgtggctgtcgagaatgggggtctgtgggtacctgttcctgccctggaagtgcctcgtggtcgtgtctctcaggctgctgttccttgtacccacaggagtgcccgtgcgcagcggagatgccaccttccccaaagctatggacaacgtgacggtccggcagggggagagcgccaccctcaggtgtaccatagatgaccgggtaacccgggtggcctggctaaaccgcagcaccatcctctacgctgggaatgacaagtggtccatagaccctcgtgtgatcatcctggtcaatacaccaacccagtacagcatcatgatccaaaatgtggatgtgtatgacgaaggtccgtacacctgctctgtgcagacagacaatcatcccaaaacgtcccgggttcacctaatagtgcaagttcctcctcagatcatgaatatctcctcagacatcactgtgaatgagggaagcagtgtgaccctgctgtgtcttgctattggcagaccagagccaactgtgacatggagacacctgtcagtcaaggaaggccagggctttgtaagtgaggatgagtacctggagatctctgacatcaagcgagaccagtccggggagtacgaatgcagcgcgttgaacgatgtcgctgcgcccgatgtgcggaaagtaaaaatcactgtaaactatcctccctatatctcaaaagccaagaacactggtgtttcagtcggtcagaagggcatcctgagctgtgaagcctctgcagtccccatggctgaattccagtggttcaaggaagaaaccaggttagccactggtctggatggaatgaggattgaaaacaaaggccgcatgtccactctgactttcttcaatgtttcagaaaaggattatgggaactatacttgtgtggccacgaacaagcttgggaacaccaatgccagcatcacattgtatgggcctggagcagtcattgatggtgtaaactcggcctccagagcactggcttgtctctggctatcagggaccctcttagcccacttcttcatcaagttttgataagaaatcctaggtcctctgagcaacgcctgcttctccatatcacagactttaatctacactgcggagagcaaaccagcttgggcttctttttgtttttttctgttattctagatttgttttctttttgtttttgtttatttgtttgtttgcttttatttccagcttgaatgagtggggttgggggcggggtgggcagggttctaccacgtgtaggataatcattcattggtgtgtccaaaaatggggtctgctcctgctaccttgacccttccctttcctctgcttctctcctcatcatcattcccaacaacatcctctgccacacacaacaaaacgtaagtttcatttgggcaaaaattgagcctcacaataaacaccctgaagacacaacttgacttataacatagtgcacagcaagagctacatccaagtgtcctattatctgtgattattttcttaatgacaatgtacatatgcccccatccatgttaattattatctaattccattagggttcacgtcttttctttctgggacactatcctactatatccatatctatagatttcaatatagatgattgtgccatcttctgtagcccctccgctctactcattccttccaccatctgcagagatttgaagtttggggctatgcatgaaacccaacactaaattttgcaagtcaagtaaccaaaaaagggggaggcattttgaagatagaacctctattttaaaaagagaagttcaactcataaacgtgattgataggtggctgatttatttaggttttgtcaagctatctatcaaagtaatggtacagttacccatctactcaaatatctgatttatctcaccatccaattatctacccacctgtcttcctctctagcaatctatttactgtttatcaatctatcaatgtaattgtctaacactcctttctattctctccctactactcactatcaattcatccccatatgaatctctaaccatattgtatctctcccactgtattcatttatacaccatcagcagacattggcatcttcaaaattatctttcaacttctgtgaaagccaacgatctcacaggttaacaaaatacaaaagcaataccctgtgttgtggactctttaaaatctggtatcctatccacccaagggagacactaacagataggccaaagtagcaagctaatgatcagtcactcactattcccagaagagcctgtgttttctaaaacactttcttgggaagcagatcagcctagaaaagttttgattagcactgtggttttccttttgcacttgaaggacaaaggtgccagcctttatgcttctctcaacccttcaagaaagtacatgtcaggaacctatggctggctttccttagcagcaagaacttgagagaaaaacacatctgtctctgcaatgcaaagtgaagagtccacccgcctgagtgggatgacttcagctagagtctcctttctgctccagttctggtttaatctgtttgaaaactatccagtaaaaagctgatggaggccaattacatggcgggtgtattgacaactctggtatttgtttcaggaagctcttctaagctgagggcacttgagcaactgacttaattttcaagcacttgattaacacaacactgcaaacagaagggagaaagtgtcagtgacacagtttcctctgatgcagctgcttctccaatggctttggggaagaacttcaccagctcttcaggttcaaagcagacccagcatacaaacaagagctgagccacctttgctgtcttgtctcctgggacgagaaggactcatccagcaaagttgcctgggattcaaaataaaggcattgcagaccgcacaggtgtgctgcagggactgatccacagagaggatgagaatgcagcatcaatcgcagacctgccctgcctcagttggaaaaccttttcaggccctcagtctaaaaaataaaaaatatgagcaccattgaattctgtgcccttaatgcttaactggtcttcttcctctggtatcagtgtcctctttgtttttgtccatcaaggcacatgagtgtgacctctgccatggggaaacacacacagagatatctatacatatatacatacatacaaacataggctatcttggcacactaaatgctaagcactgtcttaagaggtagagctggtgtgagtgaaattaatgttacattttccagctgtaaacagacatctgcatttcctagtgagctgccaggagccagattcgggaaccgtaactgatgtgccaggaatggtgcattgattcccagttccagggatgatcatgagcaggcgcaaaatcagaattaaaggtcgcacatagacgtttcagatctgtcaccaccttcagcatctggagttgagttggtgtcagatagtgtatgagaattaaatgtgtcatctgagcatgctactgatgataaatttgttactttggagttgaataaatgtgaaggctgtgaagagtggacagtcttggagaacacagtgcttgaaatggacaagctggacctattcctcactccaagacttgttctacaggaaagggtccatgctcctttggccaagatcatcagaacctctcaacccaacaaggctggcttcagggccactatggaaccctgctgttcccccttccaaaggatactaagatgcccctctggtgggtacctatcccagccacgtttcagagggagagaaatgctacagttgatcctcatctgtctggggtaaagacaacaaagtaaatacaacccaaggcaactggggtactcactgggagtgaaaatgacttcttcacaacagacatatttctgcttctgtgtttttgtgtttctttggtggggatggcttcatgggagagtggctgtcacccatcattttgaagcatatagaacaacaaatgcttacacaagacaatatccacacttttccaacttcacacacggagagtacatggagaatgcctacaggctagatttgttcagggtgccagtagtgggcatggggtgggggcaaggcaggacaaaacatacaagtctgagcaagtacatctcttgcaggttttccacatgaaaaggaagccaaataagtcctgttaggagattaggtgagaggaattagcaatgtagggactctgaaacccttccccttcccaaaacagagttcatatgcacttccaccaaagtaatgccaatgaaagtgctcgtgttaaggctgcagccaagcttgtttttcagtagtttaatgtcaagtgcctgatacagtcgactgcaagtctaaacaagcatgtttagtttttctcattcttgctttaattcagggagggggagatgtagagaagtggttgtgaaaacatgtacaggctttatgcagagcactgcgcatggctgttctgctgcaactgtgctccacgaaacagaagaaaaggtaaggtgttgtgtcacaaagaggccccagtctctttcttcttacatccatgcctcttactagatgatacatttacagattgggcagtttgttctcaaaacctgggtgagaagactattcctggactctagcaacttcaaaactgaggctgggtttcagaatctttttctgcatcaattcagtcaatttgccttcaacaaagagaagtcagcaagttctatttatgctgaaagaactattccatgagaaaagcagagaaccccaaagtgggcaggcaaccccgacgagagcttatccctgtggcggcatcaggagtggctgtacattgaattttcaagtgctggttggctgtcgccagcccatggtaggaggggaggaatggcttaagatgaggtaagatctggtggtggggcatctttcctcaattccatactgactttgatcttgagaaagaaaaactggctatgcattacctaaaaccagtccaaaatgaaacagaccaacacacacacaaaagcaaattgtcaatccctttggaattaagggaagcagcataaggtttttctttttggaaaaaatgcatttattttctttttctccaacagcaagaatcttttgttttcattttgcacgtgaccttatcttggaaactcttatacccaattgcctcccctcctattattcagagcttccctgtctttttacttgaagacaaataagtttgagcacttgagtaaaacttcacaggtgtgtaagtaggaaggcaacattttcaaaaagagaccatatgatgagaacgcctaatgatcaccacatgcaaacaaacaaaactgccagtctcatttcccacatttcttacttaagagaagagaagtaaatgaaaggaagaagaaatagatttgtaattaaagatgtggcaaaaaagatagggctgagccagttcaatttagccttcaggtgcagaatacttagagtccaaagaaatgtggagtggacttaattagatgcagttgtctttatcctgaaagtagtgagctaagcctaatttccagcattttgaaagagattcctttttgtttctttccatggtgccctctttaaggcacagagttgctccacaccactgggtggagaaagaaagattgcgaaccctcgaccatccttttgaggctacattctatgttatttggcagatttataaagctatcagtaataacaatgctatgtactgcaagctgcccttgtgttagttaaagggagcatttttaatcgttcggaaattttcgtgacatgtcaagtgcagttgtgaggactgtgtgggtgaacgaaaatgtgtctgtcaagttcagagtcctttagatttaaaaaaaaattatgacttatcaatggtgccgttatagctgtgtcagacaatgggtgtgcccattctcacaattatccttcaaaaaaaatctatgttcaaatgctttaaaaatttatcacacgatacaagagtatgactttgtcagccttctagagttctttttttcttttattttctttcgtattttttccttcaaaaaatcaatgaagacttgatttctgtcaataattgtatcaagggtgaatatactacctgaattttgtgcatgttacattgtagttgtaaccttttctaattcaggatgaatacgagatggttgtgattgtgcagtgtaccaataaagttcgagaaatttgtaa

SEQ ID NO: 13333 - DNA, 4482 bp, Homo sapiens
tgaggagccgcccggtcgcctgcgcgctccctccggcggcgtccccagcccgcggcccctctgctgccggcccccggctcgccggctgcgggagtggcctcaagatggatgaagacggcggcggcgagggtggtggcgtgcctgaagacctctcattagaagagagagaagaacttctagacattcgtcgaagaaaaaaggaacttattgatgacattgagaggctgaaatatgaaattgcagaggtgatgacagagatcgacaatctaacttccgtagaggagagcaaaacgactcagaggaacaaacagatagccatgggaagaaagaaattcaacatggatcccaaaaagggaattcagtttctaatagaaaatgacctgctacagagttccccagaagacgtcgcccagttcctttataaaggagaaggcctaaataagaccgtcattggggactacctgggtgaaagggatgaatttaatattaaagttcttcaagcctttgttgaactccatgagtttgctgatctcaaccttgtacaagccttaaggcagttcttatggagcttcaggctgcccggggaggcgcagaagattgatcgcatgatggaggctttcgcttctcgctactgcctgtgcaaccccggggtcttccagtccacagacacgtgctacgtgctgtcattcgccatcatcatgctcaacaccagcctccacaaccacaacgtgcgtgacaagcccacggcagaacggttcatcgccatgaaccgcggcatcaacgagggcggggacctccctgaggagctgctgaggaatttgtatgagagcattaagaacgagccatttaagatcccggaggacgacgggaacgacctgacccacaccttcttcaaccccgaccgcgagggctggctcctgaagctgggagggcgtgtgaagacctggaagcgccggtggttcatcctgaccgataactgcctctattactttgaatacacaacagataaggagcccaggggaatcatcccgttggaaaacctcagcatcagggaggtggaggacccccggaaacccaactgttttgagctctacaatcccagccacaaagggcaggtcatcaaggcctgtaagactgaggccgacggccgcgtggtagaggggaaccatgtggtgtaccggatctcagccccgagcccggaggagaaggaggagtggatgaaatccatcaaagccagtatcagcagagatcccttctatgacatgttggcaacgaggaaacgaaggattgccaataaaaaatagctttcctggctaaaagacccaggtaaaagacccaaccccagcagaaagacaccgcgggcggcccctccgcggaaggcgtggcagggaggcagtcgccctgcggtgcaagctgctgctccagagcataccgtggcccaggtggtatccccaaggcctcgtgccgtggctggggtcctgggaggtggtcgccctgcagtgcaagctgctgctccagagcgtaccgtggcccagactgatcctcgaggcctcctgccgtggctggggtcatggtcggctgcgcatgtccagaagcatttccttcctgcgaccatcccggcgcccctagggggagaagccaggacagcagcttccgctgtctccacagcagacacgggacggattccacagacgggagcctcattcgtaccatgccaaacgcattcactcggggcagtattaaccgttctagaaagccactgttttatagcaaaacaggaaaggaaaagctaccagttttttattcagaatttttctcagatatataggattatagcttttatatgcctttttatattctgaaattataacaaaagatactttctaacagtagtatttttagaatggcagctataaagttaactcctggacacaagtatatactgtgcactgaaaaaatatccatctacacagcacccaaggggagggctgggggcaccggcacgggggcagcgtgcagccctgccctgtcaggctgtcagacaagccccggggggcagcaggtgggctcgggacgggctgggggagggacggccatggcacttgggggctccagggtgactcccatgaggcctcccttcaaccaggctttttggccccacaaatactttaagcaaatcattaaaattataacagttaatggtttgggggtgtttaggctgtaactgctaactcctaggaaacagccttttccctggacacagatggtccatacgctgagccacgtgaaactgctgatgttttgtttagatgcacacacatggcagcgtttcatacaggtcagcaggttagaccggcttttgaccatattcatcgctatttaaaacctgtggcaaaatgaacgcttattttacagactttctaatttgaccagatttcttaatgaatagacacagaattaactaaaaacagtctcaccccatgtagtgcgccgtgtcctgagagaggtgccctccctacgaggagggaagaacaggccctggggtgcagaggcccggcacgtagagaacccagatagacgccggtggtggaactggtcaaactccacgcccgcctgggaggttgtcaggttgctgtggatgtaaggataggaggtgcccagtgctccgctcaaggaaggctggatctgggccccacctacagagagggctcagggctggaccgggggcattgtgtgcttgggccgacccgggccggtggcagacgctgttctctgtcgggagatttgcgtccccaggaccctgttacacagtgggctgttgggttggtggctggcttttcctctatggacttcctcttcctgccccacctgcataggcacacacaccttgaatctgcaccctctggagggcatctgtactcctgtgcaaaatgcccagtccagagacaaaacctcagactttgtgcacctaggtttccttctcagcagcggagactgttctttgagttgccttgaagtggaggccgagcggctgcgggcccttcgcctccctgcggctgaccttgatgtagctttaagtcacactagactgcagaggggtccgaggccagaaacccctgtcctgcatcagactttcattcccacgttcttaggctttgttactgatacctcaaatcggaagttttagttctgagaaaggcaagtcagcgttcttgaaatgcctgactggtagatatgcaactctggcctccagtcttccatgaaaataaatgctgcctggacccccacccagaccacacactgacggccggctccggcggtgcccacccctcaggctggcccggcacccaagactggccacagccagctctgtcagcatgttgtgctcggacaagctgtttccttcttctgaccaacccaggtgtgacctggggatgcagagctttctgttttgggtgttgggagaagcagcaggaaggagtcgccagatgatcaagctccccctttgctgtcatctgtgaatgagcttcgccaggtggtgggcacctgggagccatgcagaggctgtggtgctgagttagactccaggtactttgtggtcaaaggaaatcgcctagctccaggctgtgttaggacagtattagcatgaaggctgtgcgaccatcatgcctgctgatccttgaggcaggcctggtccagaaaactctgggtcagtgactgcgcagggccagccgctaccaggacggccctgaaacaggacacatctgttttttgtccctcaccctgggcaggccgcgtcacaatcacagtcctcctcctccccaccctgacgtctgagcgcagggcttgaattgttagtcccaactctggccaaagatacttttttccagagacagaggccaggaggcagtgaggggagccccgcggggaggcggcggcgactgccacagcccttccagcctgtcttgctggccgccctggttcatatttgagtttaattgtactgaccctggacccagataagcagcaactttgtgtctttggggtcacagaacattttggggcagtttaatgtggtaccaaactgaaaataggagctatttatagatggagcagcacttagtgcttcatagaaagcaatgcctatttttaaagttacaaacgcagatatctacatagatatgctttgctgagaagttaggtctgtggtagaccagaaaccacaaattgactttttttcttagaaaatatttctatttgcggtaaatatagtaatatgtaaataatgtacatctgttgatttctggagtgtctgttattcaatgatgtatatactcccacagctcgcatgaaggaacagcctctattgatacttggttgtaaagtgaagtaagattggagggtggatggctgtcagagctcttgcagatactgtgttcactaaataaaaatcacatgtattgttaaaaaaaaaaaaaaaaa

SEQ ID NO: 13334 - DNA, 16079 bp, Homo sapiens
tattctcacaccagagccgtgaccgagacccagaggtccgcttccggccacggccgaacagctgcaccgtgcgtaccgggaacggtcaaggcgcagctggaaccgctgcaaaaggcctccgggcgtaccggacaggtcgcaagggcgggggtccccacctagcggaaatgcacggaggccaacccctccccctgcccccgcgaggagcggggcggactcggcagccgccactccccaggctcacaggaagaaactgggacgctgcggacgcggaactggccagacccgcggcgcgtggcacgcgcgagccctcccgcgcatgctccacccgccggcctccagcccgcgccccgggccccgcctccctccctgcttctccccctctcccgtcagcctccctccgagtttggcccctccggccgggcgatcgacgttccgcgtgcgtgcgggcgcctgacttcacttccggctaacgcgctcggcttgccccctggccccggatggtgactggtggtggtgctgcacctcccgggactgtcactgagccgcttcccagtgtgattgtgctgagcgcaggccggaagatggcggctgcggctgcggcggcctcgggccccggctgctcctcggcggcgggggcgggggcggccggggtctcagagtggctggtgctgcgggacggctgcatgcactgcgacgccgacgggctgcacagcctgtcctaccaccctgcgctcaacgccatcctggccgtcactagccgcgggaccatcaaagtcatcgacggcacctcgggggccacactgcaggcctccgcgctcagtgctaaaccaggtggacaggtgaaatgtcagtatatctctgctgtggataaagttatatttgtggatgattatgcagtagggtgtaggaaggaccttaatggaatcttgttgttagacactgctctgcaaactccagtttcaaagcaggatgatgtggttcagcttgaattacccgttacagaggcacagcagctcttatcagcatgtttagaaaaggtagatatttctagtacagagggttatgatttgttcatcacacagctcaaagatggtttaaaaaatacatctcatgagactgcagcaaaccacaaagttgctaagtgggccacagttacatttcatcttcctcatcatgtgttgaagtccattgccagtgccattgtaaatgaactcaagaaaataaatcaaaatgttgctgccttacctgtggcgtcctcagtgatggacagattgtcttacctcttacctagtgcacgtccagaactcggagtggggccaggccgttctgtagacagatcactgatgtatagtgaagctaacagacgggagacatttacctcatggcctcatgtaggctataggtgggcacaaccagatcccatggctcaagctggattttatcatcagcctgcctcatctggagatgatagagccatgtgttttacttgtagtgtatgcctcgtttgttgggaacctactgatgaaccttggtctgaacacgaaagacattccccaaactgcccatttgtgaaaggtgagcacacacagaatgtgccattgtcagtcactcttgcaacaagtcctgcacagtttccttgtacggatggaactgacagaatatcttgctttgggtcggggagctgccctcattttctagctgctgcaactaaacgaggaaagatctgcatatgggatgtttccaaacttatgaaggtgcacttaaagtttgaaattaatgcctatgatccagcaattgtacaacagcttattctatcaggagacccaagctcaggagttgattcaaggagaccaactttggcgtggctggaggactcctctagttgctcagatataccaaaattggaaggagatagtgatgatttactggaggattcagacagtgaagagcattccagatcagattctgtgacagggcatacatcacagaaggaagccatggaagtaagccttgatataacagcactcagcattctccaacagccagaaaaacttcagtgggagattgttgcaaatgtgcttgaagatactgttaaggatcttgaagaacttggggcaaatccttgtttaacaaactctaagagtgaaaagacaaaggaaaagcaccaggagcaacacaacattccttttccatgtttattagctggaggtttattaacatataaatctcctgctacctcacccattagtagtaattctcacaggtcactggatggtttaagcagaactcagggtgaaagtatatcagaacaagggtcaactgacaatgaatcctgcactaattcagaactaaattctcctctggtaaggaggactttaccggttttgcttctttatagcatcaaggaatctgatgagaaagcaggaaagatcttttcacagatgaacaatattatgagtaaaagtttgcatgatgatggttttactgttccacagattattgaaatggagctggatagtcaggagcagttgttattgcaggatcctcctgtgacttacattcagcaatttgcagatgcagcagccaaccttacctctccggattctgagaagtggaactctgtgtttcccaagcctgggactttggttcagtgcttgaggctgccaaagtttgcagaggaggagaatctttgtatagactcaataactccttgtgctgacggaattcatttgttggtaggactgcggacatgccctgttgaatccttgagtgcaataaatcaagtagaggccttgaataatttaaataaattaaactctgcactatgtaatagacggaaaggtgagctggaatcaaatcttgctgtagtgaatggtgcaaatattagtgtaatccaacatgaatcaccagcagatgtacagactcctttaataattcagcctgagcagaggaatgttagtggtggatatttagtgctttataaaatgaattatgccactcggatagtgactttagaagaggagccaataaaaatacaacatatcaaagatccccaggacacaattacctcgctcattttgcttccacccgatatattggataatcgagaggatgactgtgaggaacctattgaggacatgcagttaacctcaaagaatggttttgagagagaaaaaacgtctgacatttctactcttggacacctggtaataaccactcagggaggatatgtaaaaatactagatctttcaaactttgaaattttggccaaagtggagcctcccaaaaaggagggcactgaggaacaggacacatttgtttctgtgatttactgttctggcacagacaggctgtgtgcatgcaccaaaggtggtgagcttcattttctccaaattggaggaacctgtgatgatattgatgaagctgatatactagtggatggatctctttctaaaggaatagaaccatcttcagaaggttccaaacctttatcaaatccttcaagtcctggcatttcaggagttgatttattggtggaccagccattcacccttgaaatcttgacatccctagtggagctaacccgctttgagactttgactccaaggttttcagcgactgttcctccatgctgggtagaagttcaacaagaacagcagcaaaggaggcatcctcaacatttgcatcagcaacaccatggtgatgctgctcagcatactcgaacttggaaactacagaccgacagcaacagctgggatgaacatgtatttgaattagtactacctaaagcttgtatggttggacatgtggacttcaaattcgttttgaactcaaacatcaccaatattccacagatacaagtgacactgctgaaaaataaagctccaggattagggaaagtcaatgctcttaacattgaagtggaacaaaatgggaaaccgtccctggttgatttgaatgaagaaatgcagcacatggatgtagaggaatcacagtgtcttagattatgtccatttttggaggatcataaagaagacattctatgtgggccagtatggcttgctagtggccttgatctatcagggcatgctggaatgttgacgttaacaagccccaaacttgttaaaggtatggcaggaggaaaatatcgttcgtttttaatccatgtcaaggcagtgaatgaaagaggaacagaagagatttgtaatggtggtatgcgtcctgtagtaaggcttccatccctaaaacaccagagtaacaagggttattcacttgcttcacttttggctaaagttgcagcaggcaaggaaaaatcatctaatgttaagaatgaaaatacaagtggcacccgtaaatctgaaaacctccggggctgtgatttacttcaagaggtctcagtcaccattcgaagatttaagaaaacctcaatttctaaggaaagagtgcaacgatgtgccatgttacagttttcagaatttcatgagaagcttcttaatactctttgcagaaaaacagatgatggccagatcacagaacatgcccagagccttgtgttggatactctctgttggttagctggagttcattcaaatggacccggaagctcaaaggaaggaaatgagaacctactttcaaaaacacgaaaatttctgtcagacatcgtacgtgtttgcttctttgaggcaggacgaagtatagcccataagtgtgcccgatttctagccttgtgcattagtaatggcaaatgtgacccatgtcaaccagcatttggacctgttctgttgaaggctttacttgataatatgtcatttttacctgcagcaacaactggtggttctgtctattggtattttgtcttactgaattatgtgaaagatgaagatctggctggatgcagtacagcttgtgcatctttgcttactgcagtgtccagacagttacaggacaggctaacaccaatggaggctttacttcagacaagatatggattatatagctcaccatttgatccagtcctctttgatttggagatgagtggctcttcttgtaaaaatgtttataacagcagcattggtgtccagtcagatgaaattgatttatcagatgtcctttcaggaaatggaaaggtcagtagttgcacagctgctgagggtagtttcacatctctcactggacttttggaagttgaacctctgcactttacttgtgtgtcaactagtgatggaaccagaatagaaagggatgatgcaatgagttccttcggggttactcctgcagtaggtggactatcatctgggacagttggggaagcctcgacagccctgagttcagcagcccaggtagctttgcagtctctctctcatgcaatggcttcagccgagcaacagctacaggtgctgcaagagaaacagcagcagcttttgaagcttcagcaacagaaagcaaagctggaagccaagttacatcagacaacagctgcagcagctgcagcagcatcagcagtaggtcctgttcacaactctgtgccttccaacccagtggctgcccctggattcttcattcatccatctgatgttattccacccactccaaaaacaacacctctttttatgactccaccactcactccacccaatgaagcagtttccgttgtgattaatgccgaacttgcacagcttttcccaggctcagtcattgatcccccagcagtcaatcttgctgcacataacaaaaattccaacaagtccagaatgaatccacttggttctggtctagcccttgcaatttctcatgcttcacattttcttcaacctccgcctcaccagtccattattatagagcgaatgcattcaggagcaagaagatttgtgaccttggattttgggaggcctatattgttgactgatgtattgattcccacttgtggagacttggcctctttgtcaattgacatttggacattaggagaagaggtggatggaaggcggttggtagtggcaactgatataagcactcattcactaattcttcatgacttaataccacctcccgtgtgcagattcatgaagatcactgttattggacgttacgggagtacaaatgccagagccaaaatcccattaggattttactatggtcatacctacatcttgccttgggaaagtgaactgaagttaatgcatgatcctctaaagggagagggagaatctgcaaaccagccagaaattgaccagcatttagcaatgatggttgctttgcaggaggatatacagtgcaggtataacttggcttgtcatcgtctggaaacccttttgcaaagtattgatcttcctcctctaaacagtgctaacaatgcacagtactttttacgaaaaccagataaggcagttgaggaagacagtagggttttttctgcttatcaagattgtattcagctacagcttcaactaaatttggctcataatgcagtgcagaggctcaaagtggcgctaggtgcaagccggaagatgttgagtgaaacatcaaatccagaagatttaattcagacatcttccacagagcagttacgtactatcatcagatatttactggacactttgctcagcctgcttcatgcttctaatggacactctgttcctgcagttttgcagagcacatttcatgcccaggcctgtgaagagctctttaaacacttgtgcatcagtggaaccccaaagatacggttacatactggtcttcttcttgttcaactgtgtggtggtgaaaggtggtggggtcaatttctttctaatgtccttcaggaattgtacaattcggaacagcttctcatctttccacaggatagggtcttcatgttactttcctgcattggtcaaagatcacttagtaatagtggagtattagaaagcttacttaatctcttggataatttattgtcacctcttcagccacagttacccatgcataggaggacagaaggagtactagatattcccatgatcagttgggttgttatgctggtgtccaggttgctggattatgtggcaactgttgaagatgaagcagcagctgcaaagaaacctttgaatggtaatcagtggagttttattaacaataatctacacactcagagcttaaatagatcttctaaaggcagcagtagccttgatagattatattccagaaaaatcagaaagcagcttgttcatcataaacagcaacttaacctactaaaagcaaagcagaaggcattggtagaacagatggaaaaagaaaaaatacaaagtaacaaaggatcatcatataaactcctggtagaacaagcaaaactaaagcaggccacttcaaagcactttaaggatttaattcgtttacgtcggacagcagaatggtcccgttctaatttagacacagaagttacaacagcaaaagaaagtcctgagatagaaccacttccatttactctggcccatgagcgttgtatctcagtagtccagaaacttgttctgtttcttctctccatggactttacatgtcatgcagatctcttattgtttgtttgtaaggttcttgcacgcattgcaaatgccacgaggccaactattcatctgtgtgagattgtgaacgaaccccagctggaaagactgctgttacttttggttggaactgacttcaatagaggagatatatcttggggtggtgcttgggctcagtattccttaacttgcatgctacaagatattttagcaggagaattactggctccagtagccgcagaagccatggaggaaggaacagtgggtgatgatgtaggtgcgacagctggtgactctgatgactcccttcaacagtcctcagttcagttgctggaaactatagatgaacctttgacacatgacataacaggtgcacctcctctgtcctctttggaaaaagataaagaaattgaccttgagttacttcaggatctaatggaagttgacattgatcctttagatattgatttggaaaaggaccctcttgcagccaaggtttttaagccaataagcagtacatggtatgattattggggtgctgattatgggacctacaattacaacccttacattggaggtctgggaattcctgtagcaaagccaccagcaaacacggagaagaacggatcacagacagttagcgtttcagtctctcaggccctggatgctcgcctagaagttggacttgaacagcaagcagaactgatgttgaaaatgatgtctactctggaggcagattccattttacaggcattaacaaatacatctcctacattatcacagtctcccactggaacagatgattcacttctagggggtttacaagcagcaaaccaaaccagccagcttattatacagttatcatctgtcccaatgttaaatgtttgtttcaacaaacttttttccatgcttcaagtccatcatgttcagttggagtcacttctccaattgtggctcacactgagcctgaattctagttcaactggaaacaaagaaaatggagcagacatatttttatataatgctaataggatacctgttatttcattaaatcaagcatcaataactagctttctcacagtgttagcttggtatcccaatactttgctccggacatggtgccttgtgcttcatagcctaacactcatgacaaacatgcagcttaattctggttccagcagtgccattggaactcaggagagtactgctcatttgttggtttcagatccaaacctaattcatgtattagtgaaatttctttctggcaccagtccacatggaacaaatcaacacagtccacaggttggtcctacagctacacaagctatgcaagaatttcttactcgattacaagtgcatctttcttcaacatgtcctcagatattcagtgaatttttgctcaagctaattcatatactttcaactgaaaggggtgctttccagacaggccaaggacctctcgatgcccaagtgaagctcttagaattcactctggagcagaattttgaagtcgtttcagttagtactatttctgccgtgatagaatcggttacatttttagtgcaccactatatcacttgctcagacaaagtaatgtcaagaagtggatcagatagctccgtgggtgctcgagcatgctttgggggactctttgccaatcttattcgtccgggtgatgcaaaagcagtttgtggcgaaatgacaagagatcaactcatgtttgatttgttaaaacttgttaacattttagtgcagctgcctctttcaggcaatagggaatacagtgcaagagtgtctgtgaccacaaatacaacagatagtgtttcagatgaagaaaaagtctcaggaggcaaagatggcaatggaagcagtaccagtgttcaaggatcgcctgcatatgttgctgacttagtcttagccaaccaacaaattatgagccagattttgtctgctctgggcctgtgtaatagcagtgccatggcaatgataattggagcaagtggattacatctcactaaacatgaaaactttcatggtgggttggatgccatatcagttggggatggattatttaccatactgacaacccttagtaaaaaagcttctacagtccacatgatgctgcagccaattttaacatacatggcctgtggatatatgggcagacaaggctctcttgctacttgccagttatctgagccattattgtggttcattttgagagtattggatactagtgatgccttgaaagcatttcatgatatgggtggtgttcagctcatatgcaataatatggttactagtacaagggctattgtgaacactgcaagaagtatggtatcaactattatgaaatttcttgactctggtccaaataaagctgttgacagcacattgaaaacaagaatactagcttctgagcctgacaatgctgaagggattcataactttgcacccctcggtacaatcacatctagcagtcctactgcccaaccagctgaagtgctattgcaggccacacctcctcacagaagagctcgctctgctgcttggtcctacatctttcttccagaggaggcttggtgtgaccttaccattcaccttcctgcagcagtgctgcttaaggagatacatatccagcctcatcttgcatctcttgcaacctgcccttcctcagtgtctgttgaagtaagtgcagatggggtaaatatgctacctttgtccactcctgttgtcacaagtggcctcacctacataaaaattcagcttgtaaaagccgaagtagcttctgctgtctgccttagactacatcgtccacgggatgccagcacattaggcctttcacaaattaaattattggggctcactgcttttggtaccacctcttctgcaacagttaataatccattccttccatctgaagatcaggtatccaaaacaagtattggatggttacggttattacatcattgccttactcacataagtgatctagaaggaatgatggcaagtgcagctgcacctactgctaatctgctgcagacttgtgcggccttattgatgtcaccttactgtggaatgcattcacccaacatcgaggttgtgcttgtaaagataggactgcagtctactagaattggcctgaagctcatagacattctcctgagaaattgtgcagcatcaggcagtgatcctacagatttgaatagtcctttactttttggaagactaaatggactctcttctgactctacgatagatattctttaccagcttggaacaactcaggatcctggtacaaaagacagaattcaggccttgttaaaatgggttagtgattctgcaagagtggctgctatgaagagaagtggcaggatgaactacatgtgtcctaactcctcaacagtagagtatggtcttctgatgccatctccttctcatttgcactgtgtagcagccattctgtggcatagttatgagctgcttgtagaatatgacttaccagcactcctggaccaagagctctttgagttactttttaattggtccatgtctcttccctgcaatatggttttgaagaaagctgttgacagtctactttgctcaatgtgtcacgtacacccaaactatttttctttgctcatgggctggatgggaattacccctcctccagtgcaatgtcatcatagactgtccatgacagatgatagcaaaaagcaggatcttagttcatctttaacagatgactctaaaaatgcacaagcacctctcgcattaactgaatcacatttggctacccttgcttcctcttctcaatctcctgaagctattaaacaattactagactcaggtttgccttctcttcttgtgaggagtctggctagtttctgctttagccacatttctagctcagaaagcattgcccagtcaatagatatttcccaggacaaactcaggcgccatcatgtcccacaacaatgtaataagatgcctatcacagccgacctagttgctcctattcttaggtttttgacagaagttggcaatagccatattatgaaagattggcttggtggttctgaagtcaatccactatggacagcacttctgtttttattgtgtcactctgggtccacttctggaagccataatttaggtgcacaacagaccagtgcaagatcagcttctctttcttcagctgctacaacaggactgactactcaacagcgcacagcaattgagaatgcaactgttgcgttctttctacagtgcatttcatgccatcctaataatcaaaagctgatggcacaggttctttgtgaactatttcagacatctcctcaaagagggaaccttccaacatctgggaacatttcagggtttatacgaagattatttttacagttgatgctggaagatgagaaagtgacaatgtttcttcagtctccatgtccactgtacaaaggtagaattaatgctactagccacgtcatccagcatccaatgtatggagcaggccacaaattccgtactcttcatttgccagtctcaacaacattatcagatgttcttgacagagtgtcagatactccaagtatcacagctaaattaattagtgaacaaaaagatgacaaagaaaagaaaaaccatgaagagaaagaaaaagttaaagcggaaaatggatttcaagacaattacagtgttgttgttgcctctgggctgaagtctcaatctaaacgtgctgtgtcagctacaccacctcgcccaccatccaggagggggaggacaatacctgataaaataggaagtacttcaggagcagaggctgccaacaaaataattactgtcccagtgtttcacctgtttcacaaactcttggcaggccagccattgccagctgaaatgacacttgcccagcttttaactctcctatatgaccgaaaacttcctcagggttaccgctcaatagatctgactgttaaattgggatcaagagttataacagaccccagtctatcaaaaacagattcttataaaagactacaccctgaaaaagatcatggagacttacttgctagctgtccagaagatgaggctctcactccaggtgatgaatgcatggatgggatactggatgaatctttgcttgaaacctgtccaattcagtcaccattacaagtttttgcaggaatgggtggactggctcttattgctgaaagactacccatgctatatccagaagtaattcaacaggtgagtgctccagttgtaacatctaccactcaggaaaagccgaaggatagcgatcagtttgaatgggtgaccattgaacagtcaggggagttagtttatgaagcaccagaaactgttgcggctgaacctccacctatcaagtcagcagtacagaccatgtctcccatacctgcccattctttggctgcttttggattatttcttcgtcttccgggctatgcggaagtgctactgaaagagagaaaacatgcccagtgccttcttcgattggtattgggagtgacagatgatggagaaggaagtcatattcttcaatctccatcagccaatgtgcttccaacccttcctttccacgtccttcgtagcttgtttagcactacacctttgacaactgatgatggtgtacttctaaggcggatggcattggaaattggagccttacacctcattcttgtctgtctctctgctttgagccaccattccccacgagttccaaactctagcgtgaatcaaactgagccacaggtgtcaagctctcataaccctacatcaacagaagaacaacagttatattgggccaaagggactggctttggaacaggctctacagcttctgggtgggatgtggaacaagccttaactaagcaaaggctggaagaggaacatgttacctgccttctgcaggttcttgccagttacataaatcccgtcagtagtgcggtaaatggagaagctcagtcatctcatgagactagagggcagaacagtaatgcccttccttctgtacttctcgagcttctcagtcagtcctgcctcatcccagccatgtcatcttatctacgaaatgattcagttctggacatggcaagacatgtgccactctatcgggcactgctggaattgcttcgggccattgcttcttgtgctgccatggtgcccctattgttgcccctttctacagagaacggtgaagaggaagaagaacagtcagaatgtcaaacttctgttggtacattgttagccaaaatgaagacctgtgttgatacctataccaaccgtttaagatctaaaagggaaaatgttaaaacaggagtaaaaccagatgcgtctgatcaagaaccagaaggacttactcttttggtaccagacatccaaaagactgctgagatagtttatgcagccaccaccagtttgcggcaagcaaatcaggaaaaaaaactgggtgaatactccaagaaggcggctatgaaacccaaacctttgtcagtattaaagtcacttgaagaaaaatatgtggctgttatgaagaaattacagtttgatacgtttgaaatggtttctgaagatgaagatgggaaattgggatttaaagtaaattaccactacatgtctcaggtgaaaaatgctaatgatgcgaacagtgctgccagagctcgccgccttgcccaggaagctgtgacgctttcaacctcactgcctctgtcttcatcctctagtgtgtttgtacgctgtgatgaggagcgacttgatatcatgaaggttctaataactggtccagcggacaccccttatgcaaatggctgctttgagtttgatgtgtattttcctcaagattatcccagttcaccccctcttgtgaatctagagacaactggtggtcatagcgtgcgattcaatccaaacctttataatgatggcaaggtttgtttaagcatcttaaacacgtggcatggaagaccagaagagaagtggaatcctcagacctcaagctttttgcaagtgttggtgtctgtccagtcccttatattagtagctgagccttattttaatgaaccgggatatgaacggtctagaggcactcccagtggcacacagagttctcgagaatatgatggaaacattcgacaagcaacagttaagtgggcaatgctagaacaaatcagaaacccttcaccatgttttaaagaggtaatacacaaacatttttacttgaaaagagttgagataatggcccaatgtgaggagtggattgcggatatccagcagtacagcagtgataagcgggtaggcaggactatgtctcaccatgcagcagctctcaagcgtcacactgctcagctccgcgaagagttgctgaaacttccctgccctgaaggcttggatcctgacactgacgatgccccagaggtgtgcagagccacaacaggtgctgaggagactctaatgcatgatcaggttaaacccagcagcagcaaagaactccccagtgacttccagttatgagctgcattgatgtggacttcatagacacaaaggcttcgaagcacaagccaaatatgtcaatatttgtatgtaagaaactaattatgtaataggtaatgaaactgaaactatactatgcccttaaggagatccagtttaattcaaggtgatcttttatttacctgtacaggagtgtaaacttttttgtgcttttatttttcaattgtgagaaccactgattggtatgttcaacaaatttgtgtatacaaagaaatggataaatcactgctatataagggaaactaccttaggaaagaatgtttactgaatgtttattttattttattttttttttactatagagtgaggggttgttaacaaagaatatatattggtcattcttacaactactatttaaagtcagcaacttttcactgaatttgatagattttatgtttggccatatcttcatgctcacatttgatttctgaagacctcctacatacacttcaataaaagttaaatggacatactccctcttttttgatttactggtacatttttaaaataataaatctgccataaaatgcattatatctggagacttgcacttgtatggatgaatttattacattcaacatatttaattttatgccttctaattctaagatgcagaaaaaaataaatgaacatgattttattctatgccaacatttgggcctctgaatgtatctgttatttgaatttaagtatttgaaaaggaatggtcaatttgaaagtcattctaaactgattttttttttctaaagggctccttttttcctggactatgtggttttatgactaaagtcacatgtatgtattaaacattgaggctctgtagaggagagaggatgtacctctctggtgctgttacagtacattctgtacctgccatacaggctcattttcatgcaaattcttcctagagccaaataaataaagacttaggtgaattagtatgtcttgtttctaaaaaaaaaaaaa

SEQ ID NO: 13335 - DNA, 3734 bp, Homo sapiens
caaatgcgaacttaggctgttacacaactgctggggtctgttctcgccgcccgcccggcagtcaggcagcgtcgccgccgtggtagcagcctcagccgtttctggagtctcgggcccacagtcaccgccgcttacctgcgcctcctcgagcctccggagtccccgtccgcccgcacaggccggttcgccgtctgcgtctcccccacgccgcctcgcctgccgccgcgctcgtccctccgggccgacatgagtggggaccacctccacaacgattcccagatcgaagcggatttccgattgaatgattctcataaacacaaagataaacacaaagatcgagaacaccggcacaaagaacacaagaaggagaaggaccgggaaaagtccaagcatagcaacagtgaacataaagattctgaaaagaaacacaaagagaaggagaagaccaaacacaaagatggaagctcagaaaagcataaagacaaacataaagacagagacaaggaaaaacgaaaagaggaaaaggttcgagcctctggggatgcaaaaataaagaaggagaaggaaaatggcttctctagtccaccacaaattaaagatgaacctgaagatgatggctattttgttcctcctaaagaggatataaagccattaaagagacctcgagatgaggatgatgctgattataaacctaagaaaattaaaacagaagataccaagaaggagaagaaaagaaaactagaagaagaagaggatggtaaattgaaaaaacccaagaataaagataaagataaaaaagttcctgagccagataacaagaaaaagaagccgaagaaagaagaggaacagaagtggaaatggtgggaagaagagcgctatcctgaaggcatcaagtggaaattcctagaacataaaggtccagtatttgccccaccatatgagcctcttccagagaatgtcaagttttattatgatggtaaagtcatgaagctgagccccaaagcagaggaagtagctacgttctttgcaaaaatgctcgaccatgaatatactaccaaggaaatatttaggaaaaatttctttaaagactggagaaaggaaatgactaatgaagagaagaatattatcaccaacctaagcaaatgtgattttacccagatgagccagtatttcaaagcccagacggaagctcggaaacagatgagcaaggaagagaaactgaaaatcaaagaggagaatgaaaaattactgaaagaatatggattctgtattatggataaccacaaagagaggattgctaacttcaagatagagcctcctggacttttccgtggccgcggcaaccaccccaagatgggcatgctgaagagacgaatcatgcccgaggatataatcatcaactgtagcaaagatgccaaggttccttctcctcctccaggacataagtggaaagaagtccggcatgataacaaggttacttggctggtttcctggacagagaacatccaaggttccattaaatacatcatgcttaaccctagttcacgaatcaagggtgagaaggactggcagaaatacgagactgctcggcggctgaaaaaatgtgtggacaagatccggaaccagtatcgagaagactggaagtccaaagagatgaaagtccggcagagagctgtagccctgtacttcatcgacaagcttgctctgagagcaggcaatgaaaaggaggaaggagaaacagcggacactgtgggctgctgctcacttcgtgtggagcacatcaatctacacccagagttggatggtcaggaatatgtggtagagtttgacttcctcgggaaggactccatcagatactataacaaggtccctgttgagaaacgagtttttaagaacctacaactatttatggagaacaagcagcccgaggatgatctttttgatagactcaatactggtattctgaataagcatcttcaggatctcatggagggcttgacagccaaggtattccgtacatacaatgcctccatcacgctacagcagcagctaaaagaactgacagccccggatgagaacatcccagcgaagatcctttcttataaccgtgccaatcgagctgttgcaattctttgtaaccatcagagggcaccaccaaaaacttttgagaagtctatgatgaacttgcaaactaagattgatgccaagaaggaacagctagcagatgcccggagagacctgaaaagtgctaaggctgatgccaaggtcatgaaggatgcaaagacgaagaaggtagtagagtcaaagaagaaggctgttcagagactggaggaacagttgatgaagctggaagttcaagccacagaccgagaggaaaataaacagattgccctgggaacctccaaactcaattatctggaccctaggatcacagtggcttggtgcaagaagtggggtgtcccaattgagaagatttacaacaaaacccagcgggagaagtttgcctgggccattgacatggctgatgaagactatgagttttagccagtctcaagaggcagagttctgtgaagaggaacagtgtggtttgggaaagatggataaactgagcctcacttgccctcgtgcctgggggagagaggcagcaagtcttaacaaaccaacatctttgcgaaaagataaacctggagatattataagggagagctgagccagttgtcctatggacaacttatttaaaaatatttcagatatcaaaattctagctgtatgatttgttttgaattttgtttttattttcaagagggcaagtggatgggaatttgtcagcgttctaccaggcaaattcactgtttcactgaaatgtttggattctcttagctactgtatgcaaagtccgattatattggtgcgtttttacagttagggttttgcaataacttctatattttaatagaaataaattcctaaactcccttccctctctcccatttcaggaatttaaaattaagtagaacaaaaaacccagcgcacctgttagagtcgtcactctctattgtcatggggatcaattttcattaaacttgaagcagtcgtggctttggcagtgttttggttcagacacctgttcacagaaaaagcatgatgggaaaatatttcctgacttgagtgttcctttttaaatgtgaatttttatttctttttaattattttaaaatatttaaacctttttcttgatcttaaagatcgtgtagattggggttggggagggatgaagggcgagtgaatctaaggataatgaaataatcagtgactgaaaccattttcccatcatcctttgttctgagcattcgctgtaccctttaagatatccatctttttctttttaaccctaatctttcacttgaaagattttattgtataaaaagtttcacaggtcaataaacttagaggaaaatgagtatttggtccaaaaaaaggaaaaataatcaagattttagggcttttattttttcttttgtaattgtgtaaaaaatggaaaaaaacataaaaagcagaattttaatgtgaagacattttttgctataatcattagttttagaggcattgttagtttagtgtgtgtgcagagtccatttcccacatctttcctcaagtatcttctatttttatcatgaattcccttttaatcaactgtaggttatttaaaataaattcctacaacttaatggaaa

SEQ ID NO: 13336 - DNA, 1751 bp, Homo sapiens
actaccaccatgctggcctcagggatgcttctggtggccttgctggtctgcctgactgtaatggtcttgatgtctgtttggcagcagaggaagagcaaggggaagctgcctccgggacccaccccattgcccttcattggaaactacctgcagctgaacacagagcagatgtacaactccctcatgaagatcagtgagcgctatggccccgtgttcaccattcacttggggccccggcgggtcgtggtgctgtgtggacatgatgccgtcagggaggctctggtggaccaggctgaggagttcagcgggcgaggcgagcaagccaccttcgactgggtcttcaaaggctatggcgtggtattcagcaacggggagcgcgccaagcagctccggcgcttctccatcgccaccctgcgggacttcggggtgggcaagcgaggcatcgaggagcgcatccaggaggaggcgggcttcctcatcgacgccctccggggcactggcggcgccaatatcgatcccaccttcttcctgagccgcacagtctccaatgtcatcagctccattgtctttggggaccgctttgactataaggacaaagagttcctgtcactgttgcgcatgatgctaggaatcttccagttcacgtcaacctccacggggcagctctatgagatgttctcttcggtgatgaaacacctgccaggaccacagcaacaggcctttcagttgctgcaagggctggaggacttcatagccaagaaggtggagcacaaccagcgcacgctggatcccaattccccacgggacttcattgactcctttctcatccgcatgcaggaggaggagaagaaccccaacacggagttctacttgaaaaacctggtgatgaccacgttgaacctcttcattgggggcaccgagaccgtcagcaccaccctgcgctatggcttcttgctgctcatgaagcacccagaggtggaggccaaggtccatgaggagattgacagagtgatcggcaagaaccggcagcccaagtttgaggaccgggccaagatgccctacatggaggcagtgatccacgagatccaaagatttggagacgtgatccccatgagtttggcccgcagagtcaaaaaggacaccaagtttcgggatttcttcctccctaagggcaccgaagtgttccctatgctgggctctgtgctgagagaccccagtttcttctccaacccccaggacttcaatccccagcacttcctgaatgagaaggggcagtttaagaagagtgatgcttttgtgcccttttccatcggaaagcggaactgtttcggagaaggcctggccagaatggagctctttctcttcttcaccaccgtcatgcagaacttccgcctcaagtcctcccagtcacctaaggacattgacgtgtcccccaaacacgtgggctttgccacgatcccacgaaactacaccatgagcttcctgccccgctgagcgagggctgtgccggtgcaggtctggtgggcggggccagggaaagggcagggccaagaccgggcttgggagaggggcgcagctaagactgggggcaggatggcggaaaggaaggggcgtggtggctagagggaagagaagaaacagaagcggctcagttcaccttgataaggtgcttccgagctgggatgagaggaaggaaacccttacattatgctatgaagagtagtaataatagcagctcttatttcctgagc

SEQ ID NO: 13337 - DNA, 1747 bp, Homo sapiens
actgccaccatgctggcctcagggctgcttctggtgaccttgctggcctgcctgactgtgatggtcttgatgtcagtctggcggcagaggaagagcagggggaagctgcctccgggacccaccccattgcccttcattggaaactacctgcagctgaacacagagcagatgtacaactccctcatgaagatcagtgagcgctatggccctgtgttcaccattcacttggggccccggcgggtcgtggtgctgtgcggacatgatgccgtcaaggaggctctggtggaccaggctgaggagttcagcgggcgaggcgagcaggccaccttcgactggctcttcaaaggctatggcgtggcgttcagcaacggggagcgcgccaagcagctccggcgcttctccatcgccaccctaaggggttttggcgtgggcaagcgcggcatcgaggaacgcatccaggaggaggcgggcttcctcatcgacgccctccggggcacgcacggcgccaatatcgatcccaccttcttcctgagccgcacagtctccaatgtcatcagctccattgtctttggggaccgctttgactatgaggacaaagagttcctgtcactgttgcgcatgatgctgggaagcttccagttcacggcaacctccacggggcagctctatgagatgttctcttcggtgatgaaacacctgccaggaccacagcaacaggcctttaaggagctgcaagggctggaggacttcatcgccaagaaggtggagcacaaccagcgcacgctggatcccaattccccacgggacttcatcgactcctttctcatccgcatgcaggaggaggagaagaaccccaacacagagttctacttgaagaacctggtgatgaccaccctgaacctcttctttgcgggcactgagaccgtgagcaccaccctgcgctacggtttcctgctgctcatgaagcacccagaggtggaggccaaggtccatgaggagattgacagagtgatcggcaagaaccggcagcccaagtttgaggaccgggccaagatgccctacacagaggcagtgatccacgagatccaaagatttggagacatgctccccatgggtttggcccacagggtcaacaaggacaccaagtttcgggatttcttcctccctaagggcactgaagtgttccctatgctgggctccgtgctgagagaccccaggttcttctccaacccccgggacttcaatccccagcacttcctggataagaaggggcagtttaagaagagtgatgcttttgtgcccttttccatcggaaagcggtactgttttggagaaggcctggccagaatggagctctttctcttcttcaccaccatcatgcagaactttcgcttcaagtcccctcagtcgcctaaggatatcgacgtgtcccccaaacacgtgggctttgccacgatcccacgaaactacaccatgagcttcctgccccgctgagcgagggctgtgctggtgcagggctggtgggcggggccagggaaacggccggggcaggggcggggcttgtgggaggggcggggctaagaatgggggcagtgggggaaggaaggggagaggtggttagagggaacagaagaaacagaaggggctcagttcaccttgatgatgtccttcagagctgtgatgagaggaagggaaaccttacagtatgctacaaagagtagtaataatagcagctcttatttcctga

SEQ ID NO: 13338 - DNA, 6345 bp, Homo sapiens
gtaaggtctcggaagtacgaggcggaggggacgaaaaacggggggccagactgttgtggctgtggtggagacgagaaaccaggaagaagaggctcgcctcccactcggcgacagtaagcgaagcagccgaaggcgagcgccgacatcagcagctgccccctaaatcccgcccttcgtcttggcggcagcgggagactgagagacgcgcgcagcaggggcgggactggagaggggccccgcgcgcggatctcgcgagagcattagagggcggaagcgctatccgagcaggatgcggttcgtggttgccttggtcctcctgaacgtcgcagcggcgggagccgtgccgctcttggccaccgaaagcgtcaagcaagaagaagctggagtacggccttctgcaggaaacgtctccacccaccccagcttgagccaacggcctggaggctctaccaagtcgcatccggagccgcagactccaaaagacagccctagcaagtcgagtgcggaggcgcagaccccagaagacacccccaacaagtcgggtgcggaggcaaagacccaaaaagacagctccaacaagtcgggtgcggaggcaaagacccaaaaaggcagcactagcaagtcgggttcggaggcgcagaccacaaaagacagcactagtaagtcgcatccggagctgcagactccaaaagacagcactggcaaatcgggtgcggaggcgcagaccccagaagacagccccaacaggtcgggtgcggaggcaaagacccaaaaagacagccctagcaagtcaggttcggaggcgcagaccacaaaagatgtccctaataagtcgggtgcggacggccagaccccaaaagacggctccagcaagtcgggtgcggaggatcagaccccaaaagacgtccctaacaagtcgggtgcggagaagcagactccaaaagacggctctaacaagtccggtgcagaggagcagggcccaatagacgggcccagcaagtcgggtgcggaggagcagacctcaaaagacagccctaacaaggtggttccagagcagccttcccggaaagaccattccaagcccatctccaacccttctgataacaaggagctccccaaggctgacacaaaccagcttgctgacaaagggaagctttctcctcatgctttcaaaaccgaatctggggaggaaactgacctcatttctcccccgcaggaggaagttaagtcttcagagcctactgaggatgtggagcccaaagaggctgaagatgatgatacaggacccgaggagggctcaccgcccaaagaagagaaagaaaagatgtccggttctgcctccagtgagaaccgtgaagggacactttcggattccacgggtagcgagaaggatgacctttatccgaacggttctggaaatggcagcgcggagagcagccacttctttgcatatctggtgactgcagccattcttgtggctgtcctctatatcgctcatcacaacaagcggaagatcattgcttttgtcctggaaggaaaaagatctaaagtcacccggcggccaaaggccagtgactaccaacgtttggaccagaagtcctaacagaatggtatattcctctggaaaaagatgaacgtcaccaatggattgtgctgctctcgtttcagctttgatttttttgtccttgagaaccttgtcctccctgctgatttgtttctaaatcaaaagaaatgaagaaaaaagtactgtgacctgagagacaccctcctctagaatttagtggcgggtctgggctggcagaggtagggggctgctttgggctttgcacctgcactttggtgacattgttcttctgtgttccctttatttatgctggtggcttccatccgttcctcctctgagggtgagtggaggggtatatggaaacacggctatgaccaaagggagatcccagcctgggcaggctgcgctgctgaccaccctccctggggcccgggctctgtaggaaagttggtccttgactgtggcattgcactctgcactgtttctctctgcagacctaggggaaaactgcaggtggaagtgcttttctactaaggcctcttactttgggggggatgtgccctacagaagacatagaagatggggaaatgccaatgggcaaagagctactttgaatacataattctcttcaaagacttcagcagcaaaccaaaacagcaggttaaaaaaaaagatgcttttttgggtgcaagtctaacctgtctagcatgagatcttcttgattttctgattattttatgtagcttgagacaaagtgaatcaacttccacttagttgtaccgagcataaaacagaacttgggcttcctggcagtgaggccactgtcccatcacagatttttaaaataaatatgatttgaagtagtgtgatctttcacacaatcatactcagtaggaactttttgaaatagggcaagtttatgtttcatgcgagaaaacatgaaggagggttttggttttggtctgcagtttttccaaagggcttttatgagatacatttcccacaaagtccattttgcctttgttgcctaaaacagacaaaatagacttagatttattaatagaaactatactctctgccaattttacctcagtgtatttaatggtcctttaatctgatataagatgccaagggtatttgataaaaattcttcttccatgccatgtcaggagttaatacaaatgaagaaattccgtgggttcccctgggataagtgagggtagtgtcttggacaacactattgtttgaaggtttatcttttctaatcatgctctaccgcattgtagagagcctaaagagagttgtttctgagctgatctcagggaaatacaaataacttgggagatgagggaaataagatgaattctgtgctgtcaaggcagtaagtctgaagaaaggaccatgcttcttatattatcttccaccttgcttaaaacagcccatagctttgagttgacattttcattcttggcggatagcctactttatgaaggtaaggaatgaactcctacccttcttgggtcattctctgtactgatgcgttagtcttataatactttgcaccaacctgaggaatcttctaggcttctctagcatcccctaagactgtggctatttcacgtctctctccctgcctgccttccttttcccttcctttcccctcctcatgttttctggttgtgcccatctgtaccagctcctttccatccaccttcgtatgcacccagatttttctgttcccatctgtcctatttgttattcatcccgctgctcaacttctccagtatgttgcttcccttaagttgccattcattctcttcatgacttttactaactcacttcggtctctgtctgtcaactaaacttttctaaaggttaccagttatccaatcaccaaatccatggctttttctcaaagcttagtcttgtccttggcagaactggacactattgaccatccaaatggaaattcccctttcttggtgtctctgacaaatggtcctttgccttatcttgtgctggtggtgaagaggccctcaaagccaggcctctctattcctttgactgtctcctcagccattaacccattcttcatcctcggagtgagtgattcccaagtctttgtcttggcttaatccctaaagaacccagttctgctggtatcgaatagttcagcttggttgtcattgaaaggaatttctctcttctgtccatcagcctgtccctcccaactgtctaggacagtcttcggtcacctaaattcctaactgcagacttttgccctttttctctctcatcaccaaagtcccatccatttttttttaataaaagatcctcagctacagtctttccattttccttgcttctcttattgcacacccccagcccattttgcttctctcttggattttgttttttcagatccacatttattgggtttcctgtccagcttcttggaaaggagctcactcttggaaagactgatctttccaaaatattttccctggtctgaagctttggtgtgaacttctcaaggcttagagaatccagttacagaccttttggggttcaggatgctatagattgacaccctcctgcctgtttttctctgcatcccaacctggccaaggcccctcctgtggggtgcccatctgtgcctttattccggctgtgccctcgactttccagcttcccatgtttctttggttaggtttctctcccttccttctttctccttccccaatccgcctgtttcgtcagggcccagtttgtttcctcatacaccttcctcactaccccaccccacatggttgactctttccctcagctccaccagctcttcatcatgccactcatttcagaacttgagcaaaacagggcagtcaggatctgatgtctttctggtctccctaagaaaactaagctcttgagggacagcccttggcaatgctttcctatctgctgatcatggtgaccttccttaggacttccagagttcagttccttctggcagagaggttttctttctccatgccatatggatgtgactcaaatgaggggtcccacagcttttcctggctaccacttgctgtgaccttatacatgttggggtttgctcttaaagaggagagcaggaagaaaggttggtttcagaaaccaagagggtcggcagtggacgcgtacattttgtcacggagtccacagagctgagcttttgagcagactctgagaagtatcattgcttgtgttgaaagaatacaacaggatttaagtttctctttagaaattgcactgaagaaaggccgggcgcggtggctccccctgtaatcccagcgctttgggaggccgaggcggggggatcacgaggtcaagagatcgagaccatcctggccaacatggtgaaaccccgtctctaataaaaatacaaaaattagccgggcatggtgacgtgcacctgtagtcccagctactagataggctgaggcaggagaattgcttgaatccgggaggcggaggttgcagtgagccgagatcgtgccactgaactccaacctgccaatagagcgagactccgtctcaaaaaaaaaaaaaaaaaagaaagaaatagcattgaagaaaataccgcacatcagaggaaagcttattttctgcatggtgtcttttcaaagatagaatatttgaagcatgttttctagcgattgtgtggatgagggtgagctggctgaggcatcgctcaagctggggggtggtgtgtaagaagcacgtggagccacaagaggcacctcctatagtcagctaagggcttccctttctgcgcccagcttttgggtgaagggtgatttctattagacacatctgtgcttcagtcatagatgttaatagaggaagcagttttcctgctgcagattcctgaatagagttgctgaaagagtctacttctggactcaggggaagttgaaggccagtctgtgtagaaaggctgaggcaacggggaaagacctgacagctagttacatacgctctgacatagtactcccatgatggcttccagtgacacatgtgctgatagaattctaaacctctggaatttccctgctggcgacttctatggccgttgactgtacagggtaacctgatgccagatgctatgggcgtgatgagaactagagcattgcagcatggaggaaactgtgaggcaccagatcctgtgcttctgcaggccattttctgaaaacccctgttaggaaggttggatttggcgtgacttgcttgagcaagagtcctggggagagattttgaggtttaatttaacggtatatccagagctaacagtgactcaactcgtctagttctgcaagtcagatgtacacttagagtctctctgtgaagggtttgggtctgagctgtatagtatgtcaaactgccagtaagccagcccctcaccctctgatagatattcctttaatgcaccagacttcatgtttgataaatgattaatggttgaaattgtttctcttcttttgtgttttcccagttaatagatggtcactgtttccacaatgttttatactttcagctttttgtaacttaactataattacttaattttatttttttaaagcttgttgtggtctaatgagaagtatttttcagtgcataatgtttttctgagcttctgtaaatgccatcccaatgtggtttggttttgttgaacagaaaccaaaataaatttcaaaatgttaaagcaatggaaaaaaaaaaaaaaaaaaaaaaaaaaaaaa

SEQ ID NO: 13339 - DNA, 1460 bp, Homo sapiens
gggtaaaaggccggtacctcgggcaagatggctatcaagagtatcgcttcccgcctccggggttcccgtcgttttctgagcggcttcgtggctggggctgtagtgggcgctgcgggagctgggctcgcggccctgcagttcttccggagtcagggcgctgagggagcgttgacagggaagcagccggatggatctgcagaaaaggctgtcttggaacaatttggattccctttaactggaacagaggcaaggtgttacactaatcacgctttgtcttatgatcaggcaaagcgggtgcctagatgggttcttgaacatatttccaaaagcaagataatgggtgatgcagacagaaagcattgtaaatttaagcctgatcccaatatccctccaaccttcagtgccttcaatgaagattatgttggaagtgggtggtcacgaggacacatggctccagcaggaaataacaaattttcaagtaaagccatggctgaaaccttttacctttctaacattgtgcctcaggattttgataataattctggatattggaacagaatagaaatgtactgtcgagagctgacagaaaggtttgaagatgtttgggtggtatctgggcctttgaccttacctcagactagaggcgatggaaagaaaatagttagttaccaggtgattggcgaggacaacgtggcagtcccctcacacctttataaggtaatcctggcccgcagaagctcagtatctaccgaaccactggcgctaggggcctttgtggtacccaatgaagccatcggcttccagccccagttaactgaattccaagtgagcctccaggacctagagaagttgtcagtactggtgttttttcctcatttggatagaactagtgatatccggaatatctgctctgtggacacctgtaagctcctggatttccaggagttcaccttgtacttgagtacaagaaagattgaaggagcccgatcagtgctcagactggaaaagatcatggaaaacttgaagaatgcagagattgaaccagatgattactttatgagtcgctatgagaagaagctagaagaactcaaagctaaggagcagtcaggaacccagataagaaagccatcctagtttttatctcaagatgtgtcataccgtctgtaatgaagcaggcatgccctctttaggctaacatattttagtggctttgctttttgctttttaaaaagtttttctctttaagagatgtggtctcgccgtgtcatccaggctggagtgcggtggtggaatcatagctcactatagcctcaaacttctgggcttaagcaatcctcctgcctctgccccctgagcagctgggactacaggcacacaccatcaccctcagctactagtggctttgctttaaagaaacagtggaatcctaaatttatgactaaaaattcccccaaaagatg

SEQ ID NO: 13340 - DNA, 4425 bp, Homo sapiens
gcgcgcgtggggctccattccgcggtgctgggtctccgtgccggggtgggtgctcgtgtgtgcgcttctcctccccatcccccttcccccaagaataaaagaagaaccgggaggcgtgctcagaaaataaataaataaccaccacacacgcgcagcccggagcgagtcggcggggctggcggcagcggcggaggaggagtgaaggcggcggcggcggaggagggacgcgcggaaaaggcagcaactttaaagccagctcagagcctagacctccagccgagcggtttgcagcgcggcggcggcggcggcggcggcggcggcggcgttgagtgtctggcccgccggtccggtcggggtgtgcagtcggacggacgagcagcgcgtcgctgtcctccggcagctggagatgtccgagcccaaggcaattgatcccaagttgtcgacgaccgacagggtggtgaaagctgttccatttcctccaagtcaccggcttacagcaaaagaagtgtttgataatgatggaaaacctcgtgtggatatcttaaaggcgcatcttatgaaggagggaaggctggaagagagtgttgcattgagaataataacagagggtgcatcaattcttcgacaggaaaaaaatttgctggatattgatgcgccagtcactgtttgtggggacattcatggacaattctttgatttgatgaagctctttgaagtcgggggatctcctgccaacactcgctacctcttcttaggggactatgttgacagagggtacttcagtattgaatgtgtgctgtatttgtgggccttgaaaattctctaccccaaaacactgtttttacttcgtggaaatcatgaatgtagacatctaacagagtatttcacatttaaacaagaatgtaaaataaagtattcagaacgcgtatatgatgcctgtatggatgcctttgactgccttcccctggctgccctgatgaaccaacagttcctgtgtgtgcatggtggtttgtctccagagattaacactttagatgatatcagaaaattagaccgattcaaagaaccacctgcatatggacctatgtgtgatatcctgtggtcagaccccctggaagattttggaaatgagaagactcaggaacatttcactcacaacacagtcagggggtgttcatacttctacagttacccggctgtatgtgaattcttacagcacaataacttgttatctatactccgagcccacgaagcccaagatgcagggtaccgcatgtacaggaaaagccaaacaacaggcttcccttctctaattacaattttttcagcaccaaattacttagatgtatacaataacaaagctgcagtattgaagtatgagaacaatgttatgaatatcaggcaattcaactgttctcctcatccatactggcttccaaatttcatggatgtttttacttggtcccttccatttgttggggaaaaagtgactgagatgctggtaaatgtcctcaacatctgctcagatgatgaactagggtcagaagaagatggatttgatggtgcaacagctgcagcccggaaagaggtgataaggaacaagatccgagcaataggcaaaatggccagagtgttctcagtgctcagagaagagagtgagagtgtgctgacgctgaaaggcttgaccccaactggcatgctccccagcggagtactttctggagggaagcaaaccctgcaaagcgctactgttgaggctattgaggctgatgaagctatcaaaggattttcaccacaacataagatcactagcttcgaggaagccaagggcttagaccgaattaatgagaggatgccgcctcgcagagatgccatgccctctgacgccaaccttaactccatcaacaaggctctcacctcagagactaacggcacggacagcaatggcagtaatagcagcaatattcagtgaccacttcctgttcacttttttttttttttttttttttttttgagctgcggggcatgatggggattgctgcatatcagcagttggatgttcttgcctctgacagtagcttatttgctctgggggccaggaattggattcagtttacactatcattaaaaaagagggagagagataataaactatattttggtggggatggtgattaaacacctcttttgggtatgccttttaaaaatgcttatagagaaaaaaattttaaaaagaaagctaatgctagtatatactgcaatgttaggggaatgaacatgttttcctactgcattggggacttctagataggttaatgaaaggccttttattctgttactggacatgaaaactttgtctaatttcttactctattgtacgtttacagtcgcagcactaaaaatggatgacatcaaacatttttaacaaaatgatgtacaaactaaggactatttattgataatgttttgctactcttgtcagacaatggctataaactgaattaggcagtcttaaaaaaaaaaaaaaaacagaaaaagaaaaaaaagaacgttgcaaatttgttaaaatgccaaaaaggacagtttaattttgtacagattatgcttacctcaggtttctttagtgtgcttgaatgcccttctttccatataacacttatcttcttcttaattcggcaatggaatatcttttaagttttaaaaaaactggaataattatatctatcttttttgccgtttatatttaggggtttttgttgataaaatcaagtcttggttgtggcttgctgaattaaatatttatgagtggtgcatttttaagtatagtgaacaagacaccatattaagtacagtgataaagcatctatattctgtaaaaaaaaaaaaaatctgcctatgcatgttttttaagaaaaaaaaaatggctgtatcggcctgtatgggactgtaatgcgcttagtggtctgacatatactggaaatgtatgtatactggcgtactttatattctctaaaatgcttaatgcctttgaaattttgtaatcaaaaaaaagctttgaaaaaatctaaaggggagagtattctttaaagtttttaacataagcttgtcaatgcacatgtagatggttagcatgtttagcaaaccttgtgaaattataataagtttgtagttacatgtgaaactctaaatgcatggcaactgttaatgtcataacagtttagttattttgttctgttctgtcatgtgccacaaaatatgtacttttttcacttttttccctttgtatatcagttacgggttacaactggttcattctgaaaacaacaacaacaaaagtccattcatattttttaacaattgtataagtgcccaagtaattcactacagcctaaagccttgcctttgtaatttgacttctgacatgttggcaatcaaagcatgcacttgtaacaatgaaaaagaaaaagcattttatattactactcaataaaatgtgcatgaacttacagaattctcatccttccactgagtccgctgaagggatttatgtgcacaaccaccatgtgtcttctaggtgctggcccaccaccacacatcacaggctgatttccacaggcttcttcctaggggcctcgtgatctgaggggtggtgcctacttccactgtaagaaagaatcttggtggatttgtgtctcaaatcagataagagaagcctgtttaaagagcagatgccatcttctggcttcctcaaggagccagttaaaaaaccagagcattcctttttattgaaaaataaaattaatttgttatcaggttgtttcagttgtattggatgccctatctatctgctaaagcaaaaagtactaggctactaagtgcattttcatcacagaaaagagttgcatttgtattaacaagaaatttgtatacccacgcttcagctactatctaatcatcacccgaagatttaagatacaccaaatttcagtttgtttgtaacattgttcatctttagtgcactttgttttatataataaagtatgcctgttatattaaataataagaatatggcaattagcgatatagcatacccaaacaaagatgttctcgatacagtctggcaaagactatcccaaggttattttaatgaattcagacattttttcctgtggatatttctccatcctaaaaaaagtggcaaccaaggaaaatatttagatgcaacttactagagtgatgatgtgaaagaaatggtgattctggtatcatggtgtttattttctttcttataactgcagagaaaatatcctgactaaaaaaatttcatttttttggattcctttcttttacaaattgtgctgaggcaactatggcatagaaataaacatttgacattaaaataagtaaaaaaaaaaaaaaaaaaaa

SEQ ID NO: 13341 - DNA, 3577 bp, Homo sapiens
gccgtcccgctgttgtaagtggagggacggcagtcagctgaccctgcagtgtgcaggcgagcgcagggagtacgccatgtcctgagaaggggcgattctcaggctctggcagttacagcttctcctcaccctgccgagcaaccaggccacggggctccgtgcatcgccacctagagtgttaccctcttccttgttcacagaggttctccgcagtgtgtgagaaagaggccctctctcagatgaatggataaagaaaatgcaggacatatggggggaggagccaagatggccgaataggaacagctccggtctacagctcccagtgtgagcgacacagaagacaggtgatttctgcatttccatctgaggcaagaagaataaatgtctctggtggaacttttgctctggtggaactgcttttctagaactggtgttgcagcatccctggaagtgtcagagagccctgggagtatccaggtggcccggggtcagccagcagtcctgccctgcactttcactaccagcgctgccctcattaacctcaatgtcatttggatggtcactcctctctccaatgccaaccaacctgaacaggtcatcctgtatcagggtggacagatgtttgatggtgccccccggttccacggtagggtaggatttacaggcaccatgccagctaccaatgtctctatcttcattaataacactcagttatcagacactggcacctaccagtgcctggtcaacaaccttccagacatagggggcaggaacattggggtcaccggtctcacagtgttagttcccccttctgccccacactgccaaatccaaggatcccaggatattggcagcgatgtcatcctgctctgtagctcagaggaaggcattcctcgaccaacttacctttgggagaagttagacaataccctcaaactacctccaacagctactcaggaccaggtccagggaacagtcaccatccggaacatcagtgccctgtcttcaggtttgtaccagtgcgtggcttctaatgctattggaaccagcacctgtcttctggatctccaggttatttcaccccagcccaggaacattggactaatagctggagccattggcactggtgcagttattatcattttttgcattgcactaattttaggggcattcttttactggagaagcaaaaataaagaggaggaagaagaagaaattcctaatgaaataagagaggatgatcttccacccaagtgttcttctgccaaagcatttcacactgagatttcctcctcggacaacaacacactaacctcttccaatgcctacaacagtcgatactggagcaacaatccaaaagttcatagaaacacagagtcagtcagccacttcagtgacttgggccaatctttctctttccactcaggcaatgccaacataccatccatttatgctaatgggacccatctggtcccgggtcaacataagactctggtagtgacagccaacagagggtcatcaccacaggtgatgtccaggagcaatggctcagtcagtaggaagcctcggcctccacacactcattcctacaccatcagccacgcaacactggaacgaattggtgcagtacctgtcatggtaccagcccagagtcgggccgggtccttggtataggacatgaggaaatgttgtgttcagaaatgaataaatggaatgccctcatacaagggggagggtggggtggggagtgctgggaaagaaacacttccttataattatattagtaaaatgcacaaagaagaaggcagtgctgttacttggccactaagatgtgtaaaatggactgaaatgctccatcatgaagacttgcttccccaccaaagatgtcctgggattctgctggatctcaaagatgtgccaagccaaggaaaaagatacaagagcagaatagtacttaaaatccaaactgccgcccagatgggcttgttcttcatgcctaacttaataatttttaagagattaaagtgccagatggagtttaaatattgaaattattttaaaaggtaggtgtctttaagaaaataacaagcaaccctgtgatatgttccgtctctcccaattccctcgttatatagagggcttaatggtataaatggttaatattggtcccaacagggctgactcttctatcatataatcaaaactttttacatgagcaaaattcagtaagaaatgggggaagacaaaggaaacgtctttgagaagccccttcatatttatttatttatctcttcctgaaccatgaatttcatatgtggaatattgctatattgacagattcttgcctgtctgtgttattctaggatctgttacaggtccatggcaattactgtttattttttcctggaaaaatatttttttataaaaggcttttttttttttttaaatacatgagaggcattgggctaagaaagaaaagactgttgtataataccttgttcaatggttgtatttagtgagctcatagaggtccatcatatcatgaccgagctaggttgtgtgggcaggaaggtagggctaaggggttgtagccttgctgggcagcctctcagagcaaggttgttcagatctcccttgctattacagtaggttactattaatgagggcagcacctgatgccttttgtactgaggtatgtaactttctccttatttgacaagtagaagttaacttacttgtcagggagggcagacgtttttttgttctgtttcgtttttcaaaataatgctttttgcaaaagaggtaagactgagactaaaggtgttatcttctggtgtgctcctggaagtgtctaccctacatttgtgtcagctcagggttgcagtgttgcccagatgcattttacatcactgtaaagagattacttttgtggttactacctggcttggctggccttgcggttcaccagattaatttacaaactcccccactttattttgtgctatgtagatctggccatacttgcattagtgactgtcttgccttaaccacacttaagcaacccacaaatttcttctcagatttgtttcctagattacttatgatactcatcccatgtctcaataagagtgtcttttctttctggatgtgttctcttactccctcttaccaccatactttttgctctcttctcctgcaagcgtagtcttcacagggagtggcttcctgacatttttttcagttatgtgaatgaatggaaaccaacagctgctgcaaacactgtttttccaagaaggctacactcagaacctaaccattgccaaccatttcagtattgataaaaagctgaatttactttagcattacttatttttttttccatttgatggttcttactttgtaaaaatttaaataaatgaatgtctatactttttataaagaaaagtgaaaataccatgacactgaaaagatgatgctatcagatgctgtttagaaagcatttatcttgcatttctttattctttctaattatctaaaattcaataaaattttattcatataaaaaaaaaaaaaaaaa

SEQ ID NO: 13342 - DNA, 3395 bp, Homo sapiens
tgaccaagagctgacgtgtgcagaagtccttcttgtcctggtcgttgttcccgtctgagtaccagctccccactgccctgagggcgggccggcctgcggcggagggaaaaaggaagaggagaaggaaattgtcccgaatccctgcagtgggtccaagcctctcccgggtggccagtctttctgtaggttgcggcacaacgccaggcaaaagaagaggaaggaatttaatcctaatcggtggaggtcgatttgagggtctgctgtagcaggtggctccgcttgaagcgagggaggaagtttcctccgatcagtagagattggaaagattgttgggagtggcacaccactagggaaaagaagaaggggcgaactgcttgtcttgaggaggtcaacccccagaatcagctcttgtggccttgaagtggctgaagacgatcaccctccacaggcttgagcccagtcccacagccttcctcccccagcctgagtgactactctattccttggtccctgctattgtcggggacgattgcatgggctacgccaggaaagtaggctgggtgaccgcaggcctggtgattggggctggcgcctgctattgcatttatagactgactaggggaagaaaacagaacaaggaaaaaatggctgagggtggatctggggatgtggatgatgctggggactgttctggggccaggtataatgactggtctgatgatgatgatgacagcaatgagagcaagagtatagtatggtacccaccttgggctcggattgggactgaagctggaaccagagctagggccagggcaagggccagggctacccgggcacgtcgggctgtccagaaacgggcttcccccaattcagatgataccgttttgtcccctcaagagctacaaaaggttctttgcttggttgagatgtctgaaaagccttatattcttgaagcagctttaattgctctgggtaacaatgctgcttatgcatttaacagagatattattcgtgatctgggtggtctcccaattgtcgcaaagattctcaatactcgggatcccatagttaaggaaaaggctttaattgtcctgaataacttgagtgtgaatgctgaaaatcagcgcaggcttaaagtatacatgaatcaagtgtgtgatgacacaatcacttctcgcttgaactcatctgtgcagcttgctggactgagattgcttacaaatatgactgttactaatgagtatcagcacatgcttgctaattccatttctgacttttttcgtttattttcagcgggaaatgaagaaaccaaacttcaggttctgaaactccttttgaatttggctgaaaatccagccatgactagggaactgctcagggcccaagtaccatcttcactgggctccctctttaataagaaggagaacaaagaagttattcttaaacttctggtcatatttgagaacataaatgataatttcaaatgggaagaaaatgaacctactcagaatcaattcggtgaaggttcactttttttctttttaaaagaatttcaagtgtgtgctgataaggttctgggaatagaaagtcaccatgattttttggtgaaagtaaaagttggaaaattcatggccaaacttgctgaacatatgttcccaaagagccaggaataacaccttgattttgtaatttagaagcaacacacattgtaaactattcattttctccaccttgtttatatggtaaaggaatcctttcagctgccagttttgaataatgaatatcatattgtatcatcaatgctgatatttaactgagttggtctttaggtttaagatggataaatgaatatcactacttgttctgaaaacatgtttgttgctttttatctcgctgcctagattgaaatattttgctatttcttctgcataagtgacagtgaaccaattcatcatgagtaagctcccttctgtcattttcattgatttaatttgtgtatcatcaataaaattgtatgttaatgctggaaagaaaaaaagaagaaagaaagaaaccatccctgtccttcagtttataatctagttggagagataagaaacgtacaaaccaaaagataacagaatatctgaagcatgtactcattgtcagatgttccctctgagagcacagaggaggcaaaagcttctgtgggatgtgctagtcggctaaagcttcacagaggaggtggcaattgaaaatgagtcctgaatggggtagggtggttagggaattccatgagacaagacaaggggggcatggtgtgagaaaggcatggaagtaggaaccctcttcctatgacaggagatcattctgcttagagtggagagtgtggagagtgggagtagataattttggaaagctgggtgaagccagttgtggagaattgtttgaatattatcccattgaatacccagagccactaaatctttttttactagaaaataattggggtccatatgaaagtctctattactgagtagtgtcaatgagggtgtggcaaaatggagcctttcacatcctagtggtggccatttggtaatacagatataagccttaaactatgtaaacccttgtcctaaggaagtaattgaataattgcccaaagattgtatgtatgaggctgttcatcccagcactgtctaagctagtaaaaattggaaacaatttaagtatctagcacattggattggttataaagcaaggaatgttcacacagtaggatattataagtatgctgatggaaatctatattgccaggaaaagctattcattatgcgttgtgaagtcagaaagtaaaaaagggtagatagaagtattcgaagtatagttccattttttgagactaataaaacatatgtttaaaaggacactaaaaactggagttatagatatccagatagaaacagtagttatctttgggtagaagaataatgagtgatctttacttttttactttttattcatctttgtgtttttatttatctaaaatgggtattgatttttaggacggttttgaaaaagaaaagtgttgggaatgaagcaagtgattgattggaaaacatactgaatggaagaaatatttagattaaaaatgaggtaggttgaagtttcttctctgaaatgatagataaatggtgaagataaggcttattgtgaggattcagtgaggtaatatatgcaaagtacttacaatgttctggcacatagtaattaattaagaaaatcgagcacccttaattacctagaatgcagggttgttagttttttggttgacttttgttttgctggggcattctgccatgttttagtgtcatttaataaataatagtaacaataaaggttaacatttattaagt

SEQ ID NO: 13343 - DNA, 3367 bp, Homo sapiens
tgaccaagagctgacgtgtgcagaagtccttcttgtcctggtcgttgttcccgtctgagtaccagctccccactgccctgagggcgggccggcctgcggcggagggaaaaaggaagaggagaaggaaattgtcccgaatccctgcagtctttctgtaggttgcggcacaacgccaggcaaaagaagaggaaggaatttaatcctaatcggtggaggtcgatttgagggtctgctgtagcaggtggctccgcttgaagcgagggaggaagtttcctccgatcagtagagattggaaagattgttgggagtggcacaccactagggaaaagaagaaggggcgaactgcttgtcttgaggaggtcaacccccagaatcagctcttgtggccttgaagtggctgaagacgatcaccctccacaggcttgagcccagtcccacagccttcctcccccagcctgagtgactactctattccttggtccctgctattgtcggggacgattgcatgggctacgccaggaaagtaggctgggtgaccgcaggcctggtgattggggctggcgcctgctattgcatttatagactgactaggggaagaaaacagaacaaggaaaaaatggctgagggtggatctggggatgtggatgatgctggggactgttctggggccaggtataatgactggtctgatgatgatgatgacagcaatgagagcaagagtatagtatggtacccaccttgggctcggattgggactgaagctggaaccagagctagggccagggcaagggccagggctacccgggcacgtcgggctgtccagaaacgggcttcccccaattcagatgataccgttttgtcccctcaagagctacaaaaggttctttgcttggttgagatgtctgaaaagccttatattcttgaagcagctttaattgctctgggtaacaatgctgcttatgcatttaacagagatattattcgtgatctgggtggtctcccaattgtcgcaaagattctcaatactcgggatcccatagttaaggaaaaggctttaattgtcctgaataacttgagtgtgaatgctgaaaatcagcgcaggcttaaagtatacatgaatcaagtgtgtgatgacacaatcacttctcgcttgaactcatctgtgcagcttgctggactgagattgcttacaaatatgactgttactaatgagtatcagcacatgcttgctaattccatttctgacttttttcgtttattttcagcgggaaatgaagaaaccaaacttcaggttctgaaactccttttgaatttggctgaaaatccagccatgactagggaactgctcagggcccaagtaccatcttcactgggctccctctttaataagaaggagaacaaagaagttattcttaaacttctggtcatatttgagaacataaatgataatttcaaatgggaagaaaatgaacctactcagaatcaattcggtgaaggttcactttttttctttttaaaagaatttcaagtgtgtgctgataaggttctgggaatagaaagtcaccatgattttttggtgaaagtaaaagttggaaaattcatggccaaacttgctgaacatatgttcccaaagagccaggaataacaccttgattttgtaatttagaagcaacacacattgtaaactattcattttctccaccttgtttatatggtaaaggaatcctttcagctgccagttttgaataatgaatatcatattgtatcatcaatgctgatatttaactgagttggtctttaggtttaagatggataaatgaatatcactacttgttctgaaaacatgtttgttgctttttatctcgctgcctagattgaaatattttgctatttcttctgcataagtgacagtgaaccaattcatcatgagtaagctcccttctgtcattttcattgatttaatttgtgtatcatcaataaaattgtatgttaatgctggaaagaaaaaaagaagaaagaaagaaaccatccctgtccttcagtttataatctagttggagagataagaaacgtacaaaccaaaagataacagaatatctgaagcatgtactcattgtcagatgttccctctgagagcacagaggaggcaaaagcttctgtgggatgtgctagtcggctaaagcttcacagaggaggtggcaattgaaaatgagtcctgaatggggtagggtggttagggaattccatgagacaagacaaggggggcatggtgtgagaaaggcatggaagtaggaaccctcttcctatgacaggagatcattctgcttagagtggagagtgtggagagtgggagtagataattttggaaagctgggtgaagccagttgtggagaattgtttgaatattatcccattgaatacccagagccactaaatctttttttactagaaaataattggggtccatatgaaagtctctattactgagtagtgtcaatgagggtgtggcaaaatggagcctttcacatcctagtggtggccatttggtaatacagatataagccttaaactatgtaaacccttgtcctaaggaagtaattgaataattgcccaaagattgtatgtatgaggctgttcatcccagcactgtctaagctagtaaaaattggaaacaatttaagtatctagcacattggattggttataaagcaaggaatgttcacacagtaggatattataagtatgctgatggaaatctatattgccaggaaaagctattcattatgcgttgtgaagtcagaaagtaaaaaagggtagatagaagtattcgaagtatagttccattttttgagactaataaaacatatgtttaaaaggacactaaaaactggagttatagatatccagatagaaacagtagttatctttgggtagaagaataatgagtgatctttacttttttactttttattcatctttgtgtttttatttatctaaaatgggtattgatttttaggacggttttgaaaaagaaaagtgttgggaatgaagcaagtgattgattggaaaacatactgaatggaagaaatatttagattaaaaatgaggtaggttgaagtttcttctctgaaatgatagataaatggtgaagataaggcttattgtgaggattcagtgaggtaatatatgcaaagtacttacaatgttctggcacatagtaattaattaagaaaatcgagcacccttaattacctagaatgcagggttgttagttttttggttgacttttgttttgctggggcattctgccatgttttagtgtcatttaataaataatagtaacaataaaggttaacatttattaagt

SEQ ID NO: 13344 - DNA, 3318 bp, Homo sapiens
tctctcccactcgccgcccgctttccaagacatatgtcccgcttgcagcccatttcgatgctgcgaaacgtgggtccaagcctctcccgggtggccagtctttctgtaggttgcggcacaacgccaggcaaaagaagaggaaggaatttaatcctaatcggtggaggtcgatttgagggtctgctgtagcaggtggctccgcttgaagcgagggaggaagtttcctccgatcagtagagattggaaagattgttgggagtggcacaccactagggaaaagaagaaggggcgaactgcttgtcttgaggaggtcaacccccagaatcagctcttgtggccttgaagtggctgaagacgatcaccctccacaggcttgagcccagtcccacagccttcctcccccagcctgagtgactactctattccttggtccctgctattgtcggggacgattgcatgggctacgccaggaaagtaggctgggtgaccgcaggcctggtgattggggctggcgcctgctattgcatttatagactgactaggggaagaaaacagaacaaggaaaaaatggctgagggtggatctggggatgtggatgatgctggggactgttctggggccaggtataatgactggtctgatgatgatgatgacagcaatgagagcaagagtatagtatggtacccaccttgggctcggattgggactgaagctggaaccagagctagggccagggcaagggccagggctacccgggcacgtcgggctgtccagaaacgggcttcccccaattcagatgataccgttttgtcccctcaagagctacaaaaggttctttgcttggttgagatgtctgaaaagccttatattcttgaagcagctttaattgctctgggtaacaatgctgcttatgcatttaacagagatattattcgtgatctgggtggtctcccaattgtcgcaaagattctcaatactcgggatcccatagttaaggaaaaggctttaattgtcctgaataacttgagtgtgaatgctgaaaatcagcgcaggcttaaagtatacatgaatcaagtgtgtgatgacacaatcacttctcgcttgaactcatctgtgcagcttgctggactgagattgcttacaaatatgactgttactaatgagtatcagcacatgcttgctaattccatttctgacttttttcgtttattttcagcgggaaatgaagaaaccaaacttcaggttctgaaactccttttgaatttggctgaaaatccagccatgactagggaactgctcagggcccaagtaccatcttcactgggctccctctttaataagaaggagaacaaagaagttattcttaaacttctggtcatatttgagaacataaatgataatttcaaatgggaagaaaatgaacctactcagaatcaattcggtgaaggttcactttttttctttttaaaagaatttcaagtgtgtgctgataaggttctgggaatagaaagtcaccatgattttttggtgaaagtaaaagttggaaaattcatggccaaacttgctgaacatatgttcccaaagagccaggaataacaccttgattttgtaatttagaagcaacacacattgtaaactattcattttctccaccttgtttatatggtaaaggaatcctttcagctgccagttttgaataatgaatatcatattgtatcatcaatgctgatatttaactgagttggtctttaggtttaagatggataaatgaatatcactacttgttctgaaaacatgtttgttgctttttatctcgctgcctagattgaaatattttgctatttcttctgcataagtgacagtgaaccaattcatcatgagtaagctcccttctgtcattttcattgatttaatttgtgtatcatcaataaaattgtatgttaatgctggaaagaaaaaaagaagaaagaaagaaaccatccctgtccttcagtttataatctagttggagagataagaaacgtacaaaccaaaagataacagaatatctgaagcatgtactcattgtcagatgttccctctgagagcacagaggaggcaaaagcttctgtgggatgtgctagtcggctaaagcttcacagaggaggtggcaattgaaaatgagtcctgaatggggtagggtggttagggaattccatgagacaagacaaggggggcatggtgtgagaaaggcatggaagtaggaaccctcttcctatgacaggagatcattctgcttagagtggagagtgtggagagtgggagtagataattttggaaagctgggtgaagccagttgtggagaattgtttgaatattatcccattgaatacccagagccactaaatctttttttactagaaaataattggggtccatatgaaagtctctattactgagtagtgtcaatgagggtgtggcaaaatggagcctttcacatcctagtggtggccatttggtaatacagatataagccttaaactatgtaaacccttgtcctaaggaagtaattgaataattgcccaaagattgtatgtatgaggctgttcatcccagcactgtctaagctagtaaaaattggaaacaatttaagtatctagcacattggattggttataaagcaaggaatgttcacacagtaggatattataagtatgctgatggaaatctatattgccaggaaaagctattcattatgcgttgtgaagtcagaaagtaaaaaagggtagatagaagtattcgaagtatagttccattttttgagactaataaaacatatgtttaaaaggacactaaaaactggagttatagatatccagatagaaacagtagttatctttgggtagaagaataatgagtgatctttacttttttactttttattcatctttgtgtttttatttatctaaaatgggtattgatttttaggacggttttgaaaaagaaaagtgttgggaatgaagcaagtgattgattggaaaacatactgaatggaagaaatatttagattaaaaatgaggtaggttgaagtttcttctctgaaatgatagataaatggtgaagataaggcttattgtgaggattcagtgaggtaatatatgcaaagtacttacaatgttctggcacatagtaattaattaagaaaatcgagcacccttaattacctagaatgcagggttgttagttttttggttgacttttgttttgctggggcattctgccatgttttagtgtcatttaataaataatagtaacaataaaggttaacatttattaagt

SEQ ID NO: 13345 - DNA, 5065 bp, Homo sapiens
atgaggggacttgggacttgcctggcgactttggccggacttttgctaactgcggcgggcgagacgttctcaggtggctgcctctttgatgagccgtatagcacatgtggatatagtcaatctgaaggtgatgacttcaattgggagcaagtgaacaccttgactaaaccgacttctgatccatggatgccatcaggttctctcatgctggtgaatgcctctgggagacctgaggggcagagagcccacctgctcttaccccaacttaaggaaaatgacacccactgcatcgattttcactattttgtgtccagcaagagtaattctcctccggggttactcaatgtctacgtgaaggtcaataacgggccactggggaatcctatctggaatatatctggagacccaacacgtacatggaacagggcagaactggccattagtactttctggcctaacttttatcaggtgatttttgaagtgataacttctggacatcaaggctatctcgctatcgatgaggtgaaggtgttaggacatccatgtaccaggactcctcacttcctgcggattcagaatgtggaagttaatgctggccagtttgctaccttccagtgcagtgccatcggcaggaccgtggcaggagacaggctctggttacagggcattgatgtgcgagatgctcctctgaaggaaatcaaggtgaccagctcccgacgcttcattgcttcatttaatgttgtgaataccaccaaacgagatgctggaaagtaccgctgcatgattcgcactgaaggaggtgttggaatatcaaactatgcagagttggtagttaaagaaccacccgttcctattgccccacctcagctcgcctctgtaggagccacctacctgtggatacagctcaacgccaactccatcaatggggatgggcccattgtggcccgagaggtggagtactgcacggccagtgggagctggaatgaccggcagccagtcgattccacgagctataaaattggacaccttgacccagatacagaatatgagattagtgtgctcctgaccaggccaggggagggtggcactggctctcctggtccagctctcaggacaagaacaaagtgtgctgatcccatgcgaggcccaagaaaactagaagtagtggaggtcaaatctcggcaaatcactatccgctgggagccatttggatataatgtaactcgttgccacagttataatctcactgtccactactgttaccaagttggaggacaagaacaagtgcgagaagaagtaagctgggatacagaaaattcacaccctcaacacacgatcactaacctgtcaccatacaccaatgtcagtgtgaaactgatcctcatgaacccagagggccggaaggaaagccaagaactcatagtgcagacagatgaagacctcccaggtgctgttcccactgaatccatacaaggaagtacctttgaagagaagatatttcttcagtggagagaaccaactcaaacatatggtgtaatcactttatatgagatcacctacaaagcagtcagttcctttgacccagaaatagatttatccaatcagagtggaagagtttcaaagctgggaaatgaaacccattttctgttttttggactgtatccggggaccacatactcctttaccatccgagctagcacagctaagggttttgggcctccagcaacaaaccagttcaccaccaaaatatcagcaccctctatgccagcttatgaacttgagacacctttgaatcaaactgacaataccgtgacagtcatgctgaaacctgcccacagcagaggagcacctgtcagtgtctatcaaatagttgttgaggaagaacgtcctcgaagaactaaaaagacgacagaaatcttaaagtgctacccagtgccaattcacttccagaatgcttctctgctgaactcacagtactactttgctgcagaatttcctgcagacagcctccaagctgcgcagccttttacaattggtgataataagacatataatggatactggaacactccccttctcccctataaaagctacagaatttatttccaagctgctagtagagccaatggggaaaccaaaatagactgtgtccaagtggccacaaaaggagctgccactccgaaaccagtcccagaacccgagaaacagacagaccatacagttaaaattgctggagtcatcgcgggcatcttgctgttcgtgattatatttcttggagttgtgttggtaatgaagaaaaggaaactggccaagaagcggaaagagaccatgagcagcacccgacaggagatgactgtgatggtgaactcaatggacaagagctatgctgagcagggcacaaactgcgacgaggctttctcattcatggacacgcacaatctgaatgggagatctgtgtcttcaccatcgtccttcacaatgaaaacaaatacactgagcacatcggtgcctaattcctattacccagatgaaacccacacaatggccagcgataccagcagcctggtgcagtcccatacttacaagaagcgagagccggccgacgtgccctatcagactgggcagctccaccccgccatccgggtggcagacctccttcagcacatcacacagatgaagtgtgcggagggctacggcttcaaggaggaatacgagagcttctttgaagggcagtctgcaccatgggactcggctaagaaagatgagaacagaatgaagaacagatacgggaatatcattgcatacgatcattcccgagtgaggctgcagacaatagaaggagacacaaactcagactatatcaatggcaattatatcgatggttatcatcgacccaatcattacattgctacccaagggccaatgcaggaaaccatctatgacttctggaggatggtgtggcacgaaaacactgcaagtatcatcatggtgaccaatcttgtggaagtgggaagggtcaaatgctgcaaatactggccagatgacacagagatatataaagacattaaagttaccctaatagaaacagaactactggcagaatatgtgataagaacatttgctgttgaaaagagaggtgtgcatgaaatccgagagatcagacagtttcacttcactggctggccggatcatggggtcccctaccatgccaccggcctgctgggattcgtgcggcaagtcaagtccaagagcccgcccagtgcaggcccactggtggtgcactgcagtgctggtgcagggaggactggctgtttcatcgtcattgatatcatgttggacatggccgaaagggaaggggtcgtagacatctacaactgcgtcagggagctgcggtcacggagggtgaacatggtgcaaacagaggagcagtatgtgtttatccacgatgcgatcctggaagcctgtctttgtggggacacctctgtgcctgcttcccaagttaggtctctgtattatgacatgaacaaactggatccacagacaaactcaagccagattaaagaggaattccggacgctaaacatggtgacaccaacgctgcgagtagaggactgcagcatcgcactgttgccccggaaccatgagaaaaaccggtgcatggacatcctgcccccagaccgctgcctgcccttcctcatcaccatcgatggggagagcagcaactacatcaatgctgccctcatggacagctataaacagccttcagcttttatagtcacccagcatcctttgccaaacacagtgaaagacttttggagactggtcctggattatcactgcacatccgtagttatgctaaatgatgtggatcctgcccagttgtgtccacagtactggccagaaaacggagtacacagacacggccccatccaggtggaatttgtctctgctgacctggaagaggacatcatcagcaggatattccgcatttacaatgccgccagaccccaagatggatatcggatggtgcagcaattccagttcctgggctggccgatgtacagggacacaccagtgtctaagcgctccttcttgaagctcattcgccaggtggacaagtggcaagaggaatacaatggcggggaaggcccgaccgttgtgcactgcttgaacgggggaggccgcagtgggacgttctgcgccatcagcatcgtatgtgagatgctccggcaccagagaaccgtggatgtctttcacgctgtgaagacactgaggaacaacaagcccaacatggtcgacctcctggatcagtacaagttctgctacgaggtggccctggaatacttgaattctggctgatggtgtaaacagctctgcaaacaatccctttcataccacaaagccaagacgttccatggtatttgtgcaaaagagatgaagacttctcaatatgcttattttgctttgcataattggctctttttaagagcccaagaaagtgtttctaaaattgcttgcactgcccaatcccagtaatgctgctgcctgacagaaacacacacacagccacagttgccaaatcccgtactccttgccaccggctttctagagcagcgtagacagctggtaaactgaagagcacaactatattcttatgaaggaatttgtacctttggggtattattttgtggcccgtgaccctcgttattgttacagctgagtgtatgtttttgttctgtggagaatgctatctggcattatggtaatatattattttaggtaatatttgtactttaacatgttgcataatatatgcttatgtagctttccaggactaacagataaatgtgtaatgaacaaagatatgttgtatgagtcgtcgtttctgtcagatttgtattgtttccaagggaaaagcttgggggaggactcagttcacaaaatgcaaaactcaacgatcagattcacggacccagagcttttccatgtgtttatattgtaaatatttttgatttcatcaaattatttattcattaaaagaaatttttgtgaaaaaaaaaaaaaa

SEQ ID NO: 13346 - DNA, 2028 bp, Homo sapiens
gccgtcgctccagacaatcggaatcctgccttcaccaccatgggctggctttttctaaaggttttgttggcgggagtgagtttctcaggatttctttatcctcttgtggatttttgcatcagtgggaaaacaagaggacagaagccaaactttgtgattattttggccgatgacatggggtggggtgacctgggagcaaactgggcagaaacaaaggacactgccaaccttgataagatggcttcggagggaatgaggtttgtggatttccatgcagctgcctccacctgctcaccctcccgggcttccttgctcaccggccggcttggccttcgcaatggagtcacacgcaactttgcagtcacttctgtgggaggccttccgctcaacgagaccaccttggcagaggtgctgcagcaggcgggttacgtcactgggataataggcaaatggcatcttggacaccacggctcttatcaccccaacttccgtggttttgattactactttggaatcccatatagccatgatatgggctgtactgatactccaggctacaaccaccctccttgtccagcgtgtccacagggtgatggaccatcaaggaaccttcaaagagactgttacactgacgtggccctccctctttatgaaaacctcaacattgtggagcagccggtgaacttgagcagccttgcccagaagtatgctgagaaagcaacccagttcatccagcgtgcaagcaccagcgggaggcccttcctgctctatgtggctctggcccacatgcacgtgcccttacctgtgactcagctaccagcagcgccacggggcagaagcctgtatggtgcagggctctgggagatggacagtctggtgggccagatcaaggacaaagttgaccacacagtgaaggaaaacacattcctctggtttacaggagacaatggcccgtgggctcagaagtgtgagctagcgggcagtgtgggtcccttcactggattttggcaaactcgtcaagggggaagtccagccaagcagacgacctgggaaggagggcaccgggtcccagcactggcttactggcctggcagagttccagttaatgtcaccagcactgccttgttaagcgtgctggacatttttccaactgtggtagccctggcccaggccagcttacctcaaggacggcgctttgatggtgtggacgtctccgaggtgctctttggccggtcacagcctgggcacagggtgctgttccaccccaacagcggggcagctggagagtttggagccctgcagactgtccgcctggagcgttacaaggccttctacattaccggtggagccagggcgtgtgatgggagcacggggcctgagctgcagcataagtttcctctgattttcaacctggaagacgataccgcagaagctgtgcccctagaaagaggtggtgcggagtaccaggctgtgctgcccgaggtcagaaaggttcttgcagacgtcctccaagacattgccaacgacaacatctccagcgcagattacactcaggacccttcagtaactccctgctgtaatccctaccaaattgcctgccgctgtcaagccgcataacagaccaatttttattccacgaggaggagtacctggaaattaggcaagtttgcttccaaatttcatttttaccctctttacaaacacacgctttagtttagtcttggagtttagttttggagttagccttgcatatcccttctgtatcctgtccctcctccacgccgacccgagagcagctgagctgcgctggctctgggcagggagtgtgccttaatgggaagcacacgggctttggagtcaggcacaggtgccagctccagcttttgaacttgggcaattgtttaacctaacctgcaagttgattttgagggttaaataaaggcatacatgaaaatgcctggcaaattacctgacacagagcagacattcaatacattttagtttccttgtttcaaaaaaaaaaaaaaa

SEQ ID NO: 13347 - DNA, 1935 bp, Homo sapiens
agaccaaggagtggaaagttctccggcagccctgagatctcaagagtgacatttgtgagaccagctaatttgattaaaattctcttggaatcagctttgctagtatcatacctgtgccagatttcatcatgggaaacagctgttacaacatagtagccactctgttgctggtcctcaactttgagaggacaagatcattgcaggatccttgtagtaactgcccagctggtacattctgtgataataacaggaatcagatttgcagtccctgtcctccaaatagtttctccagcgcaggtggacaaaggacctgtgacatatgcaggcagtgtaaaggtgttttcaggaccaggaaggagtgttcctccaccagcaatgcagagtgtgactgcactccagggtttcactgcctgggggcaggatgcagcatgtgtgaacaggattgtaaacaaggtcaagaactgacaaaaaaaggttgtaaagactgttgctttgggacatttaacgatcagaaacgtggcatctgtcgaccctggacaaactgttctttggatggaaagtctgtgcttgtgaatgggacgaaggagagggacgtggtctgtggaccatctccagccgacctctctccgggagcatcctctgtgaccccgcctgcccctgcgagagagccaggacactctccgcagatcatctccttctttcttgcgctgacgtcgactgcgttgctcttcctgctgttcttcctcacgctccgtttctctgttgttaaacggggcagaaagaaactcctgtatatattcaaacaaccatttatgagaccagtacaaactactcaagaggaagatggctgtagctgccgatttccagaagaagaagaaggaggatgtgaactgtgaaatggaagtcaatagggctgttgggactttcttgaaaagaagcaaggaaatatgagtcatccgctatcacagctttcaaaagcaagaacaccatcctacataatacccaggattcccccaacacacgttcttttctaaatgccaatgagttggcctttaaaaatgcaccactttttttttttttttgacagggtctcactctgtcacccaggctggagtgcagtggcaccaccatggctctctgcagccttgacctctgggagctcaagtgatcctcctgcctcagtctcctgagtagctggaactacaaggaagggccaccacacctgactaacttttttgttttttgtttggtaaagatggcatttcaccatgttgtacaggctggtctcaaactcctaggttcactttggcctcccaaagtgctgggattacagacatgaactgccaggcccggccaaaataatgcaccacttttaacagaacagacagatgaggacagagctggtgataaaaaaaaaaaaaaaaaagcattttctagataccacttaacaggtttgagctagtttttttgaaatccaaagaaaattatagtttaaattcaattacatagtccagtggtccaactataattataatcaaaatcaatgcaggtttgttttttggtgctaatatgacatatgacaataagccacgaggtgcagtaagtacccgactaaagtttccgtgggttctgtcatgtaacacgacatgctccaccgtcaggggggagtatgagcagagtgcctgagtttagggtcaaggacaaaaaacctcaggcctggaggaagttttggaaagagttcaagtgtctgtatatcctatggtcttctccatcctcacaccttctgcctttgtcctgctcccttttaagccaggttacattctaaaaattcttaacttttaacataatattttataccaaagccaataaatgaactgcatatgaaaaaaaaaaaaaaaaaaaaaaaaaaaaaaaaaaaaaaaaaaaaaaaaaaaa

SEQ ID NO: 13348 - DNA, 3133 bp, Homo sapiens
ccgctgaggccgcggcgcccgccagcctgtcccgcgccatggccccgcgcgcccggcggcgccgcccgctgttcgcgctgctgctgctctgcgcgctgctcgcccggctgcaggtggctttgcagatcgctcctccatgtaccagtgagaagcattatgagcatctgggacggtgctgtaacaaatgtgaaccaggaaagtacatgtcttctaaatgcactactacctctgacagtgtatgtctgccctgtggcccggatgaatacttggatagctggaatgaagaagataaatgcttgctgcataaagtttgtgatacaggcaaggccctggtggccgtggtcgccggcaacagcacgaccccccggcgctgcgcgtgcacggctgggtaccactggagccaggactgcgagtgctgccgccgcaacaccgagtgcgcgccgggcctgggcgcccagcacccgttgcagctcaacaaggacacagtgtgcaaaccttgccttgcaggctacttctctgatgccttttcctccacggacaaatgcagaccctggaccaactgtaccttccttggaaagagagtagaacatcatgggacagagaaatccgatgcggtttgcagttcttctctgccagctagaaaaccaccaaatgaaccccatgtttacttgcccggtttaataattctgcttctcttcgcgtctgtggccctggtggctgccatcatctttggcgtttgctataggaaaaaagggaaagcactcacagctaatttgtggcactggatcaatgaggcttgtggccgcctaagtggagataaggagtcctcaggtgacagttgtgtcagtacacacacggcaaactttggtcagcagggagcatgtgaaggtgtcttactgctgactctggaggagaagacatttccagaagatatgtgctacccagatcaaggtggtgtctgtcagggcacatgtgtaggaggtggtccctacgcacaaggcgaagatgccaggatgctctcattggtcagcaagaccgagatagaggaagacagcttcagacagatgcccacagaagatgaatacatggacaggccctcccagcccacagaccagttactgttcctcactgagcctggaagcaaatccacacctcctttctctgaacccctggaggtgggggagaatgacagtttaagccagtgcttcacggggacacagagcacagtgggttcagaaagctgcaactgcactgagcccctgtgcaggactgattggactcccatgtcctctgaaaactacttgcaaaaagaggtggacagtggccattgcccgcactgggcagccagccccagccccaactgggcagatgtctgcacaggctgccggaaccctcctggggaggactgtgaacccctcgtgggttccccaaaacgtggacccttgccccagtgcgcctatggcatgggccttccccctgaagaagaagccagcaggacggaggccagagaccagcccgaggatggggctgatgggaggctcccaagctcagcgagggcaggtgccgggtctggaagctcccctggtggccagtcccctgcatctggaaatgtgactggaaacagtaactccacgttcatctccagcgggcaggtgatgaacttcaagggcgacatcatcgtggtctacgtcagccagacctcgcaggagggcgcggcggcggctgcggagcccatgggccgcccggtgcaggaggagaccctggcgcgccgagactccttcgcggggaacggcccgcgcttcccggacccgtgcggcggccccgaggggctgcgggagccggagaaggcctcgaggccggtgcaggagcaaggcggggccaaggcttgagcgccccccatggctgggagcccgaagctcggagccagggctcgcgagggcagcaccgcagcctctgccccagccccggccacccagggatcgatcggtacagtcgaggaagaccacccggcattctctgcccactttgccttccaggaaatgggcttttcaggaagtgaattgatgaggactgtccccatgcccacggatgctcagcagcccgccgcactggggcagatgtctcccctgccactcctcaaactcgcagcagtaatttgtggcactatgacagctatttttatgactatcctgttctgtgggggggggggtctgttttccccccatatttgtattccttttcataacttttcttgatatctttcctccctcttttttaatgtaaaggttttctcaaaaattctcctaaaggtgagggtctctttcttttctcttttccttttttttttctttttttggcaacctggctctggcccaggctagagtgcagtggtgcgattatagcccggtgcagcctctaactcctgggctcaagcaatccaagtgatcctcccacctcaaccttcggagtagctgggatcacagctgcaggccacgcccagcttcctccccccgactccccccccagagacacggtcccaccatgttacccagcctggtctcaaactccccagctaaagcagtcctccagcctcggcctcccaaagtactgggattacaggcgtgagcccccacgctggcctgctttacgtattttcttttgtgcccctgctcacagtgttttagagatggctttcccagtgtgtgttcattgtaaacacttttgggaaagggctaaacatgtgaggcctggagatagttgctaagttgctaggaacatgtggtgggactttcatattctgaaaaatgttctatattctcatttttctaaaagaaagaaaaaaggaaacccgatttatttctcctgaatctttttaagtttgtgtcgttccttaagcagaactaagctcagtatgtgaccttacccgctaggtggttaatttatccatgctggcagaggcactcaggtacttggtaagcaaatttctaaaactccaagttgctgcagcttggcattcttcttattctagaggtctctctggaaaagatggagaaaatgaacaggacatggggctcctggaaagaaagggcccgggaagttcaaggaagaataaagttgaaattttaaaaaaaaa

SEQ ID NO: 13349 - DNA, 1829 bp, Homo sapiens
ggggtgggtggggccaggaggaagatggcggcgtccgcagctgccgctgagctccaggcttctgggggtccgcggcacccagtgtgtctgttggtgttgggaatggcgggatccgggaaaaccacttttgtacagaggctcacaggacacctgcatgcccaaggcactccaccgtatgtgatcaacctggatccagcagtacatgaagttccctttcctgccaatattgatattcgtgatactgtaaagtataaagaagtaatgaaacaatatggacttggacccaatggcggcatagtgacctcactcaatctctttgctaccagatttgatcaggtgatgaaatttattgagaaggcccagaacatgtccaaatatgtgttgattgacacacctggacagattgaggtattcacctggtcagcttctgggacaattatcactgaagcccttgcatcctcatttccaacagttgtcatctatgtaatggacacatcgagaagtaccaacccagtgaccttcatgtccaacatgctctatgcctgcagcatcttatacaaaaccaagctgcctttcattgtggtcatgaataaaactgacatcattgaccacagctttgcagtggaatggatgcaggattttgaggctttccaagatgccttgaatcaagagactacatacgtcagtaacctgactcgttcaatgagcctggtgttagatgagttttacagctcactcagggtggtgggtgtctctgctgttctgggtactggattagatgaactctttgtgcaagttaccagtgctgccgaagaatatgaaagggagtatcgtcctgaatatgaacgtctgaaaaaatcactggccaacgcagagagccaacagcagagagaacaactggaacgccttcgaaaagatatgggttctgtagccttggatgcagggactgccaaagacagcttatctcctgtgctgcacccttctgatttgatcctgactcgaggaaccttggatgaagaggatgaggaagcagacagcgatactgatgacattgaccacagagttacagaggaaagccatgaagagccagcattccagaattttatgcaagaatcgatggcacaatactggaagagaaacaataaataggagactttagcacacttcacttgtttctagaagtccagaattttggacctccatgtgaaagaactgttcttacctctgaactgggggctcccataagggataattttcctcagagtagcaaagtttctcttattagagaaatcttgtgactcagatgaagtcagggatagaagacccttggacctggcaggttaatgctgattattccttggcctttcccttgtatttatgcaaggaaggatatactgagctgatactcttccaagcctacaacttcaagttttatcatttgaactcaagtacttttgctgctgaggaatggaatcaaaagaacgtagtctcctggtaaccacctcagatctctattattaggctagatgtatagcctctactcccccagcttcttgctcttgaccctgcactgtaagttgcccttctattagcagccaaggaaaagggaaacatgagcttatccagaacggtggcagagtctccttggcaatcaaccaacgttgctatgaaatatgcctcacactgtatagctcattataggccgtcaggtttgttgaaaaaagtgggcaagacatgattaatgaatcagaatcctgtttcattggtgacttggataaagactttttaattttaaaaaaaacaaaaaaaaaaaaaaaaaaaaaaaaaaa

SEQ ID NO: 13350 - DNA, 3059 bp, Homo sapiens
tcctctgcgtcccgccccgggagtggctgcgaggctaggcgagccgggaaagggggcgccgcccagccccgagccccgcgccccgtgccccgagcccggagccccctgcccgccgcggcaccatgcgcgccgagccggcgtgaccggctccgcccgcggccgccccgcagctagcccggcgctctcgccggccacacggagcggcgcccgggagctatgagccatgaagccgcccggcagcagctcgcggcagccgcccctggcgggctgcagccttgccggcgcttcctgcggcccccaacgcggccccgccggctcggtgcctgccagcgccccggcccgcacgccgccctgccgcctgcttctcgtccttctcctgctgcctccgctcgccgcctcgtcccggccccgcgcctggggggctgctgcgcccagcgctccgcattggaatgaaactgcagaaaaaaatttgggagtcctggcagatgaagacaatacattgcaacagaatagcagcagtaatatcagttacagcaatgcaatgcagaaagaaatcacactgccttcaagactcatatattacatcaaccaagactcggaaagcccttatcacgttcttgacacaaaggcaagacaccagcaaaaacataataaggctgtccatctggcccaggcaagcttccagattgaagccttcggctccaaattcattcttgacctcatactgaacaatggtttgttgtcttctgattatgtggagattcactacgaaaatgggaaaccacagtactctaagggtggagagcactgttactaccatggaagcatcagaggcgtcaaagactccaaggtggctctgtcaacctgcaatggacttcatggcatgtttgaagatgataccttcgtgtatatgatagagccactagagctggttcatgatgagaaaagcacaggtcgaccacatataatccagaaaaccttggcaggacagtattctaagcaaatgaagaatctcactatggaaagaggtgaccagtggccctttctctctgaattacagtggttgaaaagaaggaagagagcagtgaatccatcacgtggtatatttgaagaaatgaaatatttggaacttatgattgttaatgatcacaaaacgtataagaagcatcgctcttctcatgcacataccaacaactttgcaaagtccgtggtcaaccttgtggattctatttacaaggagcagctcaacaccagggttgtcctggtggctgtagagacctggactgagaaggatcagattgacatcaccaccaaccctgtgcagatgctccatgagttctcaaaataccggcagcgcattaagcagcatgctgatgctgtgcacctcatctcgcgggtgacatttcactataagagaagcagtctgagttactttggaggtgtctgttctcgcacaagaggagttggtgtgaatgagtatggtcttccaatggcagtggcacaagtattatcgcagagcctggctcaaaaccttggaatccaatgggaaccttctagcagaaagccaaaatgtgactgcacagaatcctggggtggctgcatcatggaggaaacaggggtgtcccattctcgaaaattttcaaagtgcagcattttggagtatagagactttttacagagaggaggtggagcctgccttttcaacaggccaacaaagctatttgagcccacggaatgtggaaatggatacgtggaagctggggaggagtgtgattgtggttttcatgtggaatgctatggattatgctgtaagaaatgttccctctccaacggggctcactgcagcgacgggccctgctgtaacaatacctcatgtctttttcagccacgagggtatgaatgccgggatgctgtgaacgagtgtgatattactgaatattgtactggagactctggtcagtgcccaccaaatcttcataagcaagacggatatgcatgcaatcaaaatcagggccgctgctacaatggcgagtgcaagaccagagacaaccagtgtcagtacatctggggaacaaaggctgcagggtctgacaagttctgctatgaaaagctgaatacagaaggcactgagaagggaaactgcgggaaggatggagaccggtggattcagtgcagcaaacatgatgtgttctgtggattcttactctgtaccaatcttactcgagctccacgtattggtcaacttcagggtgagatcattccaacttccttctaccatcaaggccgggtgattgactgcagtggtgcccatgtagttttagatgatgatacggatgtgggctatgtagaagatggaacgccatgtggcccgtctatgatgtgtttagatcggaagtgcctacaaattcaagccctaaatatgagcagctgtccactcgattccaagggtaaagtctgttcgggccatggggtgtgtagtaatgaagccacctgcatttgtgatttcacctgggcagggacagattgcagtatccgggatccagttaggaaccttcacccccccaaggatgaaggacccaagggtcctagtgccaccaatctcataataggctccatcgctggtgccatcctggtagcagctattgtccttgggggcacaggctggggatttaaaaatgtcaagaagagaaggttcgatcctactcagcaaggccccatctgaatcagctgcgctggatggacaccgccttgcactgttggattctgggtatgacatactcgcagcagtgttactggaactattaagtttgtaaacaaaacctttgggtggtaatgactacggagctaaagttggggtgacaaggatggggtaaaagaaaactgtctcttttggaaataatgtcaaagaacacctttcaccacctgtcagtaaacgggggagggggcaaaagaccatgctataaaaagaactgttccagaatcttttttttccctaatggacgaaggaacaacacacacacaaaaattaaatgcaataaaggaatcattaaaaaaaaaaa

SEQ ID NO: 13351 - DNA, 1456 bp, Homo sapiens
atgcacttgagcagggaagaaatccacaaggactcaccagtctcctggtctgcagagaagacagaatcaacatgagcacagcaggaaaagtaatcaaatgcaaagcagctgtgctatgggagttaaagaaacccttttccattgaggaggtggaggttgcacctcctaaggcccatgaagttcgtattaagatggtggctgtaggaatctgtggcacagatgaccacgtggttagtggtaccatggtgaccccacttcctgtgattttaggccatgaggcagccggcatcgtggagagtgttggagaaggggtgactacagtcaaaccaggtgataaagtcatcccactcgctattcctcagtgtggaaaatgcagaatttgtaaaaacccggagagcaactactgcttgaaaaacgatgtaagcaatcctcaggggaccctgcaggatggcaccagcaggttcacctgcaggaggaagcccatccaccacttccttggcatcagcaccttctcacagtacacagtggtggatgaaaatgcagtagccaaaattgatgcagcctcgcctctagagaaagtctgtctcattggctgtggattttcaactggttatgggtctgcagtcaatgttgccaaggtcaccccaggctctacctgtgctgtgtttggcctgggaggggtcggcctatctgctattatgggctgtaaagcagctggggcagccagaatcattgcggtggacatcaacaaggacaaatttgcaaaggccaaagagttgggtgccactgaatgcatcaaccctcaagactacaagaaacccatccaggaggtgctaaaggaaatgactgatggaggtgtggatttttcatttgaagtcatcggtcggcttgacaccatgatggcttccctgttatgttgtcatgaggcatgtggcacaagtgtcatcgtaggggtacctcctgattcccaaaacctctcaatgaaccctatgctgctactgactggacgtacctggaagggagctattcttggtggctttaaaagtaaagaatgtgtcccaaaacttgtggctgattttatggctaagaagttttcattggatgcattaataacccatgttttaccttttgaaaaaataaatgaaggatttgacctgcttcactctgggaaaagtatccgtaccattctgatgttttgagacaatacagatgttttcccttgtggcagtcttcagcctcctctaccctacatgatctggagcaacagctgggaaatatcattaattctgctcatcacagattttatcaataaattacatttgggggctttccaaagaaatggaaattgatgtaaaattatttttcaagcaaatgtttaaaatccaaatgagaactaaataaagtgttgaacatcagctggggaattgaagccaataaaccttccttcttaaccatt

SEQ ID NO: 13352 - DNA, 2583 bp, Homo sapiens
cgctcttgcgggagcgttccgcatcgccccgggggcccctacgcgaggatctccggggccgttggcagcgcctggcacttctgagctcggcggacgagagcctgcaggtttcctccagtcagggacggcgaagggcggaaagcgcaggaggaggcagtgttaggccttaggccgggtgggccgggtcaggagagacgcgcccatctttcgccatccggggtgcgcgaggtcctctcgggacccggccggcgacccgtagctcgggcacgcgcctgtcgcatcccgcaggaaggaggggtccggcctgaggcccggggcggcgtccgccatggagatcccctcggtccagggccggcgcctgggacctggcgggcggccctgaccgccttcctccctgcgcgggctgggtcgcggacgtgcccttcgcggcactcggcctcctctgcgtctccgccttccctgggccgcactgctgcctgggcgcggcggcggcgacggcgccctgttgaatgggctgtgagggcccaggtttaaagcgctggcgaacgcggcctccgggggcgcacggcagctgcagcggtggcgaccaaacgggtgttggagttggcggcggccatggagggcctggctggctatgtatacaaggcggccagcgagggcaaggtgctgactctggccgccttgcttctcaaccggtctgaaagcgacatccgctatctgcttggctatgtcagccagcagggagggcagcgctccacgcccctcatcatcgcagcccgcaatggacacgcaaaggtggtacgcttgctcttagaacattaccgggtgcagactcagcagactggcaccgtccgcttcgacgggtatgtcattgatggtgccactgctctttggtgtgcagctggagcaggacattttgaagttgttaaacttctagtcagccatggagccaacgtgaaccataccacagtaactaattcaacccccctgcgggcagcatgctttgatggcagactggacattgtgaaatacttggttgaaaataatgccaacatcagcattgccaacaaatatgacaacacctgcctaatgattgcggcatataagggacacactgatgtggtcagataccttttagaacaacgtgctgatcccaatgccaaagcacattgtggagccacagcattgcactttgcagctgaagctgggcacatagatattgtgaaagagctgataaaatggcgtgctgctatagtagtgaatggccatgggatgacgccattgaaagtagctgccgaaagctgtaaagctgatgtcgtagaactgttactctctcatgctgattgcgaccgaagaagtcggattgaagctttggaactcttgggtgcctcctttgcaaatgaccgtgagaactatgacatcataaagacataccactatctatatttagccatgttagagaggttccaagatggtgataacattctcgaaaaagaggttcttccaccaatccatgcttatgggaatagaactgaatgtagaaatcctcaggaactggagtccattcggcaagacagagatgctcttcatatggaaggccttatagttcgggaacggattttaggtgctgacaatattgatgtttctcatcccatcatttacagaggagctgtttatgcggataatatggaatttgagcagtgtatcaagttgtggcttcatgccctgcacctcagacaaaaaggtaacaggaacacccacaaggatcttcttcgatttgctcaagttttctcacaaatgatacatttgaatgaaactgtgaaggccccagacatagaatgtgttttgagatgcagtgttttggaaatagaacaaagtatgaacagagtgaaaaatatttcagatgctgatgtccacaatgctatggacaattatgaatgtaatctctatacctttctgtatttagtgtgcatctctaccaaaacacagtgcagcgaagaagatcagtgcaaaattaacaagcagatctacaacctgattcaccttgatcccagaactcgtgaaggtttcaccttgctgcatctggctgtcaactccaatactccagttgatgatttccacaccaatgacgtctgcagctttccaaatgcacttgtcacaaagctcctgctggactgtggtgctgaggtgaatgccgtggacaatgagggaaacagtgcccttcatattatcgttcagtacaacaggcccatcagtgattttttgaccttgcactccatcatcattagcctagttgaagccggagctcacactgacatgacgaataaacagaataagactccgctagacaaaagtacaactggggtatctgaaatactgcttaaaactcaaatgaagatgagtctcaagtgcctggctgcccgagcagttcgggctaatgacattaactaccaagaccagatccccagaactcttgaagagtttgttggatttcattaagtgactggatatgtaaagtcgtttaatgtggtgctaaaaagtaaaggacttttaatcacaaaaaaaaaaaaaaaaaaaaaaaaa

SEQ ID NO: 13353 - DNA, 1698 bp, Homo sapiens
ggggatagcgatggagacgccgggcgcatcagcgtcgtccttgttgcttcccgccgcgtccaggcccccgaggaagcgcgaggcgggagaggctggggctgcgacgagcaagcagcgggtcctggacgaggaagagtatatcgagggcctccagacggtcatccaaagggatttctttcctgatgtggagaagctccaggcacagaaggagtacctggaagccgaggagaatggagacttggaacggatgcgccagattgccatcaagtttggctctgccttgggcaagatgtcccgggagcccccgccaccctatgtgactccagccacatttgaaacccctgaggtgcatgcaggcactggagtggtgggcaacaagcccaggccccgcggccgaggcctggaggatggagaggctggagaggaggaggagaaggagccgctgcccagcctagatgtcttcctgagccgctacacgagtgaggacaatgcctccttccaggagatcatggaggtggccaaggagagaagccgggcacgccacgcttggctctaccaggctgaggaagagtttgagaagaggcagaaagataatctcgaactcccgtcagcagagcaccaggccatcgagagcagccaggccagtgtggagacctggaagtacaaggccaagaattccctcatgtactatccagagggtgtccctgacgaggagcagctgtttaagaagccccggcaggtggtacataagaacacgcgcttccttagggaccccttcagccaagccctgagcaggtgccagctccagcaggcagccgccctcaatgcccagcacaaacagggcaaggtgggccccgatggcaaggagctgatcccccaggagtcccctcgagtgggtggatttggatttgttgccactccttcccctgcccctggtgtgaacgagtccccgatgatgacctggggggaggttgagaacacacccttgagagttgaagggtcggaaacgccctacgtggacaggacacccggcccagcttttaagatcctggagccaggccgcagggagcggctgggtctgaagatggccaacgaggccgctgccaagaaccgggccaagaagcaggaagccttgcggagagtgacggagaatctggccagcctcacccccaaaggcctgagcccagccatgtcgccagccctacagcgccttgtgagcaggacggccagcaagtacacagaccgggccctgcgggccagctacacaccatccccagcacgctccacccacctcaagaccccggccagtgggctgcagacccccacaagcacaccggcgcctggctctgccacacgcacccctctcacacaggacccggcctccatcacggacaacctgctgcagctccctgcccggcgcaaagcttcggacttcttttagagccaggcctgggctgggctcatagacgcttcacagagcctgcagggcagctgtacacccagcagaggactccagccttctcggggcccaggcctgggccagaagctgttgaccataccaggagtcactggagaaaggggctgtgctggggccagactggcacaaggcactcgtgcccacaccacaccccagggccttgccaagctgtttgctgtttaattggccccttgaactgtcattaaagaacacctaggtac

SEQ ID NO: 13354 - DNA, 2850 bp, Homo sapiens
actgctctcccatcccagtccctggaaatccacccacttggcccagctcaccccaactccaacccactgggacccagtctccaggggcctgactgtgggcggcagccactcctgagtgagcaaaggttcctccgcggtgctctcccgtccagagccctgctgatggggaagtccgaaggcccagtggggatggtggagagcgccggccgtgcagggcagaagcgcccggggttcctggagggggggctgctgctgctgctgctgctggtgaccgctgccctggtggccttgggtgtcctctacgccgaccgcagagggaagcagctgccacgccttgctagccggctgtgcttcttacaggaggagaggacctttgtaaaacgaaaaccccgagggatcccagaggcccaagaggtgagcgaggtctgcaccacccctggctgcgtgatagcagccgccaggatcctccagaacatggacccgaccacggaaccgtgtgacgacttctaccagtttgcatgcggaggctggctgcggcgccacgtgatccctgagaccaactcaagatacagcatctttgacgtcctccgcgacgagctggaggtcatcctcaaagcggtgctggagaattcgactgccaaggaccggccggctgtggagaaggccaggacgctgtaccgctcctgcatgaaccagagtgtgatagagaagcgaggctctcagcccctgctggacatcttggaggtggtgggaggctggccggtggcgatggacaggtggaacgagaccgtaggactcgagtgggagctggagcggcagctggcgctgatgaactcacagttcaacaggcgcgtcctcatcgacctcttcatctggaacgacgaccagaactccagccggcacatcatctacatagaccagcccaccttgggcatgccctcccgagagtactacttcaacggcggcagcaaccggaaggtgcgggaagcctacctgcagttcatggtgtcagtggccacgttgctgcgggaggatgcaaacctgcccagggacagctgcctggtgcaggaggacatggtgcaggttctggagctggagacacagctggccaaggccacggtaccccaggaggagagacacgacgtcatcgccttgtaccaccggatgggactggaggagctgcaaagccagtttggcctgaagggatttaactggactctgttcatacaaactgtgctatcctctgtcaaaatcaagctgctgccagatgaggaagtggtggtctatggcatcccctacctgcagaaccttgaaaacatcatcgacacctactcagccaggaccatacagaactacctggtctggcgcctggtgctggaccgcattggtagcctaagccagagattcaaggacacacgagtgaactaccgcaaggcgctgtttggcacaatggtggaggaggtgcgctggcgtgaatgtgtgggctacgtcaacagcaacatggagaacgccgtgggctccctctacgtcagggaggcgttccctggagacagcaagagcatggtcagagaactcattgacaaggtgcggacagtgtttgtggagacgctggacgagctgggctggatggacgaggagtccaagaagaaggcgcaggagaaggccatgagcatccgggagcagatcgggcaccctgactacatcctggaggagatgaacaggcgcctggacgaggagtactccaatctgaacttctcagaggacctgtactttgagaacagtctgcagaacctcaaggtgggcgcccagcggagcctcaggaagcttcgggaaaaggtggacccaaatctctggatcatcggggcggcggtggtcaatgcgttctactccccaaaccgaaaccagattgtattccctgccgggatcctccagccccccttcttcagcaaggagcagccacaggccttgaactttggaggcattgggatggtgatcgggcacgagatcacgcacggctttgacgacaatggccggaacttcgacaagaatggcaacatgatggattggtggagtaacttctccacccagcacttccgggagcagtcagagtgcatgatctaccagtacggcaactactcctgggacctggcagacgaacagaacgtgaacggattcaacacccttggggaaaacattgctgacaacggaggggtgcggcaagcctataaggcctacctcaagtggatggcagagggtggcaaggaccagcagctgcccggcctggatctcacccatgagcagctcttcttcatcaactatgcccaggtgtggtgcgggtcctaccggcccgagttcgccatccaatccatcaagacagacgtccacagtcccctgaagtacagggtactggggtcgctgcagaacctggccgccttcgcagacacgttccactgtgcccggggcacccccatgcaccccaaggagcgatgccgcgtgtggtagccaaggccctgccgcgctgtgcggcccacgcccacccgctgctcggaggcatctgtgcgaaggtgcagctagcggcgacccagtgtacgtcccgccccggccaaccatgccaagcctgcctgccaggcctctgcgcctggcctagggtgcagccacctgcctgacacccagggatgagcagtgtccagtgcagtacctggaccggagccccctccacagacacccgcggggctcagtgcccccgtcacagctctgtagagacaatcaactgtgtcctgcccaccctccaaggtgcattgtcttccagtatctacagcttcagacttgagctaagtaaatgcttcaaag

SEQ ID NO: 13355 - DNA, 2195 bp, Homo sapiens
gggtggcgccaaggaaggaggagaaaaggcggccgagaaaaggaggagggcaaggggaagaggaagggcgagggaggagcctgaggagactcgcccggctcaaccccgacgtccgcgccccggccgcctgttggccatggcgggcctgggcctgggctccgccgttcccgtgtggctggccgaggacgacctcggctgcatcatctgccaggggctgctggactggcccgccacgctgccctgcggccacagcttctgccgccactgcctggaggccctgtggggcgcccgcgacgcccgccgctgggcctgccccacttgccgccagggcgccgcgcagcagccgcacctgcggaagaacacgctactgcaggacctggccgacaagtaccgccgcgccgcacgcgagatacaggcgggctccgaccctgcccactgcccctgcccgggctccagttccctctccagcgcggccgcgaggccccggcgccgcccggaactgcagcgggtggcagtagagaagagcatcacagaagttgctcaggagctgacagagctggtggaacatcttgtagacattgtcagaagcctgcagaatcagaggcccctatcagaatctggaccagacaacgaactgagcatcctgggcaaggctttttcttctggggtggatctttccatggcttctccaaagctggtgacttccgacacagctgcagggaaaatcagagatattctccatgacctagaagaaattcaggaaaaattacaagaaagcgtcacctggaaagaggctcctgaagcacaaatgcagggagaactcctggaagccccgtcttcctcctcatgcccattgcctgaccagagccaccctgcactcaggagagcttctcggtttgctcagtgggccatccatccaacctttaacttgaagagcctttcctgcagcctggaggtgtccaaggattcccgtacagtgactgtgtctcaccgcccacaaccctatcgctggagctgtgagaggttttctaccagccaggtcttatgttcccaggccctgtcttctggaaagcattactgggaagtggacactaggaattgcagccactgggcagttggggtggcttcctgggagatgagccgcgaccaggtcctgggaaggactatggactcttgttgtgtggaatggaaggggactagccagctctctgcatggcacatggtcaaggaaactgtccttggctcagacagacctggggtggtgggcatctggctgaaccttgaggagggaaagcttgccttctattcagtggacaatcaggagaagcttctgtatgagtgtaccatctctgcctcctctcctttgtaccctgccttctggctgtatggcttacatcctggaaattacctgataataaagcaagtaaaggtgtaaggtttcctaagggattacaacacagtggtttcctggtctctctccctgtcatcaatcagggtagtaacttgacttaagaataccactttttagaaaaattacgatagagatgggatctcactaggttgcccaggctggtgtcgaattcctggtctcaagcagtcctcccacctcagcctcccaaggtgctgggattacaggtgtgagccaccacacctggccaagaataccacttttgaagttaatccttttgtgtgatacaggatgaacttgggatgtttgaaccctggacattccaaataaagaataggcccctgcctggctcctgggagataacctctaagccattagaatatcttgcctgataagagtgtttttgtttacctgtgggccttgggccatgcagtatcagcttgaccttgcaaggtcaagctgaggagactaagttagccatgtgggcagtgaagcatgccaatgtgatcaatccctagtaaaagccctggacacctaggcatgggtgagctactctggttggtaatactctgtgcacacatcattgtagccacacatcattgctgggagaattaagcattatcctgaagactctgccaggagaggataattggaagttctcttggaccttaccttatgtgcctttcttcattgctgattttaatctgtatcctttcactgtaataaactgtaactatgagtgcaaaaaaaaaaaaaaaaaaaaaaaaaaaaaaaaaaaaaaaaaaaa

SEQ ID NO: 13356 - DNA, 1810 bp, Homo sapiens
gggaggctgtagcggccgaccggacgcagggggctggcgggaacgtgaagctccgcggtgcctgatggggccgttgggcggccggtagctgttgctgttgggggaccccctcattcctgccgctgccgtccctgctgcctcatggcggccatcggagttcacctgggctgcacctcagcctgtgtggccgtctataaggatggccgggctggtgtggttgcaaatgatgccggtgaccgagttactccagctgttgttgcttactcagaaaatgaagagattgttggattggcagcaaaacaaagtagaataagaaatatttcaaatacagtaatgaaagtaaagcagatcctgggcagaagctccagtgatccacaagctcagaaatacatcgcggaaagtaaatgtttagtcattgaaaaaaatgggaaattacgatatgaaatagatactggagaagaaacaaaatttgttaacccagaagatgttgccagactgatatttagtaaaatgaaagaaacggcacattctgtattgggctcagatgcaaatgatgtagttattactgtcccgtttgattttggagaaaagcaaaaaaatgctcttggagaagcagctagagctgctggatttaatgttttgcgattaattcacgaaccgtctgcagctcttcttgcttatggaattggacaagactcccctactggaaaaagcaatattttggtgtttaagcttggaggaacatccttatctctcagcgtcatggaagttaacagtggaatatatcgggttctttcaacaaacactgatgataacatcggtggtgcacatttcacagaaaccttagcacagtatctagcttctgagttccaaagatccttcaaacatgatgtgagaggaaatgcgcgagccatgatgaaattaacgaacagtgctgaagtagcgaaacattctttgtcaaccttgggaagtgccaactgttttcttgactcattatatgaaggtcaagattttgattgcaatgtgtccagagcaagatttgaacttctttgttctccactttttaataagtgtatagaagcaatcagaggactcttagatcaaaatggatttacagcagatgatatcaacaaggttgtcctttgtggagggtcttctcgaatcccaaagctacagcaactgattaaagatcttttcccagctgttgagcttctcaattctatccctcctgatgaagtgatccctattggtgcagctatagaagcaggaattcttattgggaaagaaaacctgttggtggaagactctcttatgatagagtgttcagccagagatattttagttaagggtgtggacgaatcaggagccagtagattcacagtgctgtttccatcagggactcctttgccagctcgaagacaacacacattgcaagcccctggaagcatatcttcagtgtgccttgaactctatgagtctgatgggaagaactctgccaaagaggaaaccaagtttgcacaggttgtactccaggatttagataaaaaagaaaatggattacgtgatatattagctgttcttactatgaaaagggatggatctttacatgtgacatgcacagatcaagaaactggaaaatgtgaagcaatctctattgagatagcatcttagtgttttagagaaatcaagaatttttaaaaacaagaatatcaacatttggttttgtgtataagtggtgtttgtattaaaatactttttcaatgaactgtataaactatgttttattaaactacaatatatcagtaaaaaa

SEQ ID NO: 13357 - DNA, 2082 bp, Homo sapiens
gacaggtctgtgaagcaggcaggttgctcagctgcccccggagcggttcctccacctgaggcagactccacgtcggctggcatgagccggcgcccctgcagctgcgccctacggccaccccgctgctcctgcagcgccagccccagcgcagtgacagccgccgggcgccctcgaccctcggatagttgtaaagaagaaagttctaccctttctgtcaaaatgaagtgtgattttaattgtaaccatgttcattccggacttaaactggtaaaacctgatgacattggaagactagtttcctacacccctgcatatttggaaggttcctgtaaagactgcattaaagactatgaaaggctgtcatgtattgggtcaccgattgtgagccctaggattgtacaacttgaaactgaaagcaagcgcttgcataacaaggaaaatcaacatgtgcaacagacacttaatagtacaaatgaaatagaagcactagagaccagtagactttatgaagacagtggctattcctcattttctctacaaagtggcctcagtgaacatgaagaaggtagcctcctggaggagaatttcggtgacagtctacaatcctgcctgctacaaatacaaagcccagaccaatatcccaacaaaaacttgctgccagttcttcattttgaaaaagtggtttgttcaacattaaaaaagaatgcaaaacgaaatcctaaagtagatcgggagatgctgaaggaaattatagccagaggaaattttagactgcagaatataattggcagaaaaatgggcctagaatgtgtagatattctcagcgaactctttcgaaggggactcagacatgtcttagcaactattttagcacaactcagtgacatggacttaatcaatgtgtctaaagtgagcacaacttggaagaagatcctagaagatgataagggggcattccagttgtacagtaaagcaatacaaagagttaccgaaaacaacaataaattttcacctcatgcttcaaccagagaatatgttatgttcagaaccccactggcttctgttcagaaatcagcagcccagacttctctcaaaaaagatgctcaaaccaagttatccaatcaaggtgatcagaaaggttctacttatagtcgacacaatgaattctctgaggttgccaagacattgaaaaagaacgaaagcctcaaagcctgtattcgctgtaattcacctgcaaaatatgattgctatttacaacgggcaacctgcaaacgagaaggctgtggatttgattattgtacgaagtgtctctgtaattatcatactactaaagactgttcagatggcaagctcctcaaagccagttgtaaaataggtcccctgcctggtacaaagaaaagcaaaaagaatttacgaagattgtgatctcttattaaatcaattgttactgatcatgaatgttagttagaaaatgttaggttttaacttaaaaaaaattgtattgtgattttcaattttatgttgaaatcggtgtagtatcctgaggtttttttccccccagaagataaagaggatagacaacctcttaaaatatttttacaatttaatgagaaaaagtttaaaattctcaatacaaatcaaacaatttaaatattttaagaaaaaaggaaaagtagatagtgatactgagggtaaaaaaaaaattgattcaattttatggtaaaggaaacccatgcaattttacctagacagtcttaaatatgtctggttttccatctgttagcatttcagacattttatgttcctcttactcaattgataccaacagaaatatcaacttctggagtctattaaatgtgttgtcacctttctaaagctttttttcattgtgtgtatttcccaagaaagtatcctttgtaaaaacttgcttgttttccttatttctgaaatctgttttaatatttttgtatacatgtaaatatttctgtattttttatatgtcaaagaatatgtctcttgtatgtacatataaaaataaattttgctcaataaaattgtaagcttaaaaaaaaaaaaaaaaaa

SEQ ID NO: 13358 - DNA, 2012 bp, Homo sapiens
cggggctgctcagtcctccaggcgtcggtactcagcggtgttggaacttcgttgcttgcttgcctgtgcgcgcgtgcgcggacatggcctcaaacgattatacccaacaagcaacccaaagctatggggcctaccccacccagcccgggcagggctattcccagcagagcagtcagccctacggacagcagagttacagtggttatagccagtccacggacacttcaggctatggccagagcagctattcttcttatggccagagccagaacacaggctatggaactcagtcaactccccagggatatggctcgactggcggctatggcagtagccagagctcccaatcgtcttacgggcagcagtcctcctaccctggctatggccagcagccagctcccagcagcacctcgggaagttacggtagcagttctcagagcagcagctatgggcagccccagagtgggagctacagccagcagcctagctatggtggacagcagcaaagctatggacagcagcaaagctataatccccctcagggctatggacagcagaaccagtacaacagcagcagtggtggtggaggtggaggtggaggtggaggtaactatggccaagatcaatcctccatgagtagtggtggtggcagtggtggcggttatggcaatcaagaccagagtggtggaggtggcagcggtggctatggacagcaggaccgtggaggccgcggcaggggtggcagtggtggcggcggcggcggcggcggtggtggttacaaccgcagcagtggtggctatgaacccagaggtcgtggaggtggccgtggaggcagaggtggcatgggcggaagtgaccgtggtggcttcaataaatttggtggccctcgggaccaaggatcacgtcatgactccgaacaggataattcagacaacaacaccatctttgtgcaaggcctgggtgagaatgttacaattgagtctgtggctgattacttcaagcagattggtattattaagacaaacaagaaaacgggacagcccatgattaatttgtacacagacagggaaactggcaagctgaagggagaggcaacggtctcttttgatgacccaccttcagctaaagcagctattgactggtttgatggtaaagaattctccggaaatcctatcaaggtctcatttgctactcgccgggcagactttaatcggggtggtggcaatggtcgtggaggccgagggcgaggaggacccatgggccgtggaggctatggaggtggtggcagtggtggtggtggccgaggaggatttcccagtggaggtggtggcggtggaggacagcagcgagctggtgactggaagtgtcctaatcccacctgtgagaatatgaacttctcttggaggaatgaatgcaaccagtgtaaggcccctaaaccagatggcccaggagggggaccaggtggctctcacatggggggtaactacggggatgatcgtcgtggtggcagaggaggctatgatcgaggcggctaccggggccgcggcggggaccgtggaggcttccgagggggccggggtggtggggacagaggtggctttggccctggcaagatggattccaggggtgagcacagacaggatcgcagggagaggccgtattaattagcctggctccccaggttctggaacagctttttgtcctgtacccagtgttaccctcgttattttgtaaccttccaattcctgatcacccaagggtttttttgtgtcggactatgtaattgtaactatacctctggttcccattaaaagtgaccattttagttaaattttgttcctcttcccccttttcactttcctggaagatcgatgtcccgatcaggaaggtagagagttttcctgttcagattaccctgcccagcaggaactggaatacagtgttcggggagaaggccaaatgatatccttgagagcagagattaaacttttctgtcatggggaaaaaaaaaa

SEQ ID NO: 13359 - DNA, 2958 bp, Homo sapiens
aacgcggcctgaattcccggcgccggccccagctcctctgccgctgccgccatgctcgacttcttcaccattttctccaagggcgggcttgtgctctggtgcttccagggcgttagcgactcatgcaccggacccgttaacgcgttgattcgttccgtgctgctgcaggaacggggaggtaacaactccttcacccatgaggcactcacactcaagtataaactggacaaccagtttgagctggtgtttgtggttggttttcagaagatcctgacactgacatatgtagacaaattgatagatgacgtgcatcggctgtttcgggacaagtaccgcacagagatccaacagcaaagtgctttaagtttattaaatggcacttttgatttccaaaatgacttcctgcggctccttcgtgaagcagaggagagcagtaagatccgtgctcccactaccatgaagaaatttgaagattctgaaaaggccaagaaacctgtgaggtccatgattgagacacggggggaaaagcccaaggaaaaagcaaagaatagcaaaaaaaagggggccaagaaggaaggttctgatggtcctttggctaccagcaaaccagtccctgcagaaaagtcaggtcttccagtgggtcctgagaacggagtagaactttccaaagaggagctgatccgcaggaagcgcgaggagttcattcagaagcatgggaggggtatggagaagtccaacaagtccacgaagtcagatgctccaaaggagaagggcaaaaaagcaccccgggtgtgggaactgggtggctgtgctaacaaagaagtgttggattacagtactcccaccaccaatggaacccctgaggctgccttgtctgaggacatcaacctgattcgagggactgggtctggggggcagcttcaggatctggactgcagcagctctgatgacgaaggggctgctcaaaactctaccaaacctagtgcgaccaagggaacactgggtggcatgtttggtatgctgaagggccttgtgggttcaaagagcttgagtcgtgaagacatggaatctgtgctggacaagatgcgtgatcatctcattgctaagaacgtggctgcagacattgccgtccagctctgtgaatctgttgccaacaagttggaagggaaggtgatggggacgttcagcacggtgacttccacagtaaagcaagccctacaggagtccctggtgcagattctgcagccacagcgtcgtgtagacatgctccgggacatcatggatgcccagcgtcgccagcgcccttatgtcgtcaccttctgcggcgttaatggagtggggaaatctactaatcttgccaagatttccttctggttgttagagaatggcttcagtgtcctcattgctgcctgtgatacatttcgtgctggggccgtggagcagctgcgtacacacacccggcgtttgagtgccctacaccctccagagaagcatggtggccgcaccatggtgcagttgtttgaaaagggctatggcaaggatgctgctggcattgccatggaagccattgcttttgcacgtaaccaaggctttgacgtggtgctggtggacacggcaggccgcatgcaagacaatgcccctctgatgactgccctggccaaactcattactgtcaatacacctgatttggtgctgtttgtaggagaagccttagtaggcaatgaagccgtggaccagctggtcaagttcaacagagccttggctgaccattctatggctcagacacctcggctcattgatggcattgttcttaccaaatttgataccattgatgacaaggtgggagctgctatttctatgacgtacatcacaagcaaacccatcgtctttgtgggcaccggccagacctactgtgacctacgcagcctcaatgccaaggctgtggtggctgccctcatgaaggcttaacgtggctcttgcccaataccaaatcgccgctttccccacaagcccttcttcctgtatcaagaatgtgctttagagtatgtgagcaacctgtcttcagtgtagtacaaaggcagagtgagggggcttgtggctccttccaaccccactccccgttcagcacagccgccatttgcaaggaaggcctaatcatgttacaatcactgcccactgaccctctcccagcgggcctcccccttcctactcaggcacccccttcactctgcctacagactcagtcttattacagctttgaccaatggttggaacccaacaccagagctttgctaataattagtgtggtcaagagccgtctgagcctaatgagtcccagctgcattaggttaagagactcttccagagccagcgccaggtcttgaatggcacctctccctaggatacacagcctgcaggtccccaggacctggatgacacccgcctcactgtggcagtgtattgcctgttaattgctgctaattctaattctgatgatgactcctactccattgtttaccccaaagcatcagctaggctggagtgatttgttacaaatgagcaaaagatgagtccttgcttccctcagaaataaaagtagctcagctgcagcgttgcattgggcttcttggcctcccaactcttcccactcccagaatccagaagtaagctctgcatgttccccttcctgggaggaaaccaattgtcagaaggatgtatgatgaccccctcccctcccatccttcacctcctaagcagtcctggcttttcctcatcactcccctctacagtgcctggtagacaagtgctacattgaagaacacaaacctcttgttaagacttgtcctgtagcttgatattacagatgtgctattagtgcaataaggtgaaggctgtctgcccagagaaataagtaatttatataagaaaataaatttcataaataaaaaaaaaaaaaaa

SEQ ID NO: 13360 - DNA, 1829 bp, Homo sapiens
gggattcgggcctgggactgtgtctgtcgcccatggccgccgcgctgctcgcccgggcctcgggccctgcccgcagagctctctgtcctagggcctggcggcagttacacaccatctaccagtctgtggaactgcccgagacacaccagatgttgctccagacatgccgggactttgccgagaaggagttgtttcccattgcagcccaggtggataaggaacatctcttcccagcggctcaggtgaagaagatgggcgggcttgggcttctggccatggacgtgcccgaggagcttggcggtgctggcctcgattacctggcctacgccatcgccatggaggagatcagccgtggctgcgcctccaccggagtcatcatgagtgtcaacaactctctctacctggggcccatcttgaagtttggctccaaggagcagaagcaggcgtgggtcacgcctttcaccagtggtgacaaaattggctgctttgccctcagcgaaccagggaacggcagtgatgcaggagctgcgtccaccaccgcccgggccgagggcgactcatgggttctgaatggaaccaaagcctggatcaccaatgcctgggaggcttcggctgccgtggtctttgccagcacggacagagccctgcaaaacaagggcatcagtgccttcctggtccccatgccaacgcctgggctcacgttggggaagaaagaagacaagctgggcatccggggctcatccacggccaacctcatctttgaggactgtcgcatccccaaggacagcatcctgggggagccagggatgggcttcaagatagccatgcaaaccctggacatgggccgcatcggcatcgcctcccaggccctgggcattgcccagaccgccctcgattgtgctgtgaactacgctgagaatcgcatggccttcggggcgcccctcaccaagctccaggtcatccagttcaagttggcagacatggccctggccctggagagtgcccggctgctgacctggcgcgctgccatgctgaaggataacaagaagcctttcatcaaggaggcagccatggccaagctggccgcctcggaggccgcgaccgccatcagccaccaggccatccagatcctgggcggcatgggctacgtgacagagatgccggcagagcggcactaccgcgacgcccgcatcactgagatctacgagggcaccagcgaaatccagcggctggtgatcgccgggcatctgctcaggagctaccggagctgagcccgcggcggactgccccaggactgcgggaaggcgcgggagccaggggcctccaccccaaccccggctcagagactgggcggcccggcgggggctccctggggaccccagatgggctcagtgctgccacccagatcagatcacatgggaatgaggccctccgaccattggcagctccgcctctgggcctttccgcctcctcaccactgtgcctcaagttcctcatctaagtggccctggctcctgggggcggggttgtgggggggctgagcgacactcagggacacctcagttgtcctcccgcgggccctggtgccctggcatgaaggcccagtgcgacaggcccttggtggggtctgtcttttccttgaggtcagaggtcaggagcagggctggggtcaggatgacgaggcctggggtcctggtgttgggcaggtggtggggctgggccatggagctggcccagaggcccctcagccctttgtaaagtctgatgaaggcaggggtggtgattcatgctgtgtgactgactgtgggtaataaacacacctgtccccc

SEQ ID NO: 13361 - DNA, 1806 bp, Homo sapiens
ccggaaccgccggtgaacttaggcgccacgttcccggtgactgaccccggaggatggtgaacaggaactactgctgaccctgtcttcgccgctgcctctcgggggctgccgagcgcggggcccctgtctcctccccttgcccggctgtgggtgaacctgcaggctccttacccacccggaggacttttttttgaaaggaaacgagggagggagggagagggagagagggagaaaacgaaggggagctcgtccatccattgaagcacagttcactatgatcttactcacattcagcactggaagacggttggatttcgtgcatcattcgggggtgtttttcttgcaaaccttgctttggattttatgtgctacagtctgcggaacggagcagtatttcaatgtggaggtttggttacaaaagtacggctaccttccaccgactgaccccagaatgtcagtgctgcgctctgcagagaccatgcagtctgccctagctgccatgcagcagttctatggcattaacatgacaggaaaagtggacagaaacacaattgactggatgaagaagccccgatgcggtgtacctgaccagacaagaggtagctccaaatttcatattcgtcgaaagcgatatgcattgacaggacagaaatggcagcacaagcacatcacttacagtataaagaacgtaactccaaaagtaggagaccctgagactcgtaaagctattcgccgtgcctttgatgtgtggcagaatgtaactcctctgacatttgaagaagttccctacagtgaattagaaaatggcaaacgtgatgtggatataaccattatttttgcatctggtttccatggggacagctctccctttgatggagagggaggatttttggcacatgcctacttccctggaccaggaattggaggagatacccattttgactcagatgagccatggacactaggaaatcctaatcatgatggaaatgacttatttcttgtagcagtccatgaactgggacatgctctgggattggagcattccaatgaccccactgccatcatggctccattttaccagtacatggaaacagacaacttcaaactacctaatgatgatttacagggcatccagaagatatatggtccacctgacaagattcctccacctacaagacctctaccgacagtgcccccacaccgctctattcctccggctgacccaaggaaaaatgacaggccaaaacctcctcggcctccaaccggcagaccctcctatcccggagccaaacccaacatctgtgatgggaactttaacactctagctattcttcgtcgtgagatgtttgttttcaaggaccagtggttttggcgagtgagaaacaacagggtgatggatggatacccaatgcaaattacttacttctggcggggcttgcctcctagtatcgatgcagtttatgaaaatagcgacgggaattttgtgttctttaaagtgaagggagacactctatctgtaatccaagatggttggctctacaaataccattggaaatggattctagaacaaaggcagtcagtgcctgtgctctcaagacaaactgaaaagcacaagacctatgaagaattatcttccatcacatactaacaaagaacaatcaggaattgaaaatttaaaataaaaggccatttacaattgcattcgaaaacaccaaataccgagggatcaatctgcaaaaaatgtgcatgacctctacattgaaaacaacaaaacactactaaatgtttgtctttaaaggcagctgg

SEQ ID NO: 13362 - DNA, 6337 bp, Homo sapiens
ccggaaccgccggtgaacttaggcgccacgttcccggtgactgaccccggaggatggtgaacaggaactactgctgaccctgtcttcgccgctgcctctcgggggctgccgagcgcggggcccctgtctcctccccttgcccggctgtgggtgaacctgcaggctccttacccacccggaggacttttttttgaaaggaaacgagggagggagggagagggagagagggagaaaacgaaggggagctcgtccatccattgaagcacagttcactatgatcttactcacattcagcactggaagacggttggatttcgtgcatcattcgggggtgtttttcttgcaaaccttgctttggattttatgtgctacagtctgcggaacggagcagtatttcaatgtggaggtttggttacaaaagtacggctaccttccaccgactgaccccagaatgtcagtgctgcgctctgcagagaccatgcagtctgccctagctgccatgcagcagttctatggcattaacatgacaggaaaagtggacagaaacacaattgactggatgaagaagccccgatgcggtgtacctgaccagacaagaggtagctccaaatttcatattcgtcgaaagcgatatgcattgacaggacagaaatggcagcacaagcacatcacttacagtataaagaacgtaactccaaaagtaggagaccctgagactcgtaaagctattcgccgtgcctttgatgtgtggcagaatgtaactcctctgacatttgaagaagttccctacagtgaattagaaaatggcaaacgtgatgtggatataaccattatttttgcatctggtttccatggggacagctctccctttgatggagagggaggatttttggcacatgcctacttccctggaccaggaattggaggagatacccattttgactcagatgagccatggacactaggaaatcctaatcatgatggaaatgacttatttcttgtagcagtccatgaactgggacatgctctgggattggagcattccaatgaccccactgccatcatggctccattttaccagtacatggaaacagacaacttcaaactacctaatgatgatttacagggcatccagaagatatatggtccacctgacaagattcctccacctacaagacctctaccgacagtgcccccacaccgctctattcctccggctgacccaaggaaaaatgacaggccaaaacctcctcggcctccaaccggcagaccctcctatcccggagccaaacccaacatctgtgatgggaactttaacactctagctattcttcgtcgtgagatgtttgttttcaaggaccagtggttttggcgagtgagaaacaacagggtgatggatggatacccaatgcaaattacttacttctggcggggcttgcctcctagtatcgatgcagtttatgaaaatagcgacgggaattttgtgttctttaaaggtaacaaatattgggtgttcaaggatacaactcttcaacctggttaccctcatgacttgataacccttggaagtggaattccccctcatggtattgattcagccatttggtgggaggacgtcgggaaaacctatttcttcaagggagacagatattggagatatagtgaagaaatgaaaacaatggaccctggctatcccaagccaatcacagtctggaaagggatccctgaatctcctcagggagcatttgtacacaaagaaaatggctttacgtatttctacaaaggaaaggagtattggaaattcaacaaccagatactcaaggtagaacctggatatccaagatccatcctcaaggattttatgggctgtgatggaccaacagacagagttaaagaaggacacagcccaccagatgatgtagacattgtcatcaaactggacaacacagccagcactgtgaaagccatagctattgtcattccctgcatcttggccttatgcctccttgtattggtttacactgtgttccagttcaagaggaaaggaacaccccgccacatactgtactgtaaacgctctatgcaagagtgggtgtgatgtagggttttttcttctttctttcttttgcaggagtttgtggtaacttgagattcaagacaagagctgttatgctgtttcctagctaggagcaggcttgtggcagcctgattcggggctgacctttcaaacccagagggttgctggtcctgcacatgagtggaaatacactcatggggaagcttccatgatgcacagtatctgctgttcttcagtcctttgtctttctttgtcattcagttctaggcctttcctctgcacgctcaatgcccagtaaaatttcaggattaactaaagaagaggagaaaaagaagaaaagattcttcttaaaagtttctaatgttattttccttctgaagtctgagcccatttctggggggagaaaaaaaaagcaaatcagaaaacccacggtttttctttttttctttttttctttttttctttttttgctttaaaacaaagggaaaaaagagtttaaacaaaaaacccacaattgaacttccaggaaagtgtgaagacccaaaacagctttgtctccaaagaagatagctctctgactgctttggatagtctcctacgcaccattttgtcaggtgggagatttggaatacacatgcaggacgttagactgttgggacagccattttccaacaaccaaggggccaaaatatctgcaatatagtaacagccttaataatacatccatttttcgttttatacagctgttctcagctatgtcctcagtgtttcatcgcatttatattcatagctattttcaaacacgaccttttaattgtttttgaagtatttctaaaccccttctttccaccttactcctccatcattgtgataatcttcccaagttgtattaggccattgccccaggccttccatgggtctgtcaggaatattcgttacaaagcagagcaagaagcagtatgtctctgaagtggattacagtggcagttattttacaaggatttgtgacactagtaacatacccgtgtaaccctttgagaactatcagaccagctttcagagtcttaggattgtcggtcttgcgatctgataaattatagaactgggcaatggtaaaaacagtcacaagttcaagaagttcaggtttttaaaacagatatcctataatgtcatataatttttaaatgatttacaagactacataaatgtgtttataacaaacagaaatgatgttacttgccaaaatttttctggcaaataaaaaaggtattttattaagattctcataaatctgaaattttatttgaaaaactgataatagcctaagtcttcttttcttttttttaggcatactgaatttctgttttaaaatccattgcatgaaaattcaatttgccttggtatatgcagttagcattgccattttaaaaatgaattaaaacggtgactctgaagttgcatgaatatcctccagtgcattacctattgcatgtccaccatagttctcaaagggttagtgtggcttctggcatttagccgtccatttgatcactgacagagccaagagaccaccaaagcatttcattgttgagtgtaatttgtcctaacagcagtattgtcattttcatgtgacctgcagagcaggtttgtatcaatatttttttcctagagaaaagtcagcaactgacagacctctttattgatttttaggagctgcttcttgcagtgaaaggctttacagccactgggctgtgaacttattagagatggtcagaatgaatgcaccccatgagtcagacattggctttgtgtgaaagccagctttgaggggattagcttttgaaacaatgaacagcttgccttgaacttgattattgatctattgactgtcattaacaacaacttaaacattgtcttctgtgaaaattttccttgaagagtcctgttctatgtctttgccctttgacctttaacttgcaaactggcacaaactgaaggaaatctggtgttgcttctccattggattagttgttctctaaaacctagtaagcatgagctgtttccttagagtggagagagtggtgatggcagatctgcagatggacactttgctctttacatgcacactctgaaaatgccctataggtagaagtgaattttaatttcattttaatataatttcaagtctaaattcatcattttagtacaaattacaaaaactataggaaaaaaaaaacctcaaatacttgaatggccagtgtggcttttatataaagcaggaattttatactagtaaaaatttcttactcatttgctaatacacatttccagatgatttttaatgagtgtaggtatacattcttatttggaaatggatagtttggctgccttgaatttatatttatactcaacgtagcatgaaaattagaatgccttttggttaaactacatgtttatgatttggttggggaaaatattttataattgtgggtggcatgctgcaaagccttgcagattgttatttcttacaacctgagcgtatatagtatgagcctaagaaaaaagaagagtaagaaaagaagaatggctttacagtaaaatatcatacaatgcagacaatattttaagaggatattggagattatgtacgcaagggccaagaaagcaagaaatgagaaccagagtcagccctgtagctttacttcagtgcttccattctagatgatgctgatattataaagagttagtcactgctgctaagcatggaggactatatacataagctcgtttatacagtgtttgcttgtgggagggtttaatccttttagggccttgatgtcaagaaaaaaataactggaaactatattttgctaaagatagaaatgaggaactgtgtcattttgggacatgtgcaaatcattgaggaactccatcaccctgcattgaaaattgatttttttttcctctaaaatgagaaagaaactgaataagcaatctgttgcctctttactcattcatcacaatatcctgattcgtcataaggctatcagtatataagggctagaaaataatcatagcattaagaaggaaggagtctatcattatgcttgaattctggcaaatgtcatgaataagggttgggtcatatttactttaatatgagacaagatttatgtgataagcaaaggcatataaggctgctcttttgaacagaacatttcagttatcaggctgtactattacaagagataagaagacaataaggacaatgtaatcacaaacagtgggattccatttgtttattgtacaccagctactttgtgggtatggttcctgactcctcttctacatgaggtttgggaaaaaagtctcaaaccaaatggaacagtgaaagggaaagtaattcatctagcacataagaatagtgattcaaaaccaatgcagaataaatttccatgggtcaataacataaggtgtcagttcagtgttactagagatatgcaaggcataaaatattttcatcaccccatcactaataacatgaaaagctcagacataggatttcccaaattgaaatgaaaacacattcatgcctgcaaaaataattctccttctgcttcatttctcattactttatctaatataaacacaaatgtaaacaaggtaatggtcttcatgtaaaatgaccatatagttaagaattttagtaaaatattgttgttctgtgtattattaaacaaatgcaatgaagtattaaaatagctgatcagtttgaatttcctgtaaagcagtaattccgcatcagaattgtagataaggttgtgaatttattgactcatttcagaacagtgtctgttgacatggcagtcagagcaggtgaatacagatgctctttctgattgcaaaggttatagagctaaattagacagcattatgtgatactagcaaagacaacttctgttataaatcagagggcaaggcttttctgaatcgatgtgataaattactaagtaatgattaccaaaaataattactaagtaataaaagatacagactggtttactgaaataagcaagtgttacatttaataattacctataatctttttttgttaacacataagcaagtgttacctttaataattacctataatctttttttgttaacacataatttggccatttcatatactgtgtacctattttcattccctctctgtgggtcattaaaaaacacaatgtggtggataaaaaaaaaaaa

SEQ ID NO: 13363 - DNA, 1900 bp, Homo sapiens
ctcctcctccggcgtcgcgggctcctcggacatggccgcggcggtggcggtggcggccgcgtcccggcggcagtcgtgctacctgtgtgacctgccccgcatgccctgggccatgatctgggacttcaccgaacccgtctgccgcggctgcgtcaactacgagggcgccgaccgcgtcgagttcgtcatcgagacggcgcggcagctcaagcgggcgcacggctgcttcccggagggtcgctccccacccggcgccgcggcctcggccgccgccaagccgccgccgctctccgccaaggacatccttttgcagcagcagcagcagcttggccacggcggccccgaggcggccccgcgcgcgccgcaggccttggagcgctacccgttggcggccgcggccgagaggcccccgcgcctcggctctgacttcggcagcagccgcccggcagcgagcctggcccagccgccgacgccgcagccgccgcccgtgaacggcatcctggtgcccaacggcttctccaagctagaggaaccgcccgagctgaatcgccagagcccgaaaccacggcgcggccacacggtgccgcccaccctggtgccgctcatgaacggctcggccacgccgctgcccaccgcgctcggcctcggcggccgcgctgccgcctccttagccgcggtgtccggaaccgcggccgccagcctgggctccgcgcagcccaccgatctgggcgcccacaagcggccggcatccgtgtcgagcagcgctaccgtggagcacgagcagcgtgaggcggcagccaaggagaaacaaccgccgccgcctgcgcaccggggcccggccgacagcctgtccaccgcggccggggccgccgagctgagcgcggaaggtgcgggcaagagccgcgggtctggagagcaggactgggtcaacaggcccaagaccgtgcgcgacacgctgctggcgctgcaccagcacggccactcggggcccttcgagagcaagtttaagaaggagccggccctgactgcaggcaggttgttgggtttcgaggccaacggggccaacgggtctaaagcagttgcaagaacagcaaggaaaaggaagccctctccagaaccagaaggtgaagtcgggccccctaagatcaacggagaggcccagccgtggctgtccacatccacagaggggctcaagatccccatgactcctacatcctcttttgtgtctccgccaccacccactgcctcacctcattccaaccggaccacaccgcctgaagcggcccagaatggccagtcccccatggcagccctgatcttagtagcagacaatgcagggggcagtcatgcctcaaaagatgccaaccaggttcactccactaccaggaggaatagcaacagtccgccctctccgtcctctatgaaccaaagaaggctgggccccagagaggtggggggccagggagcaggcaacacaggaggactggagccagtgcaccctgccagcctcccggactcctctctggcaaccagtgccccgctgtgctgcaccctctgccacgagcggctggaggacacccattttgtgcagtgcccgtccgtcccttcgcacaagttctgcttcccttgctccagacaaagcatcaaacagcagggagctagtggagaggtctattgtcccagtggggaaaaatgccctcttgtgggctccaatgtcccctgggcctttatgcaaggggaaattgcaaccatccttgctggagatgtgaaagtgaaaaaagagagagactcgtgacttttccggtttcagaaaaacccaatgattacccttaattaaaactgcttgaattgtatatatatctccatatatatatatatccaagacaagggaaatgtagac

SEQ ID NO: 13364 - DNA, 1125 bp, Homo sapiens
gggaggggcgcgctggggagcttcggcgcatgcgcgctgaggcctgcctgaccgaccttcagcagggctgtggctaccatgttctctcgcgcgggtgtcgctgggctgtcggcctggaccttgcagccgcaatggattcaagttcgaaatatggcaactttgaaagatatcaccaggagactaaagtccatcaaaaacatccagaaaattaccaagtctatgaaaatggtagcggcagcaaaatatgcccgagctgagagagagctgaaaccagctcgaatatatggattgggatctttagctctgtatgaaaaagctgatatcaaggggcctgaagacaagaagaaacacctccttattggtgtgtcctcagatcgaggactgtgtggtgctattcattcctccattgctaaacagatgaaaagcgaggttgctacactaacagcagctgggaaagaagttatgcttgttggaattggtgacaaaatcagaggcatactttataggactcattctgaccagtttctggtggcattcaaagaagtgggaagaaagccccccacttttggagatgcgtcagtcattgcccttgaattactaaattctggatatgaatttgatgaaggctccatcatctttaataaattcaggtctgtcatctcctataagacagaagaaaagcccatcttttcccttaataccgttgcaagtgctgacagcatgagtatctatgacgatattgatgctgacgtgctgcaaaattaccaagaatacaatctggccaacatcatctactactctctgaaggagtccaccactagtgagcagagtgccaggatgacagccatggacaatgccagcaagaatgcttctgagatgattgacaaattgacattgacattcaaccgtacccgccaagctgtcatcacaaaagagttgattgaaattatctctggtgctgcagctctgtaaagaaggaaaattcagccagttgattttgtttttagcttactgctgcctttgtccgaagaaactgttcctccattatttgaattactgaagacagcaagatatttgtaaattatcttaaaataaacaacttaaaataaaaaaaaaaaaaaaaaa

SEQ ID NO: 13365 - DNA, 2250 bp, Homo sapiens
gagtctgcccgcagccccctggcccctgcccggccctgcgtgcccgcgcgtccctccggccgcgctgtctatggcgcagcccccctccctggatcatgcacagaaactttcgcaagtggattttctacgtgtttctctgctttggcgtcctgtacgtgaagctcggagcactgtcatccgtggtggccctgggagccaacatcatctgcaacaagattcctggcctagccccgcggcagcgtgccatctgccagagtcggcccgatgccatcattgtgattggggagggggcgcagatgggcatcaacgagtgccagtaccagttccgcttcggacgctggaactgctctgccctcggcgagaagaccgtcttcgggcaagagctccgagtagggagccgtgaggctgccttcacgtacgccatcaccgcggctggcgtggcgcacgccgtcaccgctgcctgcagccaagggaacctgagcaactgcggctgcgaccgcgagaagcagggctactacaaccaagccgagggctggaagtggggcggctgctcggccgacgtgcgttacggcatcgacttctcccggcgcttcgtggacgctcgggagatcaagaagaacgcgcggcgcctcatgaacctgcataacaatgaggccggcaggaaggttctagaggaccggatgcagctggagtgcaagtgccacggcgtgtctggctcctgcaccaccaaaacctgctggaccacgctgcccaagttccgagaggtgggccacctgctgaaggagaagtacaacgcggccgtgcaggtggaggtggtgcgggccagccgtctgcggcagcccaccttcctgcgcatcaaacagctgcgcagctatcagaagcccatggagacagacctggtgtacattgagaagtcgcccaactactgcgaggaggacgcggccacgggcagcgtgggcacgcagggccgtctctgcaaccgcacgtcgcccggcgcggacggctgtgacaccatgtgctgcggccgaggctacaacacccaccagtacaccaaggtgtggcagtgcaactgcaaattccactggtgctgcttcgtcaagtgcaacacctgcagcgagcgcaccgaggtcttcacctgcaagtgaggccaggcccggaggcggccgcgggcaccctggaacccggcggcattttgcacatccactcctcaccttccctgccttggtgctgccagcagcagacatagacgggtgcagaagcggggagctccaggtgcaggagggcaccggccggggcccacgccctctgcccgcctccctggggctccttcctgccacctcctcccatcacctcctgcggcagaacagcacccgtgacccacccagagagcaaggccaggggtcttggtgctccccgacggggcccggcaagttctctttcttctctctgggaaaatgaacgtccaggacacacctgtatcccagagagcaaagtgatgaggagactgagcgtccccagccccacctggcggcatggacacagaaaagctacgccggctggcctctccagaccagttcccaggctgggtctgccgctgggccctggggcggtggggacagatgttgacacaaattatttatgttttcttagtatcagaagaggattctcggcactaacacatagccagtcctaactccgtactctgtgtcagcccatcccctagacaccctctgtttcctttcccggccccacctggccggccctctgcccctgcagagctgaggcagcctggggttgatggggaccacgcggtgcctgcaggtcctagaagtgagctgggcaggggctcttcagaccacacagccctgaccgggccttggaggagagccatggacaggctcctccatgccgtctttccttcttttgaaaatcctatcaatggctgggcgcggtggctcacacctgtaatcccagcactttgggagaccgaggcaggtggatcacctgaggtcaggagttcgagaccagcctggccaacgtggtgaaaccctgtctctactaaaaatacaaaaattagctgggcgtggtggcgtgcacctgtaatcccagctactcaggaggctgagacaggacacttgcttgaacccgggaggtggaggttgcaatgagccaagattgtgccactgtattccaacttgggtgacagagcacgactctgtctcaaaaaaaaaaaaaaaaaaaaaaaaaaaa

SEQ ID NO: 13366 - DNA, 1856 bp, Homo sapiens
ctgacttggcaggactgtgcaattgtcagaaggccgtggggagtgggggccagtgcctgcagcctgccctgcctctctcacaggcccttagagcatcgccaggtgcagagctccacagctctctttcccaaggagtaatcagagggtgagaacgtggagcctggtggacaggtgaaagcactgggatctttctgcccagaaaggggaaagttgcacatttatatcctagagggaagcgacagcagtgcttctccctgtgctgaggtacaggagccatgtggctagaaatcctcctcacttcagtgctgggctttgccatctactggttcatctcccgggacaaagaggaaactttgccacttgaagatgggtggtgggggccaggcacgaggtccgcagccagggaggacgacagcatccgccctttcaaggtggaaacgtcagatgaggagatccacgacttacaccagaggatcgataagttccgtttcaccccacctttggaggacagctgcttccactatggcttcaactccaactacctgaagaaagtcatctcctactggcggaatgaatttgactggaagaagcaggtggagattctcaacagataccctcacttcaagactaagattgaagggctggacatccacttcatccacgtgaagcccccccagctgcccgcaggccataccccgaagcccttgctgatggtgcacggctggcccggctctttctacgagttttataagatcatcccactcctgactgaccccaagaaccatggcctgagcgatgagcacgtttttgaagtcatctgcccttccatccctggctatggcttctcagaggcatcctccaagaaggggttcaactcggtggccaccgccaggatcttttacaagctgatgctgcggctgggcttccaggaattctacattcaaggaggggactgggggtccctgatctgcactaatatggcccagctggtgcccagccacgtgaaaggcctgcacttgaacatggctttggttttaagcaacttctctaccctgaccctcctcctgggacagcgtttcgggaggtttcttggcctcactgagagggatgtggagctgctgtaccccgtcaaggagaaggtattctacagcctgatgagggagagcggctacatgcacatccagtgcaccaagcctgacaccgtaggctctgctctgaatgactctcctgtgggtctggctgcctatattctagagaagttttccacctggaccaatacggaattccgatacctggaggatggaggcctggaaaggaagttctccctggacgacctgctgaccaacgtcatgctctactggacaacaggcaccatcatctcctcccagcgcttctacaaggagaacctgggacagggctggatgacccagaagcatgagcggatgaaggtctatgtgcccactggcttctctgccttcccttttgagctattgcacacgcctgaaaagtgggtgaggttcaagtacccaaagctcatctcctattcctacatggttcgtgggggccactttgcggcctttgaggagccggagctgctcgcccaggacatccgcaagttcctgtcggtgctggagcggcaatgacccacccctctccccccgcctgccacctccccccacaagtgccctccaggcttttcttggggaagataccccttttctgaggaatgagtttgcctccgtcccctgcccatgctgggagcccacgctcaccccctcacccctccaagctcactccccaacccccaactccgtgtggtaagcaacatggctttgatgataaacgactttactcta

SEQ ID NO: 13367 - DNA, 1741 bp, Homo sapiens
ggcgcttctgaagacgggtgggcagacgatggaggacgaggctctgtcccgcccctgcagcttccttcgttccggccccttccagcgaagggcaggctccgagcagagacaacagacagaaacccagaaaccacctgccacgatgtgaacctgatgcagaaacgcggttcgctccctcgggatgcaaaggccaacttcagcctggcacggcggcgccgcggactccaccatcccggggaaggagccggacccctgtgtggcagtgtggcggcagcatggaggtgctgccctgctcccgcgtggcccacatcgagcgcaccaggaagccctacaacaacgacattgactactatgccaagcgcaacgccctgcgcgccgccgaggtgtggatggatgacttcaagtcccacgtgtacatggcctggaacatccccatgtcgaacccaggggtggacttcggggacgtgtctgagaggctggccctgcgtcagaggctgaagtgtcgcagcttcaagtggtacctggagaacgtgtacccggagatgagggtctacaacaacaccctcacgtacggagaggtgagaaacagcaaagccagtgcctactgtctggaccagggagcggaggacggcgaccgggcgatcctctacccctgccacgggatgtcctcccagctggtgcggtacagcgctgatggactgctgcagctggggcctctgggctccacagccttcttgcctgactccaagtgtctggtggatgacggcacgggccgcatgcccaccctgaagaagtgtgaggatgtggcgcggccaacacagcggctgtgggacttcacccagagtggccccattgtgagccgggccacgggccgctgcctggaggtggagatgtccaaagatgccaactttgggctccggctggtggtacagaggtgctcggggcagaagtggatgatcagaaactggatcaaacacgcacggcactgaccccacctccgcccggacccccacagacctcgggaaggcgctgggccgagccagtgtggctgagtgaccggggtgtgcccggcagacacagcaggacagggctctatgtgcggccaggacagcagaggctgaggggccggggtgtggctgagtgaccagggtgtcacccactgcatctggagtacagcttctcctaggacaggcggctctacccgagggagggcgtctggggacagtgatgccaactcaaacacgtgccttctccacggtatctcctggccaggctgctgggacagccgccgcctctgcatgtaccacagccccccacgccccatagggaggccaagccccggaccatgcaccaggctgcaccctggtgtcttccacccgcaggcctcccatgctccaagcagcctcccccagcacttgcggccgctcagccctccaaccaagacctaagtcacacatcataatgcagctccttgtggtctggtaagaggggtgctggaggacatggacagcgacaaacctgaggccgtgtctaggaggctggcacgactgcttcagcagagaccaaataaagagaggattaggcagcagcactgtgtgtgtcttcctgggagccgagctgggggttggggcccggtcccacctctttcccaggcacctgggccctgccgcagcccagccccttgcctgttttaataaatacagttttattggcgcccagccacaaaaaaaaaaaaaaaaaa

SEQ ID NO: 13368 - DNA, 1695 bp, Homo sapiens
gaggcacagataaagataagttttactgtcatgctgcttttaacataacagagcaacatcacctaggaaaaaagtttgtaggaggatttttaatccatatatttgtcttatggctagataaagatttctctgaaaaaaagaagcatgtcaggaatctctgggtgcccctttttcctctggggacttctagcattgttgggcttggctttggttatatcactgatcttcaatatttcccactatgtggaaaagcaacgacaagataaaatgtacagctactccagtgaccacaccagggttgatgagtattatattgaagacacaccaatttatggtaacttagatgatatgatttcagaaccaatggatgaaaattgctatgaacaaatgaaagcccgaccagagaaatctgtaaataagatgcaggaagccaccccatctgcacaggcaaccaatgaaacacagatgtgctacgcctcacttgatcacagcgttaaggggaagcgtagaaagcccaggaaacagaatactcatttctcagacaaggatggagatgagcaactacatgcaatagatgccagcgtttctaagaccaccttagtagacagtttctccccagaaagccaggcagtagaggaaaacattcatgatgatcccatcagactgtttggattgatccgtgctaagagagaacctataaactagctggaccatgatctagttcaatgatttggctcctattgaagatggcttctaagaaaacaagatgcacagaggacacagaaggacttggcagcagggtgatgacctgatcatttgttgatgggatggtggcttacctcttattcacagcttacacttatgcatgccaaatgtaaggccatgaaaatcagtatttcaaataacttaaaaaatgctttactactaaaatgtaaaaaattaatgtgctcacctcggcagcacatatactaaaaattaataagacccagcttgaaaattgagcctgataacaagattacaaattcacaatacctaatacttagggaaatataaaaatttaagcatgaatgcgttctggaacacgttagaagaaaaataaaagccaatgagtttttttttaattctcctttctcaccaatgggcaatagcccataattgaaataaatttctgattgaaaggtataggaaacattaaaatgcattactaagagaagtaatataattttcttacaaagtatttttcccaaagatagctttactatttcaaaaattgtcaaattaatgcatgctccttacaacaaacaaatatcaaaaagagtttaggaattctactagccagagatagtcacttggagaaactttctatatatccttctaaatatttttctgggcatgcttatgtatgtacatcagttgtttctttttattttgaaccaaaaatgtggtttcttttgtacacattacttaaactttctttccagtcaacaatatattgtggatttattttcactgttatatttaactatatataaatacgcatatattgtaattttaatgtctgcttagcaccccactgataaccaaatcacagtttatttaaataattttaatgacttttcaaaaacaatttattgatgcaaaaagcaaggttgagatgacaatgtttctttcaataattaaaaaatactgcttcac

SEQ ID NO: 13369 - DNA, 15739 bp, Homo sapiens
gccatgtcgtgtcggggaaggtaatgagccgcagagccccggggtctcggctgagcagcggcggcggcggcggcggcaccaagtatccgcggagctggaatgactggcaacccagaactgatagtgcatcagccgacccagataatttaaaatattcttcatccagagatagaggtggttcttcctcttatggactgcaaccttcaaattcagctgtggtgtctcggcaaaggcacgatgataccagagtccacgctgacatacagaatgacgaaaagggtggctacagtgtcaatggaggatctggggaaaatacttatggtcggaagtcgttggggcaagagctgagggttaacaatgtgaccagccctgagttcaccagtgttcagcatggcagtcgtgctttagccaccaaagacatgaggaaatcacaggagagatcgatgtcttattctgatgagtctcgactgtcgaatcttcttcggaggatcacccgggaagacgacagagaccgaagattggctactgtaaagcagttgaaagaatttattcagcaaccagaaaataagctggtactagttaaacaattggataatatcttggctgctgtacatgacgtgcttaatgaaagtagcaaattgcttcaggagttgagacaggagggagcttgctgtcttggccttctttgtgcttctctgagctatgaggctgagaagatcttcaagtggatttttagcaaatttagctcatctgcaaaagatgaagttaaactcctctacttatgtgccacctacaaagcactagagactgtaggagaaaagaaagccttttcatctgtaatgcagcttgtaatgaccagcctgcagtctattcttgaaaatgtggatacaccagaattgctttgtaaatgtgttaagtgcattcttttggtggctcgatgttaccctcatattttcagcactaattttagggatacagttgatatattagttggatggcatatagatcatactcagaaaccttcgctcacgcagcaggtatctgggtggttgcagagtttggagccattttgggtagctgatcttgcattttctactactcttcttggtcagtttctggaagacatggaagcatatgctgaggacctcagccatgtggcctctggggaatcagtggatgaagatgtccctcctccatcagtgtcattaccaaagctggctgcacttctccgggtatttagtactgtggtgaggagcattggggaacgcttcagcccaattcggggtcctccaattactgaggcatatgtaacagatgttctgtacagagtaatgagatgtgtgacggctgcaaaccaggtgtttttttctgaggctgtgttgacagctgctaatgagtgtgttggtgttttgctcggcagcttggatcctagcatgactatacattgtgacatggtcattacatatggattagaccaactggagaattgccagacttgtggtaccgattatatcatctcagtcttgaatttactcacgctgattgttgaacagataaatacgaaactgccatcatcatttgtagaaaaactgtttataccatcatctaaactactattcttgcgttatcataaagaaaaagaggttgttgctgtagcccatgctgtttatcaagcagtgctcagcttgaagaatattcctgttttggagactgcctataagttaatattgggagaaatgacttgtgccctaaacaacctcctacacagtctacaacttcctgaggcctgttctgaaataaaacatgaggcttttaagaatcatgtgttcaatgtagacaatgcaaaatttgtagttatatttgacctcagtgccctgactacaattggaaatgccaaaaactcactaatagggatgtgggcgctatctccaactgtctttgcacttctgagtaagaatctgatgattgtgcacagtgacctggctgttcacttccctgccattcagtatgctgtgctctacacattgtattctcattgtaccaggcatgatcactttatctctagtagcctcagttcttcctctccttctttgtttgatggagctgtgattagcactgtaactacggctacaaagaaacatttctcaattatattaaatcttctgggaatattacttaagaaagataaccttaaccaggacacgaggaaactgttaatgacttgggctttggaagcagctgttttaatgaagaagtctgaaacatacgcacctttattctctcttccgtctttccataaattttgcaaaggccttttagccaacactctcgttgaagatgtgaatatctgtctgcaggcatgcagcagtctacatgctctgtcctcttccttgccagatgatcttttacagagatgtgtcgatgtttgccgtgttcaactagtgcacagtggaactcgtattcgacaagcatttggaaaactgttgaaatcaattcctttagatgttgtcctaagcaataacaatcacacagaaattcaagaaatttctttagcattaagaagtcacatgagtaaagcaccaagtaatacattccacccccaagatttctctgatgttattagttttattttgtatgggaactctcatagaacagggaaggacaattggttggaaagactgttctatagctgccagagactggataagcgtgaccagtcaacaattccacgcaatctcctgaagacagatgctgtcctttggcagtgggccatatgggaagctgcacaattcactgttctttctaagctgagaaccccactgggcagagctcaagacaccttccagacaattgaaggtatcattcgaagtctcgcagctcacacattaaaccctgatcaggatgttagtcagtggacaactgcagacaatgatgaaggccatggtaacaaccaacttagacttgttcttcttctgcagtatctggaaaatctggagaaattaatgtataatgcatacgagggatgtgctaatgcattaacttcacctcccaaggtcattagaacttttttctataccaatcgccaaacttgtcaggactggctaacgcggattcgactctccatcatgagggtaggattgttggcaggccagcctgcagtgacagtgagacatggctttgacttgcttacagagatgaaaacaaccagcctatctcaggggaatgaattggaagtaaccattatgatggtggtagaagcattatgtgaacttcattgtcctgaagctatacagggaattgctgtctggtcatcatctattgttggaaaaaatcttctgtggattaactcagtggctcaacaggctgaagggaggtttgaaaaggcctctgtggagtaccaggaacacctgtgtgccatgacaggtgttgattgctgcatctccagctttgacaaatcggtgctcaccttagccaatgctgggcgtaacagtgccagcccgaaacattctctgaatggtgaatccagaaaaactgtgctgtccaaaccgactgactcttcccctgaggttataaattatttaggaaataaagcatgtgagtgctacatctcaattgccgattgggctgctgtgcaggaatggcagaacgctatccatgacttgaaaaagagtaccagtagcacttccctcaacctgaaagctgacttcaactatataaaatcattaagcagctttgagtctggaaaatttgttgaatgtaccgagcagttagaattgttaccaggagaaaatatcaatctacttgctggaggatcaaaagaaaaaatagacatgaaaaaactgcttcctaacatgttaagtccggatccgagggaacttcagaaatccattgaagttcaattgttaagaagttctgtttgtttggcaactgctttaaacccgatagaacaagatcagaagtggcagtctataactgaaaatgtggtaaagtacttgaagcaaacatcccgcatcgctattggacctctgagactttctactttaacagtttcacagtctttgccagttctaagtaccttgcagctgtattgctcatctgctttggagaacacagtttctaacagactttcaacagaggactgtcttattccactcttcagtgaagctttacgttcatgtaaacagcatgacgtgaggccatggatgcaggcattaaggtatactatgtaccagaatcagttgttggagaaaattaaagaacaaacagtcccaattagaagccatctcatggaattaggtctaacagcagcaaaatttgctagaaaacgagggaatgtgtcccttgcaacaagactgctggcacagtgcagtgaagttcagctgggaaagaccaccactgcacaggatttagtccaacattttaaaaaactatcaacccaaggtcaagtggatgaaaaatgggggcccgaacttgatattgaaaaaaccaaattgctttatacagcaggccagtcaacacatgcaatggaaatgttgagttcttgtgccatatctttctgcaagtctgtgaaagctgaatatgcagttgctaaatcaattctgacactggctaaatggatccaggcagaatggaaagagatttcaggacagctgaaacaggtttacagagctcagcaccaacagaacttcacaggtctttctactttgtctaaaaacatactcactctaatagaactgccatctgttaatacgatggaagaagagtatcctcggatcgagagtgaatctacagtgcatattggagttggagaacctgacttcattttgggacagttgtatcacctgtcttcagtacaggcacctgaagtagccaaatcttgggcagcgttggccagctgggcttataggtggggcagaaaggtggttgacaatgccagtcagggagaaggtgttcgtctgctgcctagagaaaaatctgaagttcagaatctacttccagacactataactgaggaagagaaagagagaatatatggtattcttggacaggctgtgtgtcggccggcggggattcaggatgaagatataacacttcagataactgagagtgaagacaacgaagaagatgacatggttgatgttatctggcgtcagttgatatcaagctgcccatggctttcagaacttgatgaaagtgcaactgaaggagttattaaagtgtggaggaaagttgtagatagaatattcagcctgtacaaactctcttgcagtgcatactttactttccttaaactcaacgctggtcaaattcctttagatgaggatgaccctaggctgcatttaagtcacagagtggaacagagcactgatgacatgattgtgatggccacattgcgcctgctgcggttgctcgtgaagcatgctggtgagcttcggcagtatctggagcacggcttggagacaacacccactgcaccatggagaggaattattccgcaacttttctcacgcttaaaccaccctgaagtgtatgtgcgccaaagtatttgtaaccttctctgccgtgtggctcaagattccccacatctcatattgtatcctgcaatagtgggtaccatatcgcttagtagtgaatcccaggcttcaggaaataaattttccactgcaattccaactttacttggcaatattcaaggagaagaattgctggtttctgaatgtgagggaggaagtcctcctgcatctcaggatagcaataaggatgaacctaaaagtggattaaatgaagaccaagccatgatgcaggattgttacagcaaaattgtagataagctgtcctctgcaaaccccaccatggtattacaggttcagatgctcgtggctgaactgcgcagggtcactgtgctctgggatgagctctggctgggagttttgctgcaacaacacatgtatgtcctgagacgaattcagcagcttgaagatgaggtgaagagagtccagaacaacaacaccttacgcaaagaagagaaaattgcaatcatgagggagaagcacacagctttgatgaagcccatcgtatttgctttggagcatgtgaggagtatcacagcggctcctgcagaaacacctcatgaaaaatggtttcaggataactatggtgatgccattgaaaatgccctagaaaaactgaagactccattgaaccctgcaaagcctgggagcagctggattccatttaaagagataatgctaagtttgcaacagagagcacagaaacgtgcaagttacatcttgcgtcttgaagaaatcagtccatggttggctgccatgactaacactgaaattgctcttcctggggaagtctcagccagagacactgtcacaatccatagtgtgggcggaaccatcacaatcttaccgactaaaaccaagccaaagaaacttctctttcttggatcagatgggaagagctatccttatcttttcaaaggactggaggatttacatctggatgagagaataatgcagttcctatctattgtgaataccatgtttgctacaattaatcgccaagaaacaccccggttccatgctcgacactattctgtaacaccactaggaacaagatcaggactaatccagtgggtagatggagccacacccttatttggtctttacaaacgatggcaacaacgggaagctgccttacaagcacaaaaggcccaagattcctaccaaactcctcagaatcctggaattgtaccccgtcctagtgaactttattacagtaaaattggccctgctttgaaaacagttgggcttagcctggatgtgtcccgtcgggattggcctcttcatgtaatgaaggcagtattggaagagttaatggaggccacacccccgaatctccttgccaaagagctctggtcatcttgcacaacacctgatgaatggtggagagttacgcagtcttatgcaagatctactgcagtcatgtctatggttggatacataattggccttggagacagacatctggataatgttcttatagatatgacgactggagaagttgttcacatagattacaatgtttgctttgaaaaaggtaaaagccttagagttcctgagaaagtaccttttcgaatgacacaaaacattgaaacagcactgggtgtaactggagtagaaggtgtatttaggctttcatgtgagcaggttttacacattatgcggcgtggcagagagaccctgctgacgctgctggaggcctttgtgtacgaccctctggtggactggacagcaggaggcgaggctgggtttgctggtgctgtctatggtggaggtggccagcaggccgagagcaagcagagcaagagagagatggagcgagagatcacccgcagcctgttttcttctagagtagctgagattaaggtgaactggtttaagaatagagatgagatgctggttgtgcttcccaagttggacggtagcttagatgaatacctaagcttgcaagagcaactgacagatgtggaaaaactgcagggcaaactactggaggaaatagagtttctagaaggagctgaaggggtggatcatccttctcatactctgcaacacaggtattctgagcacacccaactacagactcagcaaagagctgttcaggaagcaatccaggtgaagctgaatgaatttgaacaatggataacacattatcaggctgcattcaataatttagaagcaacacagcttgcaagcttgcttcaagagataagcacacaaatggaccttggtcctccaagttacgtgccagcaacagcctttctgcagaatgctggtcaggcccacttgattagccagtgcgagcagctggagggggaggttggtgctctcctgcagcagaggcgctccgtgctccgtggctgtctggagcaactgcatcactatgcaaccgtggccctgcagtatccgaaggccatatttcagaaacatcgaattgaacagtggaagacctggatggaagagctcatctgtaacaccacagtagagcgttgtcaagagctctataggaaatatgaaatgcaatatgctccccagccacccccaacagtgtgtcagttcatcactgccactgaaatgaccctgcagcgatacgcagcagacatcaacagcagacttattagacaagtggaacgcttgaaacaggaagctgtcactgtgccagtttgtgaagatcagttgaaagaaattgaacgttgcattaaagttttccttcatgagaatggagaagaaggatctttgagtctagcaagtgttattatttctgccctttgtacccttacaaggcgtaacctgatgatggaaggtgcagcgtcaagtgctggagaacagctggttgatctgacttctcgggatggagcctggttcttggaggaactctgcagtatgagcggaaacgtcacctgcttggttcagttactgaagcagtgccacctggtgccacaggacttagatatcccgaaccccatggaagcgtctgagacagttcacttagccaatggagtgtatacctcacttcaggaattgaattcgaatttccggcaaatcatatttccagaagcacttcgatgtttaatgaaaggggaatacacgttagaaagtatgctgcatgaactggacggtcttattgagcagaccaccgatggcgttcccctgcagactctagtggaatctcttcaggcctacttaagaaacgcagctatgggactggaagaagaaacacatgctcattacatcgatgttgccagactactacatgctcagtacggtgaattaatccaaccgagaaatggttcagttgatgaaacacccaaaatgtcagctggccagatgcttttggtagcattcgatggcatgtttgctcaagttgaaactgctttcagcttattagttgaaaagttgaacaagatggaaattcccatagcttggcgaaagattgacatcataagggaagccaggagtactcaagttaatttttttgatgatgataatcaccggcaggtgctagaagagattttctttctaaaaagactacagactattaaggagttcttcaggctctgtggtaccttttctaaaacattgtcaggatcaagttcacttgaagatcagaatactgtgaatgggcctgtacagattgtcaatgtgaaaaccctttttagaaactcttgtttcagtgaagaccaaatggccaaacctatcaaggcattcacagctgactttgtgaggcagctcttgatagggctacccaaccaagccctcggactcacactgtgcagttttatcagtgctctgggtgtagacatcattgctcaagtagaggcaaaggactttggtgccgaaagcaaagtttctgttgatgatctctgtaagaaagcggtggaacataacatccagatagggaagttctctcagctggttatgaacagggcaactgtgttagcaagttcttacgacactgcctggaagaagcatgacttggtgcgaaggctagaaaccagtatttcttcttgtaagacaagcctgcagcgggttcagctgcatattgccatgtttcagtggcaacatgaagatctacttatcaatagaccacaagccatgtcagtcacacctcccccacggtctgctatcctaaccagcatgaaaaagaagctgcataccctgagccagattgaaacttctattgcaacagttcaggagaagctagctgcacttgaatcaagtattgaacagcgactcaagtgggcaggtggtgccaaccctgcattggcccctgtactacaagattttgaagcaacgatagctgaaagaagaaatcttgtccttaaagagagccaaagagcaagtcaggtcacatttctctgcagcaatatcattcattttgaaagtttacgaacaagaactgcagaagccttaaacctggatgcggcgttatttgaactaatcaagcgatgtcagcagatgtgttcgtttgcatcacagtttaacagttcagtgtctgagttagagcttcgtttattacagagagtggacactggtcttgaacatcctattggcagctctgaatggcttttgtcagcacacaaacagttgacccaggatatgtctactcagagggcaattcagacagagaaagagcagcagatagaaacggtctgtgaaacaattcagaatctggttgataatataaagactgtgctcactggtcataaccgacagcttggagatgtcaaacatctcttgaaagctatggctaaggatgaagaagctgctctggcagatggtgaagatgttccctatgagaacagtgttaggcagtttttgggtgaatataaatcatggcaagacaacattcaaacagttctatttacattagtccaggctatgggtcaggttcgaagtcaagaacacgttgaaatgctccaggaaatcactcccaccttgaaagaactgaaaacacaaagtcagagtatctataataatttagtgagttttgcatcacccttagtcaccgatgcaacaaatgaatgttcgagtccaacgtcatctgctacttatcagccatccttcgctgcagcagtccggagtaacactggccagaagactcagcctgatgtcatgtcacagaatgctagaaagctgatccagaaaaatcttgctacatcagctgatactccaccaagcaccgttccaggaactggcaagagtgttgcttgtagtcctaaaaaggcagtcagagaccctaaaactgggaaagcggtgcaagagagaaactcctatgcagtgagtgtgtggaagagagtgaaagccaagttagagggccgagatgttgatccgaataggaggatgtcagttgctgaacaggttgactatgtcattaaggaagcaactaatctagataacttggctcagctgtatgaaggttggacagcctgggtgtgaatggcaagacagtagatgagtctggttaagcgaggtcagacatccaccagaatcaactcagcctcaggcatccaaagccacaccacagtcggtggtgatgcaactgggggcttactctgaggaaacctaggaaatctcggtgcactaggaagtgaatcccgcaggacagctgcactcagggatacgcccaacaccatggcctgcaaccccagggtcaagggtgaaggaaagcaagctcaccgcctgaacacggagattgtctttctgccacagaacagcagcagacgtgtcgggaggttagctgcggaaagaaatcgggatgccgcggagcacagagtgatttggaactccattccacctgaccctgtgtgtacaatccaggaaaaaaacaaaccccactcagaaacagagaaaactggggtcgcgaagaaatcacagccaaggaagatttgatgcattcagattctcgtgtaacacttgttgcttggcaacagtactggttgggttgaccagtaagtagaaaaaggctaaaggctatgcgatatgaatttcagaaatggactgaaaatggagagctatgtaacagatacactacagtagaagaacttacttctgaaatgaagggaaaaaaaccaccccatcgttccctactcctccccaccacttacccgttccccctttacctaatctagtagattagccatctttcaaattcacttttatttcagtccttatatttcatatacttccgtctcgatgctgttaacaacttctgataacatggaaaattcaaggattgtttaaaggtctgatgatcacacacaaaatgtaattccggttatttaagtcatttctgtgattctatcatgtacagtttccagaattgtcactgtgcattcaaaagtaatgaatctaacagacatttgatttaatgtacactcccttttgcttatagtgtgcattttttttggaggtcattcaaattttccctcttctgtgatagctgtagtttctttcatagaaagtagctaatccagtgtaatcttttacctttttaaaaaccaagatagagtatctattagagttttacattgttgatgatagattaacaataaagtgatgttctggtggaggtagactgaaatttttttaattcatgtttttcatttgatacttttaatttacacttagtaaattaaaagttgtttaatttacttggcattttaggacatgtacatgaaacagtgaaaatgagatccaccaacatcttttattaagttcagttattagtctgtgaagtgctttactttttgcacaattttaatagcttgctattcagtaatacattatagtgaattcatgatcaaggtttccttaaatttagcattgcatttcagtactgactgtgtaagctaaattgctgatccaaaataaaaacccagactagaatagggttcttaaaatcaagtatcaatacaaaatagaacacaattaaaatcttaattgttggctgggcacagtggctcacgcctgtaatcccagcactttgggaggccgaggcgggcggatcatgaggttaggagagcgagaccatcctggctaacacggtgaaaccccgtctttactaaaaatacaaaaaaaattagccgggcgtggtggcgggcgcctgtagtcccagctactcgggaggctgaggcaggagaatggcgtgaacccaggaggcggagcttgcagtgagccgagattgtgccactgcactccagcctgggcaacagagctagactctgtgtcaaaaataaatgactagataaaaaaaaaaattgtttgagtacattttccctgcattttagagattaggacagtggtcactttctagttgccgtcttcacagacaaacttgaaaggtattaaggaaaaaattccacatagctctgggccttttttgtattctgattgccacgttaatctgtaatcgttaagtacccatgaaagaatgtgtttcagtatcagtgcttttttggtactttaacaagtattgtaggcacggtggatttttttgaaatacccatgtgtccaatagcaagttaaggaacctagcgcatcaaattttgttttcttcattcatttggaaccttattttcgcaaaaaacctagctggaataataatgccatattgtattttgcacactgctttattttctagaggctctgggagcaaattacattcatcacattacctctgctctctcaagattaaagtctttcagcaacattctttattgtcatcataaggaaaaacttttatcgcaatgatagtcagttcacattagtttagcactatagatagtattcagaaattgctttctctttggtaaagaagataaataggtgaattttattgcctgtgttttcaggcttcagaggtacctggcaccttactcaagcaaaaacaaaaaacagctttacttcaaaagcatgtgcctctggtaaattatccatcacttttgttttaaagtggtccctccaagaataatgtggcatacacagtgggtttggttgtaaggcagatgtaatagatgacttcaaaagcctgctccttactgcactctggacaaggccctggtctgtatagtttggcttcctctgttaagtcattctacaaggtgacttgccatttgaactttcgtaagagacctcagcagttagactgagaaaagttagagtgctgtagttatgaagtcatacatttttgataaaatacctgtggaaaaccagggatcctctcctgtttctctctcttgcctccccctttccctccattcctctgtcgcctccccctctcctccactttctttaagaatcagggggtacagaataacctacaaacaacctcttcaaagtacccttggaaattgaagttcaatcttaagttttttgctgtctttaatttactagaattgcctaatttttagttgatttctctacagagcttagcttgtgtagttatttctcttttactgttgctttggtgtgtcttgaagtttgattgattatttttggtcattgagttcttagtgtagtttgctagatgattattaagattcttttgtgtctgacacttgtggtgagttgcttttgaaatctgttgagatttccatgtgagaactgataatcaggctcttgatctgcttccctaaattacttttttagagcccaaaccccaggtttagggtgagggtttgtaatacaaagaaacacttccatcacttctgcccttaacccttgcctctattacctaagcttagtaagtagttttcttaatattgtccaatgtttggtgttatctgcattgttttttgtttttttaattgtggttgttctgacgtgtgaaatttaaggaaagagccattttttaaaaatgccgagcagggcaatgcaagtacagccaaatattagacttgatgtgcaatcttcggtcctttttaatctggggtattataggcagtactttaaattgcaaagtcttccgggcctattttcctctacatttttgtaattaactctgggggcttacttgttttggcagtactgaaatcaaaggagctggttcttcttttctcccaattattttcatatgaaagcacctacaattagcctgttagtcctattcagatacatcaaatatcagtgaatgctttactattcgcacatttaagcatctttgttttacataaaattagagtatgaaaaccagtgttcaattttttatcttgttgagcttgtaaaatgccagcaatttaaaactaggacttttccccccataagccaaggaggtagaattactaatacaagggttaaagaaggtagattttgttttcaatatttgggtaatattagaaagattcttcccacagggaagaactagcaagtgtcccaattttttccaaacgttggggaggggaaaattcactgtatcatgaaaccctaagggtttgttgcacttcctgctttttaggcctggataacagtatcaccatccttatttacagaagggtaaaactgactcttaatgagaaaagctttataagttcaagggctgtaaaatatgaactacttagggtcgtttgccttccatgggaacttggctagacttagaaaaagctgtttgttgtgctaatgtaaaagtgtcatacaatttagaagatttttgaagatggtaaacttagaagaattctatgttctgaaatgcacacttttagaatgtttttctttgaaaacaggctaatagttttttctttttttgacaaagtttcagctcctctttaaagttattgtgtcatttttctggtttaaatttcccttatatttccacctgtaatgtcagtggcaacaacatcatacttcacttacttgttaatttactttttacccttattctaagagcaagttgagttgaactgaatcttccttgtcttagtaacaatgtataaatagtggcttttctgtacaaaaggttgtaatgcctcctgatggatataattttgtgattgtatttaaaagttgaataaatcacaccagcttcctgaaaatgttcataatgcatcttttggaaaacaaatacatgcctactttgtgcatatttgcattaacatggcaaagattgtatgaaatacctgtttttcagaaaataaaggttcagtctcaaaagatacagcaaaaaaaaaaaaaaa

SEQ ID NO: 13370 - DNA, 2096 bp, Homo sapiens
ctcctctgctcctcgaagaaggccagggcggggctgccgcaagttttgacattttcgcagcggagacgcgcgcgggcactctcgggccgacggctgcggcggcggccgaccctccagagccccttagtcgcgccccggccctcccgctgcccggagtccggcggccacgaggcccagccgcgtcctcccgcgcttgctcgcccggcggccgcagccatgtcccgggggcccgaggaggtgaaccggctcacggagagcacctaccggaatgttatggaacagttcaatcctgggctgcgaaatttaataaacctggggaaaaattatgagaaagctgtaaacgctatgatcctggcaggaaaagcctactacgatggagtggccaagatcggtgagattgccactgggtcccccgtgtcaactgaactgggacatgtcctcatagagatttcaagtacccacaagaaactcaacgagagtcttgatgaaaattttaaaaaattccacaaagagattatccatgagctggagaagaagatagaacttgacgtgaaatatatgaacgcaactctaaaaagataccaaacagaacacaagaataaattagagtctttggagaaatcccaagctgagttgaagaagatcagaaggaaaagccaaggaagccgaaacgcactcaaatatgaacacaaagaaattgagtatgtggagaccgttacttctcgtcagagtgaaatccagaaattcattgcagatggttgcaaagaggctctgcttgaagagaagaggcgcttctgctttctggttgataagcactgtggctttgcaaaccacatacattattatcacttacagtctgcagaactactgaattccaagctgcctcggtggcaggagacctgtgttgatgccatcaaagtgccagagaaaatcatgaatatgatcgaagaaataaagaccccagcctctacccccgtgtctggaactcctcaggcttcacccatgatcgagagaagcaatgtggttaggaaagattacgacaccctttctaaatgctcaccaaagatgccccccgctccttcaggcagagcatataccagtcccttgatcgatatgtttaataacccagccacggctgccccgaattcacaaagggtaaataattcaacaggtacttccgaagatcccagtttacagcgatcagtttcggttgcaacgggactgaacatgatgaagaagcagaaagtgaagaccatcttcccgcacactgcgggctccaacaagaccttactcagctttgcacagggagatgtcatcacgctgctcatccccgaggagaaggatggctggctctatggagaacacgacgtgtccaaggcgaggggttggttcccgtcgtcgtacacgaagttgctggaagaaaatgagacagaagcagtgaccgtgcccacgccaagccccacaccagtgagaagcatcagcaccgtgaacttgtctgagaatagcagtgttgtcatccccccacccgactacttggaatgcttgtccatgggggcagctgccgacaggagagcagattcggccaggacgacatccacctttaaggccccagcgtccaagcccgagaccgcggctcctaacgatgccaacgggactgcaaagccgccttttctcagcggagaaaacccctttgccactgtgaaactccgcccgactgtgacgaatgatcgctcggcacccatcattcgatgagaggacagccaaggactctcccgggcctctccggttctcccttgcggaatgatgggcgcatcctgtctgccacgtgctgacggtcgggaagcttcagtggagaggcctaactctaatgtcgcctgcttaagcaaatcatgcttctctgtttcacgtagttgggttgacaagtttctgcctttaagataaatgagtaatagtctaatgaccagctcagccatttaaaatattttcttcctattctgttcaagaaacagtaaacttggtttcaatctttaaaaaaaaaaaaaaaaaaaaaaaaaaaaaaaaaaaaaaaaaaaaaaaaaaaaaaaaaaaaaaaaaaa

SEQ ID NO: 13371 - DNA, 4758 bp, Homo sapiens
cgcggagaagcttgggtacctgagccgcggtcccgggtgacaccctcagtgacgccaggcgcgttccttcctcttcctctctcctctccggccccgccttcccttccctccgcccacctccctgaagcggagccgccgtcgccaccagcgccgtcatgtcggcccccgccgggtcctctcacccggccgccagcgcccggatcccgcccaagttcggcggatcggccgtctcaggagccgcagcgcccgcgggcccgggtgcgggcccggcgccgcaccagcagaacggtccagcccagaatcaaatgcaggttccatctggatatggattgcatcatcaaaactatattgctccctcaggacattactctcaaggacctgggaaaatgacctcattgccattggatacccagtgtggtgattactactctgctctctatacagtaccaacacaaaatgtgactcctaacacagtgaaccagcaaccaggagcacagcagttgtacagcaggggtcctcctgcccctcatattgtgggatccactctaggatctttccaaggtgctgcatcgtcagcatcccatttgcatacgagtgcctcccaaccatactcctcttttgtgaatcactacaatagtccagccatgtactctgccagctcttctgttgcgtctcagggatttccctctacttgtggtcattatgctatgtcaactgtttctaatgccgcgtatcctagtgtttcatatccctctctgcctgctggtgatacatatgggcaaatgtttacctcacagaatgctccgactgttaggccagttaaagataattcattctctggtcaaaatacagctatcagccatccatcgccacttccacctctaccatcacaacagcaccaccagcagcaaagtctttcaggatacagtactctaacgtggtcatctccaggccttccatcgactcaagacaatctcatccgaaaccacacaggatccctggctgtagcgaacaacaacccaaccattactgttgcagattctttatcctgtcctgttatgcaaaatgttcagcctcccaagtccagcccagtggtatccactgttttatcaggatcctcaggatcctcatcaacaagaacacctcccactgcaaatcacccagttgagcctgtgacctcagttacacagccatcagagctattacaacaaaaaggcgtgcagtatggtgaatatgttaataaccaagctagctccgcaccaactcccttgtcatcaacttccgatgatgaggaagaggaggaggaggatgaggaagcaggtgttgacagctcttctaccacaagcagtgcttctccaatgcccaacagttatgatgccctggaaggaggcagttacccagatatgctttcttcatcagcaagcagtcctgctcctgatcccgcccctgaacctgatcctgcttctgctccagctccagcttcagctccagctcctgtcgtccctcagccttcaaaaatggctaagcctttggctatggctatccaacacttcagcctggttatcagaatgctacagcaccacttatttctggagtacagccccagtaacccggtatattctggattccagcagtatcctcaacagtatcctggtgtgaaccagctatcctccagtataggaggattgagtcttcagagttctccacaaccagaaagcctgagacctgtaaaccttactcaggagaggaatattttacctatgactcctgtttgggctcctgtacctaacttgaatgcagacctcaaaaaattaaactgtagcccagattcatttcggtgtactttgacaaatattccacagacacaggctttactgaataaagctaagcttcctttaggattgttgttacatcccttcagagacctaacgcaattaccagtgataacatcaaataccattgtgaggtgccgatcctgtcgaacgtatattaacccctttgtatccttcattgatcaacgtagatggaaatgcaatttgtgctatagagtaaacgatgttcctgaagaatttatgtataacccccttacccgatcttatggagagcctcataaacgaccagaagttcagaattcaactgtggagttcattgcttcttcagattacatgctgcgtcctcctcaacctgcagtttacttgtttgttttagatgtgtctcataatgcagtggaagctggatatttgacaattttgtgccagtcactcctagaaaatctagacaagcttcctggagattcacgaacaagaataggattcatgacctttgatagcactattcatttctacaatttacaagaaggattatcacagcctcaaatgttgattgtgtctgatatagatgatgtttttctacctacaccggatagtttacttgtgaatctatatgaaagtaaagagcttataaaagacttactgaatgcattaccaaacatgttcaccaatacaagagaaacacacagtgcccttggtcctgcacttcaggctgcctttaaattaatgtctccaacaggtggccgtgtgtctgtatttcagacacagttaccttccttgggtgcaggacttctgcaatccagagaagatcctaatcagagatcaagtacaaaggtggtacaacatcttggccctgcaactgatttttataagaaacttgcattagattgctcgggacagcaaactgcagtggatttgttccttttaagttcacagtattctgatcttgcttctctagcttgcatgtccaagtattctgcagggtgcatctattattatccatcattccactatactcacaatccttcacaagcagaaaagttacaaaaagacctaaaacggtatctcacaagaaaaattgggtttgaagctgttatgagaataaggtgtactaaaggtctttcaatgcacacttttcacggtaacttctttgtccgttctactgatttgttatcccttgccaacatcaatcctgatgctggatttgcggtgcagttgtcaattgaagaaagtttaacagatacttccttagtatgttttcaaacagccctattatatacatcaagcaaaggtgagcggagaattagagtacatacactttgtttgccagtggtaagttcactagcagatgtatatgcgggagtggatgtacaagctgccatctgccttctggcaaacatggctgtggatcggtccgtttcatcaagtctgtcagatgcaagagatgccttagtgaatgctgtagtggactcattgtctgcatatggctcaactgtctcaaatttacagcactctgcattgatggcgcccagctccctcaagttgtttcctctctatgttttggcccttctcaaacagaaagcatttagaacgggtacaagcacacggctggatgatcgtgtatatgccatgtgtcagataaagtctcagccacttgttcatctaatgaaaatgattcatcccaacttatacaggatagacagattgacagatgagggtgcagtacatgttaatgacaggattgtaccacagccacctcttcaaaaattgtctgcagagaagctgacaagagaaggtgctttccttatggactgtggctctgttttttacatttgggttgggaaaggctgtgacaataacttcatagaggatgtgcttggatatactaattttgcatcaataccacagaaaatgacacatcttccagagctagatacactttcatcagaaagagccagatccttcataacttggcttagagacagcagaccattaagtccaatccttcacatagtaaaagatgagagtcctgccaaagcagaattttttcagcatttgattgaagaccggacagaggctgcattttcttactatgaatttttgcttcatgttcagcagcagatttgtaagtgaagtagaataaaattgaataagaaaaagatctataacctaggtaaagcataatctgtcagagaagcgcgtgagaaatttgaaatgaaggcatttgttaatacaagatgcaacgcacagcactctgtctgaggctttggtaaaaagtaaaggggaagaaagaacttgacagatctttttcaactcaaattaatggtaacgatgatgctgtttcaccaagtatattttgaattggtttctacacatttccagtagtatggcagtacagtgctctgttcattgcaagctggcaaatttatgtagctatgtggaatgatatgtcataatgtaaaattagataaattcttttttcttataattaatataacatttctggacttgaactctggcaagagatgccaaaaggcattggtaccgtgttatttgtttatatgaattactttttaacaaggaatgtttcttattcattaaatgaattcaacattttctctgtaaaaacaatagagtttcagtacatgaactatagaaaaaaatctatatataatgtacataaatgttacatttgtaaagaaaatgtaaaaatgtaactatagcatatgaattgcttaaactgtgctgcattgttggatgacaactctttttgtcacagttagagaatgaggttgactaatgcatattatgaattgagtccacaaaggaacacaaaactctttgtaattctgttaaatcttttatgtagatttatttatgatcagcctactaattaaaactatttcgcttgacaaaaaaaaaaaaaaaa

SEQ ID NO: 13372 - DNA, 2144 bp, Homo sapiens
ttttcggcaaccccggccgaacggccacccagaggctgtgctgagctggcgcagcggcagcagcatgagccggaccctcgcatcggccgtgctcctgtcgagtcccgactactacgagaggctgggccaactccagcacgggctgcgggacagtgaaaagaagagattggacctggaaaagaaactttatgaatataatcagtctgatacatgcagagttaagctgaaatatgtaaaactaaagaattatctgaaggaaatatgtgaatctgaaaagaaggctcatactcgaaaccaagaatatttaaagcgatttgagcgtgtccaagctcatgtcgtacacttcaccacaaatacagagaagcttcaaaaactgaagctcgaatatgagactcaaattaagaagatgctatgctcaaaagatagcctgggactaaaagaggaactgacagatgaagacagagaaaaggttgcagtgcacgaggggattaactcaggaacagccatgtcaagaggattgtatcaaccagcaacaatctttatgggccgccaaatgtcagccatcttaagcatgagagatttcagtacagagcacaaatctccccagcccacaaagaacttttcaattcctgacccacattcacaccgacagacagcccagagcagtaatgtgacagacagctgtgtagtacaaactagtaatgacacacagtgcttaaataagtctgacaacatagatggaaaggcatctcttcagattggtgagaaaatgccagtcacagccagtgtattgtctgaggaggaacaaactcattgcttggagataggaagtaacacacgtcatggcaagagtaatttatctgaaggcaaaaagtctgctgaactcaattccccgttacgggaaagattaagtccagagaacagaaccactgatttaaagtgtgacagttccagcggatcagagggagaaatactgacacgggaacatattgaagttgaggaaaaaagagccagcccgccagtctctccgataccagtttcagaatactgtgaatctgaaaataagtggtctcaagagaagcattctccttgggaaggtgtttcagatcatcttgctcacagggaaccaaagtcacaaaagcccttcagaaaaatgcaggaagaggaggaggaaagttggagcaccagcagagaccttaccatttcaataagtgaagatgatctgattttagagagcccagaaccacagccaaatccaggtggcaagatggagggagaagatggaatagaggccttaaaattaatccatgctgagcaagaaagagttgccctatccactgaaaaaaattgtattttgcaaaccctaagctctcctgattcagaaaaggaatcctccactaacgcaccaacaagagaacctggacaaacaccagactcagacgtaccgagggcacaggtgggtcagcatgttgccaccttgaaagaacatgataattctgtcaaagaagaggcaacagcattattgagaaaagcccttacagaagagtgtggccgtaggtcagctattcacagtagtgaatcatcttgcagcttgccatctattctgaatgacaatagtggaataaaggaagccaaacctgctgtatggctcaacagtgttcctacaagggaacaagaagtttcaagtggctgtggagacaagagcaagaaagaaaatgtggctgcagatatcccaatcacagaaacagaagcctatcagttgctgaagaaggccacccttcaggataatacaaatcaaactgaaaacaggtttcaaaagacagatgcttctgtgtcacacttgtcaggtttgaatattggcagcggtgcattcgagacaaagacagctaacaaaattgcttcggaagctagtttttcatctagtgaaggaagtcctttgtcaaggcatgaaaacaaaaagaaacccgtgatcaattcaaaatctaatgccctctgggatgagtctgatgacagtaactcagaaattgaggctgctttacgccccagaaaccataacaccgatgattctgatgatttttatgactaacgtgctgtgacattggtttcaaataaagtctttaaacaaactaaaaaaaaaaaaaaaa

SEQ ID NO: 13373 - DNA, 3474 bp, Homo sapiens
gagaactggacgatcgcctggcttagaagttttcctccctccccgaaccccgttttctcttccatttcttccggtcgcgtgtccccagcgcccacaggtggaaatcaaccgcccgcggggttgcggggcacaaagaggcagctagcggctccgctgaccccttcccgccggcctggacgaagtctgggctcgggagccgcgtgatgcatcccaaagaaggcgcagaacagcacgtgttctccccggtgcccggggctcccacaccaccgcccaatcgctgcggccgcctagtgctcgggccgcgcctgccggccgcggggactccgggcccgggtattcgcgccgccgccgcccgccatgcgcttccgctttggggtggtggtgccacccgccgtggccggcgcccggccggagctgctggtggtggggtcgcggcccgagctggggcgttgggagccgcgcggtgccgtccgcctgaggccggccggcaccgcggcgggcgacggggccctggccctgcaggagccgggcctgtggctcggggaggtggagctggcggccgaggaggcggcgcaggacggggcggagccgggccgcgtggacacgttctggtacaagttcctgaagcgggagccgggaggagagctctcctgggaaggcaatggacctcatcatgaccgttgctgtacttacaatgaaaacaacttggtggatggtgtgtattgtctcccaataggacactggattgaggccactgggcacaccaatgaaatgaagcacacaacagacttctattttaatattgcaggccaccaagccatgcattattcaagaattctaccaaatatctggctgggtagctgccctcgtcaggtggaacatgtaaccatcaaactgaagcatgaattggggattacagctgtaatgaatttccagactgaatgggatattgtacagaattcctcaggctgtaaccgctacccagagcccatgactccagacactatgattaaactatatagggaagaaggcttggcctacatctggatgccaacaccagatatgagcaccgaaggccgagtacagatgctgccccaggcggtgtgcctgctgcatgcgctgctggagaagggacacatcgtgtacgtgcactgcaacgctggggtgggccgctccaccgcggctgtctgcggctggctccagtatgtgatgggctggaatctgaggaaggtgcagtatttcctcatggccaagaggccggctgtctacattgacgaagaggccttggcccgggcacaagaagattttttccagaaatttgggaaggttcgttcttctgtgtgtagcctgtagctggtcagcctgcttctgccccctcctgatttccctaaggagcctgggatgatgttggtcaaatgacctagaaacaaggattctacctgaactgaaaggactgtgtgacctcccccaagccaaccactttcacctgggatgactttcgattatgctttgttttggggctgtatttttgaaatactctacaagaaagctgtggctcaacacatgagaagaagcacgaagcagttaggctgtacatcagacagaagggtaatgcgtgcagttcctgctgcctgcaggcagacgaggcctttgctttacagcactgtatgtgttgcacgatggatccgtgacagcactttcctgttgcactgaaactcttggccatgtagaggaaaagatatggagttatgtggatttcatcactagtatgtgtgcgtgagctggtcagttgccaaaggaggaaataaggttagaagcctgaaccgttacaaaagaagagctcactatggtcaaaaagtgatggctttcaggacttgttttttatcctgcctcacagttgttaaagtctgttccaaggcatcaccttccttctctacccaacaaccctgtgtaacaactaaagtagaattatctctcatttgttgttgtttttcctcaaaattaccaaacaaagcaaaaaatacccttgttttttatagttgagatgtcaagaagttaaattgaggcttaatgagcataggtagcttgtccaaggtctcatgaccagtcaagggcaagctggagttaataatctatatttatttgactcagcactgttttcatcacaacttgttttcccagcatcatgtagtgcatttagttttgtctttctcagggtatagtcaatatgcctgcaggagtttctatagcgagacatagaatagtattctgatcagttgccaaagaatctaggaaattagttgtattttgtgcaagctaatttaaaaacatgatgggctgttttaagaccagagtggaaattcatgagaggaactatactaccaaaagagcccaaatgaccaaatccatggataattgcttcacagccttggccatcctggctcagctctcaatttagtataatatgcagttcctgtgcctccagactatgcagctcatcaccctaggttctacaggaaatacagagatgaacaactttgccttcaaaaatgtgctgcctagaaacagacctgcattcaaccaactgtaatgcaggattggaccatgaatgatatgctagaatagaagaaagagaagtgtttttttaattgagagcctctatgtgcaaggtgatatataatcatatccagtttaatcttcacaatatccaatgaagaaggtctcattatctccatgataaagatggggaaactaaggtcagaagggttaactcaactgtctattgtcacatgatgaataaatagatgaagtgagatacaaagctgggtttgattcaaagcccttactttcctaattaaactatgatgcgtatttatttttctgcaccttcctttcttccacaaacacatattgatagatgcaagagactcttatttagaaggcgtgggggacaagaaggatacaaggtaagtttcagtggagctcagaggacggggagatagaactgtggcacttaggggagatgacatttgctttgggcagaggcagctagccaggacacatttccactataattttacaaagttaaatttataagctagcattaagtaaagtgaagtccagctcccttgctaaaaataactagaggtaataattggtattcaggtaactcatttacagtcataatgtgttgtgaaaatttaatcttaaaaattaaatttttaaactatgtgggtctgtgaatttctttaatgtctaagaaatccagcttcataatttccatgatacaaagatcttttttcaggtggatttttacctttgttccttttgctctgatagacaaaatcagtttaggactattaaagaatgttttggaataaactgtctttttcctcaatgaatgggatgtctaatgtatttcaaaatcacccaaaacttttggcaaataaaagcatttaaaaagacaaaaaaaaa

SEQ ID NO: 13374 - DNA, 4598 bp, Homo sapiens
cgcggggagggcggcggtggctgcagcggctggagcggggtagagaccgccgggtctcggcccgcaccaggagcggaacaagtctgggatctgccgatatgggggatatgaagacccctgattttgatgacctccttgctgcctttgacatccctgacattgatgcgaatgaagccatccattctgggccagaagaaaatgaggggcctggaggcccagggaagccagaaccaggtgtaggaagtgaatctgaagacacagcagcagcctctgctggggatggccctggagttccagcccaggcctctgaccatggcctgccaccgccagacatttctgtagtcagtgtcattgtcaagaacactgtgtgtcccgagcagtctgaggccctggctggaggctcagcaggagacggggcccaggctgctggggtaactaaagaagggcctgtggggcctcatcgaatgcagaatggttttgggagccctgaaccttccctcccaggaactccccactctcctgctcctcccagtgggggcacctggaaagaaaaaggcatggaaggcaaaactcccttggacctgtttgctcattttggccctgagccaggggaccactcagatccgctgcctccctctgcaccctctcccactcgggagggggctctgaccccgcctcctttcccctcttcctttgagctggcccaggagaatggcccaggcatgcagccacctgtttcttccccaccattgggggccttgaagcaggagagctgcagcccccatcatccccaggtcctagcccaacaaggctcaggctccagccctaaggccacggacatccctgccagtgcctcgcctcccccagttgctggggtgcccttcttcaagcagtctccagggcaccagagccctcttgcctcccccaaagtgcccgtctgtcagcccttgaaggaagaagatgatgatgaggggccagtggacaagtcttccccaggaagtccccagagtccctctagtggggccgaggctgcagatgaggacagcaatgactcccctgcctccagctcctctaggcctcttaaggtgcggatcaagaccattaaaacatcctgcgggaatatcacaaggactgtaactcaggtcccctcagatcctgatccacctgcccccttggctgagggggccttcttggctgaggctagcctcttgaagctgtcccctgcaacacctacttctgagggtccaaaggtggtgagcgtacagttgggtgatggtacaaggctgaaaggcactgtgctgcctgtggccaccatccagaacgccagtactgccatgctgatggcagccagtgtggctcgcaaggctgtggtgctgcctggggggactgccaccagccctaagatgattgctaagaacgtgctaggcctggtgccccaagccctgcctaaggctgacgggcgggcagggctggggactgggggacagaaggtgaatggtgcctcggtggtgatggtgcaaccttcaaagacagctactgggccaagtacagggggcggcacagtgatatcacggacccagtccagcctggtggaggccttcaacaagatcctcaacagcaagaacctgctccctgcctataggccaaacctgagcccaccagctgaggctgggctggccctgcctcccaccggctaccgctgcctggagtgtggggatgccttctcattggagaagagcctggcacggcactatgaccgtcggagcatgcgcatcgaggtcacctgcaaccactgcgcccgccgcctggtcttcttcaacaagtgcagcctgctcctgcatgcacgtgaacacaaggacaaggggctcgtcatgcagtgctcacatttggtcatgaggcctgtagcccttgaccagatggtggggcagccggacatcacaccgctgctgcctgtagctgtcccacctgtctctggacctctggccttgcctgccttgggcaagggtgagggggccatcacctcctctgccattactacagttgctgctgaggcccctgtcctgccgctctccacagagccgcctgctgccccggccacctctgcttacacatgctttcgctgcctggagtgcaaggaacagtgccgggacaaggctggcatggcagctcacttccagcagctcggcccccctgcccctggggccaccagcaatgtgtgcccaacctgccccatgatgctccccaatcgctgcagcttcagcgcccaccagcgcatgcataagaatcgacccccccatgtctgtcctgagtgtgggggcaacttcctgcaagccaattttcagacccatctccgggaggcctgtctgcacgtctctcgccgtgtaggatacaggtgccccagctgttcagtggtgtttgggggtgtgaactccatcaagtcccacatccagacgtcgcactgcgaggttttccacaagtgccccatctgccccatggccttcaagtctgggccaagtgcccatgcccacctctactcccagcatcccagcttccaaactcagcaggccaagctgatctacaagtgcgccatgtgcgacacagtcttcactcacaaacccctcctctcctcacacttcgaccagcacttgctgccccagcgtgtcagtgtctttaagtgcccgtcttgtcctctgctctttgcccaaaaaaggaccatgctggaacatctcaagaacacccatcagtctgggcgcttggaggagactgctgggaaaggggccgggggtgccctgctgacccccaagactgagcctgaggagctggctgtttctcagggaggggcagcccctgctactgaggagtcgtcttcatcttcagaagaggaggaagtacccagctcccctgagcccccccgtccagccaaacggcctcggcgggaactagggagcaaaggcctcaagggtgggggtggggggcctggaggctggacctgtggcctgtgtcactcctggttccctgagcgtgatgaatacgtggcccacatgaagaaggagcatggcaagtcagtgaaaaagttcccctgtcgcctgtgtgagcgctccttctgctccgcccccagcctgaggcgccatgtcagagttaatcacgagggcatcaagcgagtttacccctgcaggtattgcacagagggaaaacgcaccttcagcagccgcctgatcctagagaaacatgtccaggtccggcacggcttgcagcttggggcccagtcccctggccgggggaccaccttggctcggggttccagtgccagagcccaggggccaggtcggaaacgccgccagtcttctgactcttgcagtgaggagcctgacagcacgacaccgccagccaagtcccccaggggcggacctggatctggaggccatggccctctgcgctaccggagcagcagctccacagaacagagcctcatgatggggttgagggtggaggatggtgcccagcagtgcctcgactgtggcttgtgctttgcctcccctggctccctgagccgacaccgtttcatcagccacaagaagagacggggtgtgggtaaagccagtgccctggggctgggggatggggaggaagaggcccctccatcaaggtctgaccccgatggtggagactcacccctgcctgcttctggaggcccactgacctgtaaggtctgtggcaagagctgcgacagccctctaaacctcaagacccacttccgcacgcatggcatggcgttcatcagggctcggcagggggctgttggggacaactagtctccaaggcctgggactgaccagccccttcctcttggagcctggttttccctactgctgcctgatccctcggctggggagttttcattaacattaatattttgttaattcctgtctctccaacctgaagaagaagagcatttgaggattattctagttatttgcaacctccctttgggtttggccctggagtcctagtgtagtggaccctccattcctcctttctgagcccaacactaattaattttatgctcctgctgcagaacccccagtgtgggcctgggggtgggaggatgggacttaggtatgcctgctagacaggttcagggaaggactgatgggggtgtcatggatggacacacctctccacaattccttcaggcatggactggaactttcctcctctaggccgggccctgccctagtgcccacccccgcccccgcccccgcccaaccccaactcactggcactcaagccccctacccctgcagtgcctttcacttctttttttccccagaaatccggggcgggggggtggggggttggtagggatgagtcctgtcaagggggccacaggagaggaggggacaggctctcaggaatcctttattcttgtagtaataataatactaacaaacagttggggaactagggagaaaaccagaccattaaaactgtttgtggtcgaatctccaaaaaaaaaaaaaaaaaaaaaaaaaaaaaaaaaaaaaaaaaaaaaaaaaaaaaaaaaaaaaaaaaaaaaaaaaaaaaaaaaaaaaaaaaaa

SEQ ID NO: 13375 - DNA, 2762 bp, Homo sapiens
gggcccagatagaacaagaaggcagaagaaatgtgaattcctctttctctgctggagctgggatattcttcttctcctgcccttggacatcagagctgcaggctctctggcctttggacccgaggatttataccaagcaggtttctgggttctcaggcctttggccttggactgatagttacaccattggcatatctggttctgaggctcttggtcttggactgagccacactcctggcatcccagcgtctccagcttgcatggcctgtcacgtgattcctgtcagaatcaccatttttggtaaacaaaccaagcccagaacctgataattatggagcattctacactgacagttctttgagacaaatttcctcttggcatttacactgtggctttagctttcaaaccagaggttcctcttacccagcaaaaaatggctttcccgaagatgagattgatgtatatttgccttctggttctgggggctctttgtttgtattttagcatgtacagtctaaatcctttcaaagaacagtcctttgtttacaagaaagacgggaacttccttaagctcccagatacagactgcaggcagacacctcccttcctcgtcctgctggtgacctcatcccacaaacagttggctgagcgcatggccatccggcagacgtgggggaaagagaggatggtgaagggaaagcagctgaagacattcttcctcctggggaccaccagcagtgcagcggaaacgaaagaggtggaccaggagagccagcgacacggggacattatccagaaggatttcctagacgtctattacaatctgaccctgaagaccatgatgggcatagaatgggtccatcgcttttgtcctcaggcggcgtttgtgatgaaaacagactcagacatgttcatcaatgttgactatctgactgaactgcttctgaagaaaaacagaacaaccaggtttttcactggcttcttgaaactcaatgagtttcccatcaggcagccattcagcaagtggtttgtcagtaaatctgaatatccgtgggacaggtacccaccattctgctccggcaccggctacgtgttttctggcgacgtggcgagtcaggtgtacaatgtctccaagagcgtcccatacattaaactggaagacgtgtttgtggggctctgcctcgaaaggctgaacatcagattggaggagctccactcccagccgaccttttttccagggggcttacgcttctccgtatgcctcttcaggaggatcgtggcctgccacttcatcaagcctcggactctcttggactactggcaggctctagagaattcccggggggaagattgtccgcctgtctgaggggagcccagaggcacatccggacaagtttcagataacccgtggggatagtttttgctagattttggaagagggggcgggacagaggatgctgttcttcagtgctgaaatccacgccagaatgtcggtgttcatgaagtcactgattagttcccacttggtgccccaggcaataataggcccgtctcttgggcacgcacactcttcatactaagtgtttgacatacacctggatttttgcatttcaggggtcagtatcctatgacatgatgggtgttaccatcctaattttacaggcaaggacacagcagctgcgagaggtacagaaacttgtcccaaggctcacagccagtaggcataggagcgggaatgaaaatcgagcactgtcagaatctggtgggcagcccctgacttgaaccactcccacgtgctgcctcccttaggaggggacactgatgatgaggtctcggagccggcatccttccatccctgtcgagtcccctccacctcagctcccagtccttgtgctttttggagctaagcctgggatgaccaaattcaccccagctccttcattcacagggctggatgtagctgggattgagtccatgttatcggctcggtactcaacacaacccaagtttcatccgaggaaatgtccccgcagtggatgcagctcacatgctgaggaacacccagctctggacagagttcttataaatgtataaattaggctcagaaaccactgcattctgacctgctgtacagactgcccacactgctgacctgcctagcgagcaggacatcccttctgagccatctgctgctctctcatttcatcaccccaactgtcccttgtttttgatcaatggggaccagccactgccccaggagcactttagggctctcagttcaaactgaaggacagttgaactcagatggggttcatgtgggattctgggagctttctgggaattcagttggagtcaagtcaggatgctctcaaggacccctcgggctcagagccctaaagtgggccctggtgaagcagggtggtcctgcgtccacttcccaagcctgagccaagctcatcttcattgaatgtctcatttggccgaggaacaactgaactttgtggtttgctgtttagccttcagtttgctccgctgcctcctacccagaggtttgtgcgagcctgtgttgcagggttgtataaaaccaaggtacttcgttagttttgcccattcagccatggtcacgtgacatgcaaagtaatcttgctcctaattatagaaatgatttttcttttaattttttactttaccagactttactttgtactcagagaagaggcctcacatggctgtgtcacatataaatgttggactaaactctt

SEQ ID NO: 13376 - DNA, 2629 bp, Homo sapiens
gggcccagatagaacaagaaggcagaagaaatgtgaattcctctttctctgctggagctgggatattcttcttctcctgcccttggacatcagagctgcaggctctctggcctttggacccgaggatttataccaagcagtgattcctgtcagaatcaccatttttggtaaacaaaccaagcccagaacctgataattatggagcattctacactgacagttctttgagacaaatttcctcttggcatttacactgtggctttagctttcaaaccagaggttcctcttacccagcaaaaaatggctttcccgaagatgagattgatgtatatttgccttctggttctgggggctctttgtttgtattttagcatgtacagtctaaatcctttcaaagaacagtcctttgtttacaagaaagacgggaacttccttaagctcccagatacagactgcaggcagacacctcccttcctcgtcctgctggtgacctcatcccacaaacagttggctgagcgcatggccatccggcagacgtgggggaaagagaggatggtgaagggaaagcagctgaagacattcttcctcctggggaccaccagcagtgcagcggaaacgaaagaggtggaccaggagagccagcgacacggggacattatccagaaggatttcctagacgtctattacaatctgaccctgaagaccatgatgggcatagaatgggtccatcgcttttgtcctcaggcggcgtttgtgatgaaaacagactcagacatgttcatcaatgttgactatctgactgaactgcttctgaagaaaaacagaacaaccaggtttttcactggcttcttgaaactcaatgagtttcccatcaggcagccattcagcaagtggtttgtcagtaaatctgaatatccgtgggacaggtacccaccattctgctccggcaccggctacgtgttttctggcgacgtggcgagtcaggtgtacaatgtctccaagagcgtcccatacattaaactggaagacgtgtttgtggggctctgcctcgaaaggctgaacatcagattggaggagctccactcccagccgaccttttttccagggggcttacgcttctccgtatgcctcttcaggaggatcgtggcctgccacttcatcaagcctcggactctcttggactactggcaggctctagagaattcccggggggaagattgtccgcctgtctgaggggagcccagaggcacatccggacaagtttcagataacccgtggggatagtttttgctagattttggaagagggggcgggacagaggatgctgttcttcagtgctgaaatccacgccagaatgtcggtgttcatgaagtcactgattagttcccacttggtgccccaggcaataataggcccgtctcttgggcacgcacactcttcatactaagtgtttgacatacacctggatttttgcatttcaggggtcagtatcctatgacatgatgggtgttaccatcctaattttacaggcaaggacacagcagctgcgagaggtacagaaacttgtcccaaggctcacagccagtaggcataggagcgggaatgaaaatcgagcactgtcagaatctggtgggcagcccctgacttgaaccactcccacgtgctgcctcccttaggaggggacactgatgatgaggtctcggagccggcatccttccatccctgtcgagtcccctccacctcagctcccagtccttgtgctttttggagctaagcctgggatgaccaaattcaccccagctccttcattcacagggctggatgtagctgggattgagtccatgttatcggctcggtactcaacacaacccaagtttcatccgaggaaatgtccccgcagtggatgcagctcacatgctgaggaacacccagctctggacagagttcttataaatgtataaattaggctcagaaaccactgcattctgacctgctgtacagactgcccacactgctgacctgcctagcgagcaggacatcccttctgagccatctgctgctctctcatttcatcaccccaactgtcccttgtttttgatcaatggggaccagccactgccccaggagcactttagggctctcagttcaaactgaaggacagttgaactcagatggggttcatgtgggattctgggagctttctgggaattcagttggagtcaagtcaggatgctctcaaggacccctcgggctcagagccctaaagtgggccctggtgaagcagggtggtcctgcgtccacttcccaagcctgagccaagctcatcttcattgaatgtctcatttggccgaggaacaactgaactttgtggtttgctgtttagccttcagtttgctccgctgcctcctacccagaggtttgtgcgagcctgtgttgcagggttgtataaaaccaaggtacttcgttagttttgcccattcagccatggtcacgtgacatgcaaagtaatcttgctcctaattatagaaatgatttttcttttaattttttactttaccagactttactttgtactcagagaagaggcctcacatggctgtgtcacatataaatgttggactaaactctt

SEQ ID NO: 13377 - DNA, 2871 bp, Homo sapiens
gggcccagatagaacaagaaggcagaagaaatgtgaattcctctttctctgctggagctgggatattcttcttctcctgcccttggacatcagagctgcaggctctctggcctttggacccgaggatttataccaagcaggtttctgggttctcaggcctttggccttggactgatagttacaccattggcatatctggttctgaggctcttggtcttggactgagccacactcctggcatcccagcgtctccagcttgcatggcctgtcacgagaaccctgactaatacacctggagtgcagaatctgctggagaaactgccattccgttattgactggctggtcaggccatacagcctggtggtctagatgtgtttggagtgattcctgtcagaatcaccatttttggtaaacaaaccaagcccagaacctgataattatggagcattctacactgacagttctttgagacaaatttcctcttggcatttacactgtggctttagctttcaaaccagaggttcctcttacccagcaaaaaatggctttcccgaagatgagattgatgtatatttgccttctggttctgggggctctttgtttgtattttagcatgtacagtctaaatcctttcaaagaacagtcctttgtttacaagaaagacgggaacttccttaagctcccagatacagactgcaggcagacacctcccttcctcgtcctgctggtgacctcatcccacaaacagttggctgagcgcatggccatccggcagacgtgggggaaagagaggatggtgaagggaaagcagctgaagacattcttcctcctggggaccaccagcagtgcagcggaaacgaaagaggtggaccaggagagccagcgacacggggacattatccagaaggatttcctagacgtctattacaatctgaccctgaagaccatgatgggcatagaatgggtccatcgcttttgtcctcaggcggcgtttgtgatgaaaacagactcagacatgttcatcaatgttgactatctgactgaactgcttctgaagaaaaacagaacaaccaggtttttcactggcttcttgaaactcaatgagtttcccatcaggcagccattcagcaagtggtttgtcagtaaatctgaatatccgtgggacaggtacccaccattctgctccggcaccggctacgtgttttctggcgacgtggcgagtcaggtgtacaatgtctccaagagcgtcccatacattaaactggaagacgtgtttgtggggctctgcctcgaaaggctgaacatcagattggaggagctccactcccagccgaccttttttccagggggcttacgcttctccgtatgcctcttcaggaggatcgtggcctgccacttcatcaagcctcggactctcttggactactggcaggctctagagaattcccggggggaagattgtccgcctgtctgaggggagcccagaggcacatccggacaagtttcagataacccgtggggatagtttttgctagattttggaagagggggcgggacagaggatgctgttcttcagtgctgaaatccacgccagaatgtcggtgttcatgaagtcactgattagttcccacttggtgccccaggcaataataggcccgtctcttgggcacgcacactcttcatactaagtgtttgacatacacctggatttttgcatttcaggggtcagtatcctatgacatgatgggtgttaccatcctaattttacaggcaaggacacagcagctgcgagaggtacagaaacttgtcccaaggctcacagccagtaggcataggagcgggaatgaaaatcgagcactgtcagaatctggtgggcagcccctgacttgaaccactcccacgtgctgcctcccttaggaggggacactgatgatgaggtctcggagccggcatccttccatccctgtcgagtcccctccacctcagctcccagtccttgtgctttttggagctaagcctgggatgaccaaattcaccccagctccttcattcacagggctggatgtagctgggattgagtccatgttatcggctcggtactcaacacaacccaagtttcatccgaggaaatgtccccgcagtggatgcagctcacatgctgaggaacacccagctctggacagagttcttataaatgtataaattaggctcagaaaccactgcattctgacctgctgtacagactgcccacactgctgacctgcctagcgagcaggacatcccttctgagccatctgctgctctctcatttcatcaccccaactgtcccttgtttttgatcaatggggaccagccactgccccaggagcactttagggctctcagttcaaactgaaggacagttgaactcagatggggttcatgtgggattctgggagctttctgggaattcagttggagtcaagtcaggatgctctcaaggacccctcgggctcagagccctaaagtgggccctggtgaagcagggtggtcctgcgtccacttcccaagcctgagccaagctcatcttcattgaatgtctcatttggccgaggaacaactgaactttgtggtttgctgtttagccttcagtttgctccgctgcctcctacccagaggtttgtgcgagcctgtgttgcagggttgtataaaaccaaggtacttcgttagttttgcccattcagccatggtcacgtgacatgcaaagtaatcttgctcctaattatagaaatgatttttcttttaattttttactttaccagactttactttgtactcagagaagaggcctcacatggctgtgtcacatataaatgttggactaaactctt

SEQ ID NO: 13378 - DNA, 2711 bp, Homo sapiens
gggcccagatagaacaagaaggcagaagaaatgtgaattcctctttctctgctggagctgggatattcttcttctcctgcccttggacatcagagctgcaggctctctggcctttggacccgaggatttataccaagcaggtttctgggttctcaggcctttggccttggactgatagttacaccattggcatatctggttctgaggctcttggtcttggactgagccacactcctggcatcccagcgtctccagcttgcatggcctgtcacgagaaccctgactaatacacctggagtgcagaatctgctggagaaactgccattccgttattgactggctggtcaggccatacagcctggtggtctagatgtgtttggagatggctttcccgaagatgagattgatgtatatttgccttctggttctgggggctctttgtttgtattttagcatgtacagtctaaatcctttcaaagaacagtcctttgtttacaagaaagacgggaacttccttaagctcccagatacagactgcaggcagacacctcccttcctcgtcctgctggtgacctcatcccacaaacagttggctgagcgcatggccatccggcagacgtgggggaaagagaggatggtgaagggaaagcagctgaagacattcttcctcctggggaccaccagcagtgcagcggaaacgaaagaggtggaccaggagagccagcgacacggggacattatccagaaggatttcctagacgtctattacaatctgaccctgaagaccatgatgggcatagaatgggtccatcgcttttgtcctcaggcggcgtttgtgatgaaaacagactcagacatgttcatcaatgttgactatctgactgaactgcttctgaagaaaaacagaacaaccaggtttttcactggcttcttgaaactcaatgagtttcccatcaggcagccattcagcaagtggtttgtcagtaaatctgaatatccgtgggacaggtacccaccattctgctccggcaccggctacgtgttttctggcgacgtggcgagtcaggtgtacaatgtctccaagagcgtcccatacattaaactggaagacgtgtttgtggggctctgcctcgaaaggctgaacatcagattggaggagctccactcccagccgaccttttttccagggggcttacgcttctccgtatgcctcttcaggaggatcgtggcctgccacttcatcaagcctcggactctcttggactactggcaggctctagagaattcccggggggaagattgtccgcctgtctgaggggagcccagaggcacatccggacaagtttcagataacccgtggggatagtttttgctagattttggaagagggggcgggacagaggatgctgttcttcagtgctgaaatccacgccagaatgtcggtgttcatgaagtcactgattagttcccacttggtgccccaggcaataataggcccgtctcttgggcacgcacactcttcatactaagtgtttgacatacacctggatttttgcatttcaggggtcagtatcctatgacatgatgggtgttaccatcctaattttacaggcaaggacacagcagctgcgagaggtacagaaacttgtcccaaggctcacagccagtaggcataggagcgggaatgaaaatcgagcactgtcagaatctggtgggcagcccctgacttgaaccactcccacgtgctgcctcccttaggaggggacactgatgatgaggtctcggagccggcatccttccatccctgtcgagtcccctccacctcagctcccagtccttgtgctttttggagctaagcctgggatgaccaaattcaccccagctccttcattcacagggctggatgtagctgggattgagtccatgttatcggctcggtactcaacacaacccaagtttcatccgaggaaatgtccccgcagtggatgcagctcacatgctgaggaacacccagctctggacagagttcttataaatgtataaattaggctcagaaaccactgcattctgacctgctgtacagactgcccacactgctgacctgcctagcgagcaggacatcccttctgagccatctgctgctctctcatttcatcaccccaactgtcccttgtttttgatcaatggggaccagccactgccccaggagcactttagggctctcagttcaaactgaaggacagttgaactcagatggggttcatgtgggattctgggagctttctgggaattcagttggagtcaagtcaggatgctctcaaggacccctcgggctcagagccctaaagtgggccctggtgaagcagggtggtcctgcgtccacttcccaagcctgagccaagctcatcttcattgaatgtctcatttggccgaggaacaactgaactttgtggtttgctgtttagccttcagtttgctccgctgcctcctacccagaggtttgtgcgagcctgtgttgcagggttgtataaaaccaaggtacttcgttagttttgcccattcagccatggtcacgtgacatgcaaagtaatcttgctcctaattatagaaatgatttttcttttaattttttactttaccagactttactttgtactcagagaagaggcctcacatggctgtgtcacatataaatgttggactaaactctt

SEQ ID NO: 13379 - DNA, 3409 bp, Homo sapiens
gggcccagatagaacaagaaggcagaagaaatgtgaattcctctttctctgctggagctgggatattcttcttctcctgcccttggacatcagagctgcaggctctctggcctttggacccgaggatttataccaagcaggtttctgggttctcaggcctttggccttggactgatagttacaccattggcatatctggttctgaggctcttggtcttggactgagccacactcctggcatcccagcgtctccagcttgcatggcctgtcacgtgattcctgtcagaatcaccatttttggtaaacaaaccaagcccagaacctgataattatggagcattctacactgacagttctttgagacaaatttcctcttggcatttacactgtggctttagctttcaaaccagaggttcctcttacccagcaaaaagtgagttatacgctttcttaatgttataacgttaccatggatgatcctgaacttgccgaggatagcagagacgggtgggcagaacaggaaagaatcagatcagagactgtaaaaagtaacttaaaaaaaaataattctggcagagacagaatttgaaggtacttgtgcacatcagaacactggacttgcttttttctgggagcaggaatgctgcttaattagatcagagaagaatgcaagtggtccatacatttagatctacaatgcgtggtttccagacctgcagcttgttttgctgcgcttcatcatggagtcatagaagggcagagctggaggaccgagtgagggacctggtgccatatccctacagacaggcaattggagactcccgtaggttaagggctgcagagcctggaccaatgcccagaatctctgagctttttatcttacaccatgaagtgacagatgctggcagatgttagacctttgtgcttaactgtttaaccacacagcacccgacttctgtatgcagcgaggttctagagtttccaaaacacgggtctcctctcccacctcagcctcctagcataaaactagacacatcctcatgcttttgaggtctaatcattggattttgttcctttcagatggctttcccgaagatgagattgatgtatatttgccttctggttctgggggctctttgtttgtattttagcatgtacagtctaaatcctttcaaagaacagtcctttgtttacaagaaagacgggaacttccttaagctcccagatacagactgcaggcagacacctcccttcctcgtcctgctggtgacctcatcccacaaacagttggctgagcgcatggccatccggcagacgtgggggaaagagaggatggtgaagggaaagcagctgaagacattcttcctcctggggaccaccagcagtgcagcggaaacgaaagaggtggaccaggagagccagcgacacggggacattatccagaaggatttcctagacgtctattacaatctgaccctgaagaccatgatgggcatagaatgggtccatcgcttttgtcctcaggcggcgtttgtgatgaaaacagactcagacatgttcatcaatgttgactatctgactgaactgcttctgaagaaaaacagaacaaccaggtttttcactggcttcttgaaactcaatgagtttcccatcaggcagccattcagcaagtggtttgtcagtaaatctgaatatccgtgggacaggtacccaccattctgctccggcaccggctacgtgttttctggcgacgtggcgagtcaggtgtacaatgtctccaagagcgtcccatacattaaactggaagacgtgtttgtggggctctgcctcgaaaggctgaacatcagattggaggagctccactcccagccgaccttttttccagggggcttacgcttctccgtatgcctcttcaggaggatcgtggcctgccacttcatcaagcctcggactctcttggactactggcaggctctagagaattcccggggggaagattgtccgcctgtctgaggggagcccagaggcacatccggacaagtttcagataacccgtggggatagtttttgctagattttggaagagggggcgggacagaggatgctgttcttcagtgctgaaatccacgccagaatgtcggtgttcatgaagtcactgattagttcccacttggtgccccaggcaataataggcccgtctcttgggcacgcacactcttcatactaagtgtttgacatacacctggatttttgcatttcaggggtcagtatcctatgacatgatgggtgttaccatcctaattttacaggcaaggacacagcagctgcgagaggtacagaaacttgtcccaaggctcacagccagtaggcataggagcgggaatgaaaatcgagcactgtcagaatctggtgggcagcccctgacttgaaccactcccacgtgctgcctcccttaggaggggacactgatgatgaggtctcggagccggcatccttccatccctgtcgagtcccctccacctcagctcccagtccttgtgctttttggagctaagcctgggatgaccaaattcaccccagctccttcattcacagggctggatgtagctgggattgagtccatgttatcggctcggtactcaacacaacccaagtttcatccgaggaaatgtccccgcagtggatgcagctcacatgctgaggaacacccagctctggacagagttcttataaatgtataaattaggctcagaaaccactgcattctgacctgctgtacagactgcccacactgctgacctgcctagcgagcaggacatcccttctgagccatctgctgctctctcatttcatcaccccaactgtcccttgtttttgatcaatggggaccagccactgccccaggagcactttagggctctcagttcaaactgaaggacagttgaactcagatggggttcatgtgggattctgggagctttctgggaattcagttggagtcaagtcaggatgctctcaaggacccctcgggctcagagccctaaagtgggccctggtgaagcagggtggtcctgcgtccacttcccaagcctgagccaagctcatcttcattgaatgtctcatttggccgaggaacaactgaactttgtggtttgctgtttagccttcagtttgctccgctgcctcctacccagaggtttgtgcgagcctgtgttgcagggttgtataaaaccaaggtacttcgttagttttgcccattcagccatggtcacgtgacatgcaaagtaatcttgctcctaattatagaaatgatttttcttttaattttttactttaccagactttactttgtactcagagaagaggcctcacatggctgtgtcacatataaatgttggactaaactctt

SEQ ID NO: 13380 - DNA, 3851 bp, Homo sapiens
cgcaaagccgccgggctgctgcgcccagagccagccggagccggagccggagcccgaactgcagctccagccccagccgtgcggagccgcagcccaggccggggccggcggcggctcatggacagcggggcgggcggccggcgctgcccggaggcggccctcctgattctggggcctcccaggatggagcacctgaggcacagcccaggccctggggggcaacggctactgctgccctccatgctgctagcactgctgctcctgctggctccatccccaggccacgccactcgggtagtgtacaaggtgccggaggaacagccacccaacaccctcattgggagcctcgcagccgactatggttttccagatgtggggcacctgtacaagctagaggtgggtgccccgtaccttcgcgtggatggcaagacaggtgacattttcaccaccgagacctccatcgaccgtgaggggctccgtgaatgccagaaccagctccctggtgatccctgcatcctggagtttgaggtatctatcacagacctcgtgcagaatggcagcccccggctgctagagggccagatagaagtacaagacatcaatgacaacacacccaacttcgcctcaccagtcatcactctggccatccctgagaacaccaacatcggctcactcttccccatcccgctggcttcagaccgtgatgctggtcccaacggtgtggcatcctatgagctgcaggctgggcctgaggcccaggagctatttgggctgcaggtggcagaggaccaggaggagaagcaaccacagctcattgtgatgggcaacctggaccgtgagcgctgggactcctatgacctcaccatcaaggtgcaggatggcggcagccccccacgcgccagcagtgccctgctgcgtgtcaccgtgcttgacaccaatgacaacgcccccaagtttgagcggccctcctatgaggccgaactatctgagaatagccccataggccactcggtcatccaggtgaaggccaatgactcagaccaaggtgccaatgcagaaatcgaatacacattccaccaggcgcccgaagttgtgaggcgtcttcttcgactggacaggaacactggacttatcactgttcagggcccggtggaccgtgaggacctaagcaccctgcgcttctcagtgcttgctaaggaccgaggcaccaaccccaagagtgcccgtgcccaggtggttgtgaccgtgaaggacatgaatgacaatgcccccaccattgagatccggggcatagggctagtgactcatcaagatgggatggctaacatctcagaggatgtggcagaggagacagctgtggccctggtgcaggtgtctgaccgagatgagggagagaatgcagctgtcacctgtgtggtggcaggtgatgtgcccttccagctgcgccaggccagtgagacaggcagtgacagcaagaagaagtatttcctgcagactaccaccccgctagactacgagaaggtcaaagactacaccattgagattgtggctgtggactctggcaaccccccactctccagcactaactccctcaaggtgcaggtggtggacgtcaatgacaacgcacctgtcttcactcagagtgtcactgaggtcgccttcccggaaaacaacaagcctggtgaagtgattgctgagatcactgccagtgatgctgactctggctctaatgctgagctggtttactctctggagcctgagccggctgctaagggcctcttcaccatctcacccgagactggagagatccaggtgaagacatctctggatcgggaacagcgggagagctatgagttgaaggtggtggcagctgaccggggcagtcctagcctccagggcacagccactgtccttgtcaatgtgctggactgcaatgacaatgaccccaaatttatgctgagtggctacaacttctcagtgatggagaacatgccagcactgagtccagtgggcatggtgactgtcattgatggagacaagggggagaatgcccaggtgcagctctcagtggagcaggacaacggtgactttgttatccagaatggcacaggcaccatcctatccagcctgagctttgatcgagagcaacaaagcacctacaccttccagctgaaggcagtggatggtggcgtcccacctcgctcagcttacgttggtgtcaccatcaatgtgctggacgagaatgacaacgcaccctatatcactgccccttctaacacctctcacaagctgctgaccccccagacacgtcttggtgagacggtcagccaggtggcagccgaggactttgactctggtgtcaatgctgagctgatctacagcattgcaggtggcaacccttatggactcttccagattgggtcacattcaggtgccatcaccctggagaaggagattgagcggcgccaccatgggctacaccgcctggtggtgaaggtcagtgaccgcggcaagcccccacgctatggcacagccttggtccatctttatgtcaatgagactctggccaaccgcacgctgctggagaccctcctgggccacagcctggacacgccgctggatattgacattgctggggatccagaatatgagcgctccaagcagcgtggcaacattctctttggtgtggtggctggtgtggtggccgtggccttgctcatcgccctggcggttcttgtgcgctactgcagacagcgggaggccaaaagtggttaccaggctggtaagaaggagaccaaggacctgtatgcccccaagcccagtggcaaggcctccaagggaaacaaaagcaaaggcaagaagagcaagtccccaaagcccgtgaagccagtggaggacgaggatgaggccgggctgcagaagtccctcaagttcaacctgatgagcgatgcccctggggacagtccccgcatccacctgcccctcaactacccaccaggcagccctgacctgggccgccactatcgctctaactccccactgccttccatccagctgcagccccagtcaccctcagcctccaagaagcaccaggtggtacaggacctgccacctgcaaacacattcgtgggcaccggggacaccacgtccacgggctctgagcagtactccgactacagctaccgcaccaacccccccaaataccccagcaagcaggtaggccagccctttcagctcagcacaccccagcccctaccccacccctaccacggagccatctggaccgaggtgtgggagtgatggagcaggtttactgtgcctgcccgtgttgggggccagcctgagccagcagtgggaggtggggccttagtgcctcaccgggcacacggattaggctgagtgaagattaagggagggtgtgctctgtggtctcctccctgccctctccccactggggagagacctgtgatttgccaagtccctggaccctggaccagctactgggccttatgggttgggggtggtaggcaggtgagcgtaagtggggagggaaatgggtaagaagtctactccaaacctaggtctctatgtcagaccagacctaggtgcttctctaggagggaaacagggagacctggggtcctgtggataactgagtggggagtctgccaggggagggcaccttcccattgtgccttctgtgtgtattgtgcattaacctcttcctcaccactaggcttctggggctgggtcccacatgcccttgaccctgacaataaagttctctatttttggaaaaaaaaaaaaaaaaaaaaaaaaaaaaaaaaaaaaaaaaaaaaaaaaaaaaaaaa

SEQ ID NO: 13381 - DNA, 4779 bp, Homo sapiens
cgcaaagccgccgggctgctgcgcccagagccagccggagccggagccggagcccgaactgcagctccagccccagccgtgcggagccgcagcccaggccggggccggcggcggctcatggacagcggggcgggcggccggcgctgcccggaggcggccctcctgattctggggcctcccaggatggagcacctgaggcacagcccaggccctggggggcaacggctactgctgccctccatgctgctagcactgctgctcctgctggctccatccccaggccacgccactcgggtagtgtacaaggtgccggaggaacagccacccaacaccctcattgggagcctcgcagccgactatggttttccagatgtggggcacctgtacaagctagaggtgggtgccccgtaccttcgcgtggatggcaagacaggtgacattttcaccaccgagacctccatcgaccgtgaggggctccgtgaatgccagaaccagctccctggtgatccctgcatcctggagtttgaggtatctatcacagacctcgtgcagaatggcagcccccggctgctagagggccagatagaagtacaagacatcaatgacaacacacccaacttcgcctcaccagtcatcactctggccatccctgagaacaccaacatcggctcactcttccccatcccgctggcttcagaccgtgatgctggtcccaacggtgtggcatcctatgagctgcaggctgggcctgaggcccaggagctatttgggctgcaggtggcagaggaccaggaggagaagcaaccacagctcattgtgatgggcaacctggaccgtgagcgctgggactcctatgacctcaccatcaaggtgcaggatggcggcagccccccacgcgccagcagtgccctgctgcgtgtcaccgtgcttgacaccaatgacaacgcccccaagtttgagcggccctcctatgaggccgaactatctgagaatagccccataggccactcggtcatccaggtgaaggccaatgactcagaccaaggtgccaatgcagaaatcgaatacacattccaccaggcgcccgaagttgtgaggcgtcttcttcgactggacaggaacactggacttatcactgttcagggcccggtggaccgtgaggacctaagcaccctgcgcttctcagtgcttgctaaggaccgaggcaccaaccccaagagtgcccgtgcccaggtggttgtgaccgtgaaggacatgaatgacaatgcccccaccattgagatccggggcatagggctagtgactcatcaagatgggatggctaacatctcagaggatgtggcagaggagacagctgtggccctggtgcaggtgtctgaccgagatgagggagagaatgcagctgtcacctgtgtggtggcaggtgatgtgcccttccagctgcgccaggccagtgagacaggcagtgacagcaagaagaagtatttcctgcagactaccaccccgctagactacgagaaggtcaaagactacaccattgagattgtggctgtggactctggcaaccccccactctccagcactaactccctcaaggtgcaggtggtggacgtcaatgacaacgcacctgtcttcactcagagtgtcactgaggtcgccttcccggaaaacaacaagcctggtgaagtgattgctgagatcactgccagtgatgctgactctggctctaatgctgagctggtttactctctggagcctgagccggctgctaagggcctcttcaccatctcacccgagactggagagatccaggtgaagacatctctggatcgggaacagcgggagagctatgagttgaaggtggtggcagctgaccggggcagtcctagcctccagggcacagccactgtccttgtcaatgtgctggactgcaatgacaatgaccccaaatttatgctgagtggctacaacttctcagtgatggagaacatgccagcactgagtccagtgggcatggtgactgtcattgatggagacaagggggagaatgcccaggtgcagctctcagtggagcaggacaacggtgactttgttatccagaatggcacaggcaccatcctatccagcctgagctttgatcgagagcaacaaagcacctacaccttccagctgaaggcagtggatggtggcgtcccacctcgctcagcttacgttggtgtcaccatcaatgtgctggacgagaatgacaacgcaccctatatcactgccccttctaacacctctcacaagctgctgaccccccagacacgtcttggtgagacggtcagccaggtggcagccgaggactttgactctggtgtcaatgctgagctgatctacagcattgcaggtggcaacccttatggactcttccagattgggtcacattcaggtgccatcaccctggagaaggagattgagcggcgccaccatgggctacaccgcctggtggtgaaggtcagtgaccgcggcaagcccccacgctatggcacagccttggtccatctttatgtcaatgagactctggccaaccgcacgctgctggagaccctcctgggccacagcctggacacgccgctggatattgacattgctggggatccagaatatgagcgctccaagcagcgtggcaacattctctttggtgtggtggctggtgtggtggccgtggccttgctcatcgccctggcggttcttgtgcgctactgcagacagcgggaggccaaaagtggttaccaggctggtaagaaggagaccaaggacctgtatgcccccaagcccagtggcaaggcctccaagggaaacaaaagcaaaggcaagaagagcaagtccccaaagcccgtgaagccagtggaggacgaggatgaggccgggctgcagaagtccctcaagttcaacctgatgagcgatgcccctggggacagtccccgcatccacctgcccctcaactacccaccaggcagccctgacctgggccgccactatcgctctaactccccactgccttccatccagctgcagccccagtcaccctcagcctccaagaagcaccaggtggtacaggacctgccacctgcaaacacattcgtgggcaccggggacaccacgtccacgggctctgagcagtactccgactacagctaccgcaccaacccccccaaataccccagcaagcagttacctcaccgccgcgtcaccttctcggccaccagccaggcccaggagctgcaggacccatcccagcacagttactatgacagtggcctggaggagtctgagacgccgtccagcaagtcatcctcagggcctcgactcggtcccctggccctgcctgaggatcactatgagcgcaccacccctgatggcagcataggagagatggagcaccccgagaatgaccttcgccctttgcctgatgtcgccatgacaggcacatgtacccgggagtgcagtgagtttggccactctgacacatgctggatgcctggccagtcatctcccagccgccggaccaagagcagcgccctcaaactctccaccttcgtgccttaccaggaccgaggagggcaggagcctgcgggcgccggcagccccagccccccggaagaccggaacaccaaaacggcccccgtgcgcctcctgccctcctacagtgccttctcccacagtagccatgattcctgcaaggactcggccaccttggaggaaatccccctgacccagacctcggacttcccacccgcagccacaccggcatctgcccagacggccaagcgcgagatctacctgtgagccccctactggccggccggcccccctcccccagccgccggccagctcccaaatggcccattccagggcctcactctccaccccttcagcgtggacttcctggccagggccccaagtgggggtatcactgacctcatgaccacgctggcccttctcccatgcagggtccaggtcctctcccctcatttccatctcccagcccccaggggccccttcccctttatggggcttcccccatctgatgcccaagagggctcctctgcaatgactgggctccttcccttgacttccagggagcaccccctcgatttgggcagatggtggagtcaagggtgggcagcgtacttctaactcattgtttccctcatggccgaccagggcggggatagcatgcccaattttagccctgaagcagggctgaactggggagcccctttccctgggagctcccagaggaaactcttgaccaccagtggctccctgaagggcttttgttaccaaaggtggggtagggacgggggtgggagtggagcggaggccttgttttcccgtgctgctcctggactggcccacctgcctgccacatgcccacgcctagtcccatctgggcccccattccctgctggtcatgcagtgtctgtatataaggaccttggaatgacgtccccatttctgcctgatttgcaacttttcttgttgatgtcgtgttgtcttgggggacccctctggggggggacctgccctgtgccccctcctccctgccgcagtgccccccaacccaggcctctattgttccatgttgtaaatacccctggggccatggtgggatgggggtgcaggccagggaaacaacgggtgggtgggggtggggacgggggtaacatttgcctatcagcagagctgggcttttatttaatttttcttaaaaatacaaaaaaaaaaaaaaaa

SEQ ID NO: 13382 - DNA, 1738 bp, Homo sapiens
cttcctccaggagtctctggtgcagctggggtggaatctggccaggccctgcttaggcccccatcctggggtcaggaaatttggaggataaggcccttcagccccaaggttgtcctcgaccagtcccgtgccatggcagcccacctgcttcccatctgcgccctcttcctgaccttactcgatatggcccaaggctttaggggccccttgctacccaaccggcccttcaccaccgtctggaatgcaaacacccagtggtgcctggagaggcacggtgtggacgtggatgtcagtgtcttcgatgtggtagccaacccagggcagaccttccgcggccctgacatgacaattttctatagctcccagctgggcacctacccctactacacgcccactggggagcctgtgtttggtggtctgccccagaatgccagcctgattgcccacctggcccgcacattccaggacatcctggctgccatacctgctcctgacttctcagggctggcagtcatcgactgggaggcatggcgcccacgctgggccttcaactgggacaccaaggacatttaccggcagcgctcacgggcactggtacaggcacagcaccctgattggccagctcctcaggtggaggcagtagcccaggaccagttccagggagctgcacgggcctggatggcaggcaccctccagctggggcgggcactgcgtcctcgcggcctctggggcttctatggcttccctgactgctctgggtgagctgggaaaatacaagaaccaaggaatcatgtcaggccatcaaggagtatatggacactacactggggcccttcatcctgaacgtgaccagtggggcccttctctgcagtcaagccctgtgctccggccatggccgctgtgtccgccgcaccagccaccccaaagccctcctcctccttaaccctgccagtttctccatccagctcacgcctggtggtgggcccctgagcctgcggggtgccctctcacttgaagatcaggcacagatggctgtggagttcaaatgtcgatgctaccctggctggcaggcaccgtggtgtgagcggaagagcatgtggtgattggccacacactgagttgcacatattgagaacctaatgcactctgggtctggccagggcttcctcaaatacatgcacagtcatacaagtcatggtcacagtaaagagtacactcagccactgtcacaggcatattccctgcacacacatgcatacttacagactggaatagtggcataaggagttagaaccacagcagacaccattcattccatgtccatatgcatctacttggcaaggtcatagacaattcctccagagacactgagccagtctttgaactgcagcaatcacaaaggctgacattcactgagtgcctactctttgccaatccccgtgctaagcgttttatgtggacttattcattcctcacaatgaggctatgaggaaactgagtcactcacattgagagtaagcacgttgcccaaggttgcacagcaagaaaagggagaagttgagattcaaacccaggctgtctagctccgggggtacagcccttgcactcctactgagtttgtggtaaccagccctgcacgacccctgaatctgctgagaggcaccagtccagcaaataaagcagtcatgatttacttaaaaaaaaaaaaaaaaaaaaaaaaaaaaaaaaaaaaaaaaaa

SEQ ID NO: 13383 - DNA, 2518 bp, Homo sapiens
cttcctccaggagtctctggtgcagctggggtggaatctggccaggccctgcttaggcccccatcctggggtcaggaaatttggaggataaggcccttcagccccaaggtcagcagggacgagcgggcagactggcgggtgtacaggagggctgggttgacctgtccttggtcactgaggccattggatcttcctccagtggctgccaggatttctggtggaagagacaggaaggcctcccccccttggtcgggtcagcctgggggctgagggcctggctgtcagccactcttcccagaacatatgtcatggcctcagtggctcatggggaagcaggggtgggcgagcttaggctagagcaagtcctgtgggagatggcagaggcctggtctgagaggcaactcggatgtgccctccagtggccatgctcccctccatgcgtctcccctgccctcctggagccctgcaggtcaatgtttaacagaaaccagagcagcggtggattaatgcgcaagggctcagccccccagccctgagcagtgggggaatcggagactttgcaacctgttctcagctctgcctcccctggccaggttgtcctcgaccagtcccgtgccatggcagcccacctgcttcccatctgcgccctcttcctgaccttactcgatatggcccaaggctttaggggccccttgctacccaaccggcccttcaccaccgtctggaatgcaaacacccagtggtgcctggagaggcacggtgtggacgtggatgtcagtgtcttcgatgtggtagccaacccagggcagaccttccgcggccctgacatgacaattttctatagctcccagctgggcacctacccctactacacgcccactggggagcctgtgtttggtggtctgccccagaatgccagcctgattgcccacctggcccgcacattccaggacatcctggctgccatacctgctcctgacttctcagggctggcagtcatcgactgggaggcatggcgcccacgctgggccttcaactgggacaccaaggacatttaccggcagcgctcacgggcactggtacaggcacagcaccctgattggccagctcctcaggtggaggcagtagcccaggaccagttccagggagctgcacgggcctggatggcaggcaccctccagctggggcgggcactgcgtcctcgcggcctctggggcttctatggcttccctgactgctacaactatgactttctaagccccaactacaccggccagtgcccatcaggcatccgtgcccaaaatgaccagctagggtggctgtggggccagagccgtgccctctatcccagcatctacatgcccgcagtgctggagggcacagggaagtcacagatgtatgtgcaacaccgtgtggccgaggcattccgtgtggctgtggctgctggtgaccccaatctgccggtgctgccctatgtccagatcttctatgacacgacaaaccactttctgcccctggatgagctggagcacagcctgggggagagtgcggcccagggggcagctggagtggtgctctgggtgagctgggaaaatacaagaaccaaggaatcatgtcaggccatcaaggagtatatggacactacactggggcccttcatcctgaacgtgaccagtggggcccttctctgcagtcaagccctgtgctccggccatggccgctgtgtccgccgcaccagccaccccaaagccctcctcctccttaaccctgccagtttctccatccagctcacgcctggtggtgggcccctgagcctgcggggtgccctctcacttgaagatcaggcacagatggctgtggagttcaaatgtcgatgctaccctggctggcaggcaccgtggtgtgagcggaagagcatgtggtgattggccacacactgagttgcacatattgagaacctaatgcactctgggtctggccagggcttcctcaaatacatgcacagtcatacaagtcatggtcacagtaaagagtacactcagccactgtcacaggcatattccctgcacacacatgcatacttacagactggaatagtggcataaggagttagaaccacagcagacaccattcattccatgtccatatgcatctacttggcaaggtcatagacaattcctccagagacactgagccagtctttgaactgcagcaatcacaaaggctgacattcactgagtgcctactctttgccaatccccgtgctaagcgttttatgtggacttattcattcctcacaatgaggctatgaggaaactgagtcactcacattgagagtaagcacgttgcccaaggttgcacagcaagaaaagggagaagttgagattcaaacccaggctgtctagctccgggggtacagcccttgcactcctactgagtttgtggtaaccagccctgcacgacccctgaatctgctgagaggcaccagtccagcaaataaagcagtcatgatttactt

SEQ ID NO: 13384 - DNA, 2075 bp, Homo sapiens
cttcctccaggagtctctggtgcagctggggtggaatctggccaggccctgcttaggcccccatcctggggtcaggaaatttggaggataaggcccttcagccccaaggttgtcctcgaccagtcccgtgccatggcagcccacctgcttcccatctgcgccctcttcctgaccttactcgatatggcccaaggctttaggggccccttgctacccaaccggcccttcaccaccgtctggaatgcaaacacccagtggtgcctggagaggcacggtgtggacgtggatgtcagtgtcttcgatgtggtagccaacccagggcagaccttccgcggccctgacatgacaattttctatagctcccagctgggcacctacccctactacacgcccactggggagcctgtgtttggtggtctgccccagaatgccagcctgattgcccacctggcccgcacattccaggacatcctggctgccatacctgctcctgacttctcagggctggcagtcatcgactgggaggcatggcgcccacgctgggccttcaactgggacaccaaggacatttaccggcagcgctcacgggcactggtacaggcacagcaccctgattggccagctcctcaggtggaggcagtagcccaggaccagttccagggagctgcacgggcctggatggcaggcaccctccagctggggcgggcactgcgtcctcgcggcctctggggcttctatggcttccctgactgctacaactatgactttctaagccccaactacaccggccagtgcccatcaggcatccgtgcccaaaatgaccagctagggtggctgtggggccagagccgtgccctctatcccagcatctacatgcccgcagtgctggagggcacagggaagtcacagatgtatgtgcaacaccgtgtggccgaggcattccgtgtggctgtggctgctggtgaccccaatctgccggtgctgccctatgtccagatcttctatgacacgacaaaccactttctgcccctggatgagctggagcacagcctgggggagagtgcggcccagggggcagctggagtggtgctctgggtgagctgggaaaatacaagaaccaaggaatcatgtcaggccatcaaggagtatatggacactacactggggcccttcatcctgaacgtgaccagtggggcccttctctgcagtcaagccctgtgctccggccatggccgctgtgtccgccgcaccagccaccccaaagccctcctcctccttaaccctgccagtttctccatccagctcacgcctggtggtgggcccctgagcctgcggggtgccctctcacttgaagatcaggcacagatggctgtggagttcaaatgtcgatgctaccctggctggcaggcaccgtggtgtgagcggaagagcatgtggtgattggccacacactgagttgcacatattgagaacctaatgcactctgggtctggccagggcttcctcaaatacatgcacagtcatacaagtcatggtcacagtaaagagtacactcagccactgtcacaggcatattccctgcacacacatgcatacttacagactggaatagtggcataaggagttagaaccacagcagacaccattcattccatgtccatatgcatctacttggcaaggtcatagacaattcctccagagacactgagccagtctttgaactgcagcaatcacaaaggctgacattcactgagtgcctactctttgccaatccccgtgctaagcgttttatgtggacttattcattcctcacaatgaggctatgaggaaactgagtcactcacattgagagtaagcacgttgcccaaggttgcacagcaagaaaagggagaagttgagattcaaacccaggctgtctagctccgggggtacagcccttgcactcctactgagtttgtggtaaccagccctgcacgacccctgaatctgctgagaggcaccagtccagcaaataaagcagtcatgatttacttaaaaaaaaaaaaaaaaaaaaaaaaaaaaaaaaaaaaaaaaaa

SEQ ID NO: 13385 - DNA, 2370 bp, Homo sapiens
agatgtggggagcgcctctgccctgtcgccccgtccgggatgtgaggagcgtctctccctggccgccccgtctgagaagtgaggagcccctccgcccagcagccgccctgtctgagaagctagtcttgaattcctgacctcaggtgatcctcccgcgttggcctcccaaagtgctgggattacaggcatgagccaccactcctggccccagaaagtgacattctttacttaccacaggaggaaaagatccacgaaagtaaagtgcctagggcccatcaatgtcagatgcagccacgtggacaaagaacactccctgagcacaagacacgaaagaacccggtctccagtgtcacaaacaggcctgcccagcagggtctgcccctgcccacctcctccagcctaggttgtcctcgaccagtcccgtgccatggcagcccacctgcttcccatctgcgccctcttcctgaccttactcgatatggcccaaggctttaggggccccttgctacccaaccggcccttcaccaccgtctggaatgcaaacacccagtggtgcctggagaggcacggtgtggacgtggatgtcagtgtcttcgatgtggtagccaacccagggcagaccttccgcggccctgacatgacaattttctatagctcccagctgggcacctacccctactacacgcccactggggagcctgtgtttggtggtctgccccagaatgccagcctgattgcccacctggcccgcacattccaggacatcctggctgccatacctgctcctgacttctcagggctggcagtcatcgactgggaggcatggcgcccacgctgggccttcaactgggacaccaaggacatttaccggcagcgctcacgggcactggtacaggcacagcaccctgattggccagctcctcaggtggaggcagtagcccaggaccagttccagggagctgcacgggcctggatggcaggcaccctccagctggggcgggcactgcgtcctcgcggcctctggggcttctatggcttccctgactgctacaactatgactttctaagccccaactacaccggccagtgcccatcaggcatccgtgcccaaaatgaccagctagggtggctgtggggccagagccgtgccctctatcccagcatctacatgcccgcagtgctggagggcacagggaagtcacagatgtatgtgcaacaccgtgtggccgaggcattccgtgtggctgtggctgctggtgaccccaatctgccggtgctgccctatgtccagatcttctatgacacgacaaaccactttctgcccctggatgagctggagcacagcctgggggagagtgcggcccagggggcagctggagtggtgctctgggtgagctgggaaaatacaagaaccaaggaatcatgtcaggccatcaaggagtatatggacactacactggggcccttcatcctgaacgtgaccagtggggcccttctctgcagtcaagccctgtgctccggccatggccgctgtgtccgccgcaccagccaccccaaagccctcctcctccttaaccctgccagtttctccatccagctcacgcctggtggtgggcccctgagcctgcggggtgccctctcacttgaagatcaggcacagatggctgtggagttcaaatgtcgatgctaccctggctggcaggcaccgtggtgtgagcggaagagcatgtggtgattggccacacactgagttgcacatattgagaacctaatgcactctgggtctggccagggcttcctcaaatacatgcacagtcatacaagtcatggtcacagtaaagagtacactcagccactgtcacaggcatattccctgcacacacatgcatacttacagactggaatagtggcataaggagttagaaccacagcagacaccattcattccatgtccatatgcatctacttggcaaggtcatagacaattcctccagagacactgagccagtctttgaactgcagcaatcacaaaggctgacattcactgagtgcctactctttgccaatccccgtgctaagcgttttatgtggacttattcattcctcacaatgaggctatgaggaaactgagtcactcacattgagagtaagcacgttgcccaaggttgcacagcaagaaaagggagaagttgagattcaaacccaggctgtctagctccgggggtacagcccttgcactcctactgagtttgtggtaaccagccctgcacgacccctgaatctgctgagaggcaccagtccagcaaataaagcagtcatgatttacttaaaaaaaaaaaaaaaaaaaaaaaaaaaaaaaaaaaaaaaaaa

SEQ ID NO: 13386 - DNA, 1985 bp, Homo sapiens
cttcctccaggagtctctggtgcagctggggtggaatctggccaggccctgcttaggcccccatcctggggtcaggaaatttggaggataaggcccttcagccccaaggttgtcctcgaccagtcccgtgccatggcagcccacctgcttcccatctgcgccctcttcctgaccttactcgatatggcccaaggctttaggggccccttgctacccaaccggcccttcaccaccgtctggaatgcaaacacccagtggtgcctggagaggcacggtgtggacgtggatgtcagtgtcttcgatgtggtagccaacccagggcagaccttccgcggccctgacatgacaattttctatagctcccagctgggcacctacccctactacacgcccactggggagcctgtgtttggtggtctgccccagaatgccagcctgattgcccacctggcccgcacattccaggacatcctggctgccatacctgctcctgacttctcagggctggcagtcatcgactgggaggcatggcgcccacgctgggccttcaactgggacaccaaggacatttaccggcagcgctcacgggcactggtacaggcacagcaccctgattggccagctcctcaggtggaggcagtagcccaggaccagttccagggagctgcacgggcctggatggcaggcaccctccagctggggcgggcactgcgtcctcgcggcctctggggcttctatggcttccctgactgctacaactatgactttctaagccccaactacaccggccagtgcccatcaggcatccgtgcccaaaatgaccagctagggtggctgtggggccagagccgtgccctctatcccagcatctacatgcccgcagtgctggagggcacagggaagtcacagatgtatgtgcaacaccgtgtggccgaggcattccgtgtggctgtggctgctggtgaccccaatctgccggtgctgccctatgtccagatcttctatgacacgacaaaccactttctgcccctggaatcatgtcaggccatcaaggagtatatggacactacactggggcccttcatcctgaacgtgaccagtggggcccttctctgcagtcaagccctgtgctccggccatggccgctgtgtccgccgcaccagccaccccaaagccctcctcctccttaaccctgccagtttctccatccagctcacgcctggtggtgggcccctgagcctgcggggtgccctctcacttgaagatcaggcacagatggctgtggagttcaaatgtcgatgctaccctggctggcaggcaccgtggtgtgagcggaagagcatgtggtgattggccacacactgagttgcacatattgagaacctaatgcactctgggtctggccagggcttcctcaaatacatgcacagtcatacaagtcatggtcacagtaaagagtacactcagccactgtcacaggcatattccctgcacacacatgcatacttacagactggaatagtggcataaggagttagaaccacagcagacaccattcattccatgtccatatgcatctacttggcaaggtcatagacaattcctccagagacactgagccagtctttgaactgcagcaatcacaaaggctgacattcactgagtgcctactctttgccaatccccgtgctaagcgttttatgtggacttattcattcctcacaatgaggctatgaggaaactgagtcactcacattgagagtaagcacgttgcccaaggttgcacagcaagaaaagggagaagttgagattcaaacccaggctgtctagctccgggggtacagcccttgcactcctactgagtttgtggtaaccagccctgcacgacccctgaatctgctgagaggcaccagtccagcaaataaagcagtcatgatttacttaaaaaaaaaaaaaaaaaaaaaaaaaaaaaaaaaaaaaaaaaa

SEQ ID NO: 13387 - DNA, 1595 bp, Homo sapiens
tctccggattctgttaacggtagtggtggcttgttgggatccgttgagtgatgggagagtgtgctctttaacttcggagagagatgcgctctcgtgtagccgtcagggcctgccataaggtctgcaggtgcctgttgtctgggtttgggggtcgagtagatgcggggcagccggagctgttgacggaaaggagtagccccaaaggagggcatgtgaagtcgcacgcggagctcgaggggaacggcgagcacccagaagcccccgggtctggagagggaagcgaggcgctgttagagatctgtcagagaaggcatttcctaagtggaagcaagcagcagcttagccgggattctcttctgagtgggtgccaccccggcttcggacccttgggcgtagagttgcggaagaacctggccgcagaatggtggacctcggtggtggtgttcagggagcaggtattcccggtggacgccctccaccacaaaccaggccctttgctacccggggacagtgccttcaggttagtttctgcagaaactctacgcgaaatcttgcaagacaaagagctgagtaaggaacagctagtagcatttcttgagaacgtattaaaaacttctgggaaactacgggagaaccttcttcacggtgccttggaacactatgttaattgcctggatctggtaaacaagaggctaccttatggccttgctcagattggagtgtgttttcatcctgtttttgacactaagcagatacgaaatggtgttaaaagtattggtgagaagactgaagcttcgttagtatggtttactcctccgagaacttcaaaccagtggcttgatttctggttacgtcatcgactccagtggtggagaaagtttgccatgagtccatctaacttcagcagcagtgactgtcaggatgaagaaggccggaaaggaaacaaactttactacaattttccctggggaaaggagttaatagaaaccctgtggaacctaggagatcacgaacttttacacatgtatcctggcaatgtgtctaaattacatggccgagatggacgaaaaaatgtggttccttgtgttctctctgtaaatggggacctagaccgaggcatgctggcctacctctatgattctttccagctgacagagaactcctttacaagaaagaaaaatcttcatagaaaggtacttaaacttcacccttgtttagcccctattaaggttgctttggatgtaggaagaggccccacattggaactaagacaggtttgtcaagggctatttaatgagttactagaaaatgggatttctgtgtggcctggttatttggaaactatgcagtcctcattggaacaactttattcgaagtatgatgaaatgagtattctcttcacagttttggttactgaaactactttggagaatggattaatacatctgagaagcagagacaccacaatgaaggaaatgatgcatatatccaaattaaaagactttttgattaagtatatatcatcagctaagaatgtatagatttttatatttgtataataaatattcttctctcctaaaaaaaaaaaaaaaaaa

SEQ ID NO: 13388 - DNA, 1345 bp, Homo sapiens
tatggacccaggacaggtttgtcccatgacctgctgtgaacagtgtgttgtctgatagaagattcggttggcaaaccatctctctattgccttacagagcaagcaaagaagatggatcgattgaagagccatctgactgtgtgctttctaccttctgtgccctttttaatcctagtatccactctagccaccgctaagagtgtgactaacagcactttaaatggcactaacgtggtcttgggctctgtgcccgtaatcattgccagaactgaccatatcatagtcaaggaagggaacagtgccttgattaactgtagtgtttatggcatccctgacccacagttcaagtggtataattccattggcaagctgctgaaagaagaagaggatgagaaggagagaggaggaggaaaatggcaaatgcacgacagcggcctcctgaacatcaccaaggtatccttctcagaccgaggtaaatacacgtgtgtggcttctaacatctacggcaccgtgaacaacacggtgaccttgcgcgtcatcttcacttctggagacatgggtgtctactacatggtcgtgtgcctggtggccttcaccatcgtcatggtcctcaatatcacccgcctgtgcatgatgagcagccatctaaagaagactgagaaggccatcaatgagttctttaggaccgaaggtgcagagaagctgcagaaggcatttgagatcgccaagcgcatccccatcatcacctccgccaaaactctagagcttgccaaagtcacccagttcaaaaccatggagttcgcccgctacatcgaagagcttgccaggagcgtgcctctgccgcctctcattatgaactgcaggactatcatggaggagattatggaggtggttgggctggaggagcaggggcagaattttgtgaggcatactccagagggccaggaggccgcagacagggatgaggtctacacaatccccaactctctgaagcggagcgactcccctgccgctgactcggacgcctcatcgctgcacgagcaacctcagcaaattgccatcaaggtgtcagttcacccgcagtccaaaaaagagcatgcagatgaccaagagggtggacagtttgaagtcaaagatgtagaggagacagaactgtcggcggaacattcccccgaaactgcagaaccttctaccaatgtcacgtccaccgagctaacatctgaagagccaacacctgttgaggtaccagataaggtactgccgccagcttacctggaagccacagagccagcagtgacacatgacaaaaacacctgcattatttacgaaagccatgtctaatacc

SEQ ID NO: 13389 - DNA, 3389 bp, Homo sapiens
gtcggtgtgacaactgatcgggtgaacgatgcaccactaaccaccatggaaacaaggaaaaataaagcaagctcacaggatctctcttcactggattgagagcctcagcctgccgactgagaaaaagagttccaggaaaaagaaggaatcccggctgcagcctcctgccttcctttatattttaaaatagagagataagattgcgtgcatgtgtgcatatctatagtatatattttgtacactttgttacacagacacacaaatgcacctatttataccgggcaagaacacaaccatgtgattatctcaaccaaggaactgaggaatccagcacgcaaggacatcggaggtgggctagcactgaaactgcttttcaagcatcatgctgctattcctgcaaatactgaagaagcatgggatttaaatattttacttctaaataaatgaattactcaatctcctatgaccatctatacatactccaccttcaaaaagtacatcaatattatatcattaaggaaatagtaaccttctcttctccaatatgcatgacatttttggacaatgcaattgtggcactggcacttgtttcagtgaagaaaaactttgtggttctatggcattcatcatttgacaaatgcaagcatcttccttatcaatcagctcctattgaacttactagcactgactgtggaatccttaagggcccattacatttctgaagaagaaagctaagatgaaggacatgccactccgaattcatgtgctacttggcctagctatcactacactagtacaagctgtagataaaaaagtggattgtccacggttatgtacgtgtgaaatcaggccttggtttacacccagatccatttatatggaagcatctacagtggattgtaatgatttaggtcttttaactttcccagccagattgccagctaacacacagattcttctcctacagactaacaatattgcaaaaattgaatactccacagactttccagtaaaccttactagcctggatttatctcaaaacaatttatcttcagtcaccaatattaatgtaaaaaagatgcctcagctcctttctgtgtacctagaggaaaacaaacttactgaactgcctgaaaaatgtctgtccgaactgagcaacttacaagaactctatattaatcacaacttgctttctacaatttcacctggagcctttattggcctacataatcttcttcgacttcatctcaattcaaatagattgcagatgatcaacagtaagtggtttgatgctcttccaaatctagagattctgatgattggggaaaatccaattatcagaatcaaagacatgaactttaagcctcttatcaatcttcgcagcctggttatagctggtataaacctcacagaaataccagataacgccttggttggactggaaaacttagaaagcatctctttttacgataacaggcttattaaagtaccccatgttgctcttcaaaaagttgtaaatctcaaatttttggatctaaataaaaatcctattaatagaatacgaaggggtgattttagcaatatgctacacttaaaagagttggggataaataatatgcctgagctgatttccatcgatagtcttgctgtggataacctgccagatttaagaaaaatagaagctactaacaaccctagattgtcttacattcaccccaatgcatttttcagactccccaagctggaatcactcatgctgaacagcaatgctctcagtgccctgtaccatggtaccattgagtctctgccaaacctcaaggaaatcagcatacacagtaaccccatcaggtgtgactgtgtcatccgttggatgaacatgaacaaaaccaacattcgattcatggagccagattcactgttttgcgtggacccacctgaattccaaggtcagaatgttcggcaagtgcatttcagggacatgatggaaatttgtctccctcttatagctcctgagagctttccttctaatctaaatgtagaagctgggagctatgtttcctttcactgtagagctactgcagaaccacagcctgaaatctactggataacaccttctggtcaaaaactcttgcctaataccctgacagacaagttctatgtccattctgagggaacactagatataaatggcgtaactcccaaagaagggggtttatatacttgtatagcaactaacctagttggcgctgacttgaagtctgttatgatcaaagtggatggatcttttccacaagataacaatggctctttgaatattaaaataagagatattcatgccaattcagttttggtgtcctggaaagcaagttctaaaattctcaaatctagtgttaaatggacagcctttgtcaagactgaaaattctcatgctgcgcaaagtgctcgaataccatctgatgtcaaggtatataatcttactcatctgaatccatcaactgagtataaaatttgtattgatattcccaccatctatcagaaaaacagaaaaaaatgtgtaaatgtcaccaccaaaggtttgcaccctgatcaaaaagagtatgaaaagaataataccacaacacttatggcctgtcttggaggccttctggggattattggtgtgatatgtcttatcagctgcctctctccagaaatgaactgtgatggtggacacagctatgtgaggaattacttacagaaaccaacctttgcattaggtgagctttatcctcctctgataaatctctgggaagcaggaaaagaaaaaagtacatcactgaaagtaaaagcaactgttataggtttaccaacaaatatgtcctaaaaaccaccaaggaaacctactccaaaaatgaacaaaaaaaaaaaaagcgaaagactgcagttgtgctaaaaacaaaacaaaacaaacaaacaaacaaaaaagtaaaaaaagattactttcgagagagaagtttaagcttcaccaatgctgctcctgaccaatggaaatatgtacaacttcagcattttaagtaactggcttcaaggggtactgtggcaaccaaataaaataactccattttctaaaactttcatgtaacttttatgtctggactacagttcaagtggacaaaaacatttctgtattttttttaagtaaataagagtagttgaactgagcaatacctcctcctgtgttgtattacacatattagccacgagtttttgcagtgaccagataaacttgaattgacacgtggtgtaataaaatggacaaattctgtagagtagacacagtgagtatgtggacctcttttataaggaaaaatacattttggattaaaatcaaaaaaaaaaaaaaaaaaaaa

SEQ ID NO: 13390 - DNA, 1496 bp, Homo sapiens
gactccgggtggcaggcgcccgggggaatcccagctgactcgctcactgccttcgaagtccggcgccccccgggagggaactgggtggccgcaccctcccggctgcggtggctgtcgccccccaccctgcagccaggactcgatggagaatccattccaatatatggccatgtggctctttggagcaatgttccatcatgttccatgctgctgctgacgtcacatggagcacagaaatcaatgttagcagatagccagcccatacaagatcgtattgtattgtaggaggcatcgtggatggatggctgctggaaaccccttgccatagccagctcttcttcaatacttaaggatttaccgtggctttgagtaatgagaatttcgaaaccacatttgagaagtatttccatccagtgctacttgtgtttacttctaaacagtcattttctaactgaagctggcattcatgtcttcattttgggctgtttcagtgcagggcttcctaaaacagaagccaactgggtgaatgtaataagtgatttgaaaaaaattgaagatcttattcaatctatgcatattgatgctactttatatacggaaagtgatgttcaccccagttgcaaagtaacagcaatgaagtgctttctcttggagttacaagttatttcacttgagtccggagatgcaagtattcatgatacagtagaaaatctgatcatcctagcaaacaacagtttgtcttctaatgggaatgtaacagaatctggatgcaaagaatgtgaggaactggaggaaaaaaatattaaagaatttttgcagagttttgtacatattgtccaaatgttcatcaacacttcttgattgcaattgattctttttaaagtgtttctgttattaacaaacatcactctgctgcttagacataacaaaacactcggcatttcaaatgtgctgtcaaaacaagtttttctgtcaagaagatgatcagaccttggatcagatgaactcttagaaatgaaggcagaaaaatgtcattgagtaatatagtgactatgaacttctctcagacttactttactcatttttttaatttattattgaaattgtacatatttgtggaataatgtaaaatgttgaataaaaatatgtacaagtgttgttttttaagttgcactgatattttacctcttattgcaaaatagcatttgtttaagggtgatagtcaaattatgtattggtggggctgggtaccaatgctgcaggtcaacagctatgctggtaggctcctgccagtgtggaaccactgactactggctctcattgacttccttactaagcatagcaaacagaggaagaatttgttatcagtaagaaaaagaagaactatatgtgaatcctcttctttatactgtaatttagttattgatgtataaagcaactgttatgaaataaagaaattgcaataactggcaaaaaaaaaaaaaaaaaaaaaaaaa

SEQ ID NO: 13391 - DNA, 1969 bp, Homo sapiens
gactccgggtggcaggcgcccgggggaatcccagctgactcgctcactgccttcgaagtccggcgccccccgggagggaactgggtggccgcaccctcccggctgcggtggctgtcgccccccaccctgcagccaggactcgatggaggtacagagctcggcttctttgccttgggaggggagtggtggtggttgaaagggcgatggaattttccccgaaagcctacgcccagggcccctcccagctccagcgttaccctccggtctatcctactggccgagctgccccgccttctcatggggaaaacttagccgcaacttcaatttttggtttttcctttaatgacacttctgaggctctcctagccatcctcccgcttccggaggagcgcagatcgcaggtccctttgcccctggcgtgcgactccctactgcgctgcgctcttacggcgttccaggctgctggctagcgcaaggcgggccgggcaccccgcgctccgctgggagggtgagggacgcgcgtctggcggccccagccaagctgcgggtttctgagaagacgctgtcccgcagccctgagggctgagttctgcacccagtcaagctcaggaaggccaagaaaagaatccattccaatatatggccatgtggctctttggagcaatgttccatcatgttccatgctgctgacgtcacatggagcacagaaatcaatgttagcagatagccagcccatacaagatcgtattgtattgtaggaggcatcgtggatggatggctgctggaaaccccttgccatagccagctcttcttcaatacttaaggatttaccgtggctttgagtaatgagaatttcgaaaccacatttgagaagtatttccatccagtgctacttgtgtttacttctaaacagtcattttctaactgaagctggcattcatgtcttcattttgggctgtttcagtgcagggcttcctaaaacagaagccaactgggtgaatgtaataagtgatttgaaaaaaattgaagatcttattcaatctatgcatattgatgctactttatatacggaaagtgatgttcaccccagttgcaaagtaacagcaatgaagtgctttctcttggagttacaagttatttcacttgagtccggagatgcaagtattcatgatacagtagaaaatctgatcatcctagcaaacaacagtttgtcttctaatgggaatgtaacagaatctggatgcaaagaatgtgaggaactggaggaaaaaaatattaaagaatttttgcagagttttgtacatattgtccaaatgttcatcaacacttcttgattgcaattgattctttttaaagtgtttctgttattaacaaacatcactctgctgcttagacataacaaaacactcggcatttcaaatgtgctgtcaaaacaagtttttctgtcaagaagatgatcagaccttggatcagatgaactcttagaaatgaaggcagaaaaatgtcattgagtaatatagtgactatgaacttctctcagacttactttactcatttttttaatttattattgaaattgtacatatttgtggaataatgtaaaatgttgaataaaaatatgtacaagtgttgttttttaagttgcactgatattttacctcttattgcaaaatagcatttgtttaagggtgatagtcaaattatgtattggtggggctgggtaccaatgctgcaggtcaacagctatgctggtaggctcctgccagtgtggaaccactgactactggctctcattgacttccttactaagcatagcaaacagaggaagaatttgttatcagtaagaaaaagaagaactatatgtgaatcctcttctttatactgtaatttagttattgatgtataaagcaactgttatgaaataaagaaattgcaataactggcaaaaaaaaaaaaaaaaaaaaaaaaa

SEQ ID NO: 13392 - DNA, 5361 bp, Homo sapiens
ctgcaaacccagcgcaactacggtcccccggtcagacccaggatggggccagaacggacaggggccgcgccgctgccgctgctgctggtgttagcgctcagtcaaggcattttaaattgttgtttggcctacaatgttggtctcccagaagcaaaaatattttccggtccttcaagtgaacagtttgggtatgcagtgcagcagtttataaatccaaaaggcaactggttactggttggttcaccctggagtggctttcctgagaaccgaatgggagatgtgtataaatgtcctgttgacctatccactgccacatgtgaaaaactaaatttgcaaacttcaacaagcattccaaatgttactgagatgaaaaccaacatgagcctcggcttgatcctcaccaggaacatgggaactggaggttttctcacatgtggtcctctgtgggcacagcaatgtgggaatcagtattacacaacgggtgtgtgttctgacatcagtcctgattttcagctctcagccagcttctcacctgcaactcagccctgcccttccctcatagatgttgtggttgtgtgtgatgaatcaaatagtatttatccttgggatgcagtaaagaattttttggaaaaatttgtacaaggccttgatataggccccacaaagacacaggtggggttaattcagtatgccaataatccaagagttgtgtttaacttgaacacatataaaaccaaagaagaaatgattgtagcaacatcccagacatcccaatatggtggggacctcacaaacacattcggagcaattcaatatgcaagaaaatatgcctattcagcagcttctggtgggcgacgaagtgctacgaaagtaatggtagttgtaactgacggtgaatcacatgatggttcaatgttgaaagctgtgattgatcaatgcaaccatgacaatatactgaggtttggcatagcagttcttgggtacttaaacagaaacgcccttgatactaaaaatttaataaaagaaataaaagcgatcgctagtattccaacagaaagatactttttcaatgtgtctgatgaagcagctctactagaaaaggctgggacattaggagaacaaattttcagcattgaaggtactgttcaaggaggagacaactttcagatggaaatgtcacaagtgggattcagtgcagattactcttctcaaaatgatattctgatgctgggtgcagtgggagcttttggctggagtgggaccattgtccagaagacatctcatggccatttgatctttcctaaacaagcctttgaccaaattctgcaggacagaaatcacagttcatatttaggttactctgtggctgcaatttctactggagaaagcactcactttgttgctggtgctcctcgggcaaattataccggccagatagtgctatatagtgtgaatgagaatggcaatatcacggttattcaggctcaccgaggtgaccagattggctcctattttggtagtgtgctgtgttcagttgatgtggataaagacaccattacagacgtgctcttggtaggtgcaccaatgtacatgagtgacctaaagaaagaggaaggaagagtctacctgtttactatcaaaaagggcattttgggtcagcaccaatttcttgaaggccccgagggcattgaaaacactcgatttggttcagcaattgcagctctttcagacatcaacatggatggctttaatgatgtgattgttggttcaccactagaaaatcagaattctggagctgtatacatttacaatggtcatcagggcactatccgcacaaagtattcccagaaaatcttgggatccgatggagcctttaggagccatctccagtactttgggaggtccttggatggctatggagatttaaatggggattccatcaccgatgtgtctattggtgcctttggacaagtggttcaactctggtcacaaagtattgctgatgtagctatagaagcttcattcacaccagaaaaaatcactttggtcaacaagaatgctcagataattctcaaactctgcttcagtgcaaagttcagacctactaagcaaaacaatcaagtggccattgtatataacatcacacttgatgcagatggattttcatccagagtaacctccagggggttatttaaagaaaacaatgaaaggtgcctgcagaagaatatggtagtaaatcaagcacagagttgccccgagcacatcatttatatacaggagccctctgatgttgtcaactctttggatttgcgtgtggacatcagtctggaaaaccctggcactagccctgcccttgaagcctattctgagactgccaaggtcttcagtattcctttccacaaagactgtggtgaggatggactttgcatttctgatctagtcctagatgtccgacaaataccagctgctcaagaacaaccctttattgtcagcaaccaaaacaaaaggttaacattttcagtaacactgaaaaataaaagggaaagtgcatacaacactggaattgttgttgatttttcagaaaacttgttttttgcatcattctccctaccggttgatgggacagaagtaacatgccaggtggctgcatctcagaagtctgttgcctgcgatgtaggctaccctgctttaaagagagaacaacaggtgacttttactattaactttgacttcaatcttcaaaaccttcagaatcaggcgtctctcagtttccaagccttaagtgaaagccaagaagaaaacaaggctgataatttggtcaacctcaaaattcctctcctgtatgatgctgaaattcacttaacaagatctaccaacataaatttttatgaaatctcttcggatgggaatgttccttcaatcgtgcacagttttgaagatgttggtccaaaattcatcttctccctgaaggtaacaacaggaagtgttccagtaagcatggcaactgtaatcatccacatccctcagtataccaaagaaaagaacccactgatgtacctaactggggtgcaaacagacaaggctggtgacatcagttgtaatgcagatatcaatccactgaaaataggacaaacatcttcttctgtatctttcaaaagtgaaaatttcaggcacaccaaagaattgaactgcagaactgcttcctgtagtaatgttacctgctggttgaaagacgttcacatgaaaggagaatactttgttaatgtgactaccagaatttggaacgggactttcgcatcatcaacgttccagacagtacagctaacggcagctgcagaaatcaacacctataaccctgagatatatgtgattgaagataacactgttacgattcccctgatgataatgaaacctgatgagaaagccgaagtaccaacaggagttataataggaagtataattgctggaatccttttgctgttagctctggttgcaattttatggaagctcggcttcttcaaaagaaaatatgaaaagatgaccaaaaatccagatgagattgatgagaccacagagctcagtagctgaaccagcagacctacctgcagtgggaaccggcagcatcccagccagggtttgctgtttgcgtgcatggatttctttttaaatcccatattttttttatcatgtcgtaggtaaactaacctggtattttaagagaaaactgcaggtcagtttggatgaagaaattgtggggggtgggggaggtgcggggggcaggtagggaaataatagggaaaatacctattttatatgatgggggaaaaaaagtaatctttaaactggctggcccagagtttacattctaatttgcattgtgtcagaaacatgaaatgcttccaagcatgacaacttttaaagaaaaatatgatactctcagattttaagggggaaaactgttctctttaaaatatttgtctttaaacagcaactacagaagtggaagtgcttgatatgtaagtacttccacttgtgtatattttaatgaatattgatgttaacaagaggggaaaacaaaacacaggttttttcaatttatgctgctcatccaaagttgccacagatgatacttccaagtgataattttatttataaactaggtaaaatttgttgttggttccttttataccacggctgccccttccacaccccatcttgctctaatgatcaaaacatgcttgaataactgagcttagagtatacctcctatatgtccatttaagttaggagagggggcgatatagagactaaggcacaaaattttgtttaaaactcagaatataacatttatgtaaaatcccatctgctagaagcccatcctgtgccagaggaaggaaaaggaggaaatttcctttctcttttaggaggcacaacagttctcttctaggatttgtttggctgactggcagtaacctagtgaatttttgaaagatgagtaatttctttggcaaccttcctcctcccttactgaaccactctcccacctcctggtggtaccattattatagaagccctctacagcctgactttctctccagcggtccaaagttatcccctcctttacccctcatccaaagttcccactccttcaggacagctgctgtgcattagatattaggggggaaagtcatctgtttaatttacacacttgcatgaattactgtatataaactccttaacttcagggagctattttcatttagtgctaaacaagtaagaaaaataagctagagtgaatttctaaatgttggaatgttatgggatgtaaacaatgtaaagtaaaacactctcaggatttcaccagaagttacagatgaggcactggaaaccaccaccaaattagcaggtgcaccttctgtggctgtcttgtttctgaagtactttttcttccacaagagtgaatttgacctaggcaagtttgttcaaaaggtagatcctgagatgatttggtcagattgggataaggcccagcaatctgcattttaacaagcaccccagtcactaggatgcagatggaccacactttgagaaacaccacccatttctactttttgcaccttattttctctgttcctgagcccccacattctctaggagaaacttagattaaaattcacagacactacatatctaaagctttgacaagtccttgacctctataaacttcagagtcctcattataaaatgggaagactgagctggagttcagcagtgatgctttttagttttaaaagtctatgatctgatctggacttcctataatacaaatacacaatcctccaagaatttgacttggaaaag

SEQ ID NO: 13393 - DNA, 3026 bp, Homo sapiens
tcgacccacgcgtccggattgaggggttgactgagcgttgcgagccttagctttctcccgaacgccagcgctgaggacacgatgtcgcggctctcccgctcactgctttgggccgccacctgcctgggcgtgctctgcgtgctgtccgcggacaagaacacgacccagcacccgaacgtgacgactttagcgcccatctccaacgtaacctcggcgccggtgacgtccctcccgctggtcaccactccggcaccagaaacctgtgaaggtcgaaacagctgcgtttcctgttttaatgttagcgttgttaatactacctgcttttggatagaatgtaaagatgagagctattgttcacataactcaacagttagtgattgtcaagtggggaacacgacagacttctgttccgtttccacggccactccagtgccaacagccaattctacagctaaacccacagttcagccctccccttctacaacttccaagacagttactacatcaggtacaacaaataacactgtgactccaacctcacaacctgtgcgaaagtctacctttgatgcagccagtttcattggaggaattgtcctggtcttgggtgtgcaggctgtaattttctttctttataaattctgcaaatctaaagaacgaaattaccacactctgtaaacagacccattgaattaataaggactggtgattcatttgtgtaactcactgaagccaaaatactatcttttaagatgtcccacatggaagacgctattccaggatctttaaatttccatggatgcatataggatgtttgggagcatcatccgtgaagaaaaaatcaattaaatcattgtgttcaacaggaatatttaaaatattctgcatgaatcctgtggctgtcttattttaaatagctgctgctgtgggattatattttttttccttaacatgccaaatataactttctgaaagtgatggaaaatgttgtcttgtgcagacaacatcatggctcttggcagtttaaatttagtaattttaatttagtgaacagaattgagaagaacgtgccaaatgagaatcaattaggtggatttttggctgtcatttcaaaagtggaataaatttattaatttagtagtactaaatggtatccttagattaaaattttgtgcttgataacagctgttttttctacattagaaataagatgccacacaaggaactacattccagatttaaagaaatgaaaggataccattagtgtgtataacagattattgttcatacttgtaaagcatcttatgtcattgagaatataaagaacagtgccttagaagacagtgaaaggtaagctctagcttaatgtctatgatttgttctttgacattaaggaaggtaaggattggtcagaggatgtaacttgatgtgagcagtagtaaacctgttttagatatcatactgttaatattttattgaaaatttatttcagagcggagaaacttaagctaaagtctgttatacagaattgaaagccttcgtatcttgaacctcccaacatttttcttatggctgttgaaaagtatagagctaaattgatttaattacactttcctttgtactttaaaaaaaagtatgctagcactattgtaccttgaaaggatttccaccagactgtcttgagtagtgacttctttggtgaggcaagaaggatatacattattttagaatcatttactatttaaatgagacaatcatattattttagaatcatttattttaaatgagacaatcattttaagttttaagataacagaagtgaccaatgtaatttcacaacacctaaggattttttggttgatcaggttactgtagatttttactgattgtcctggatgaatagactgtgctttttctttttctctcccttccttcttggtttcccatagtataataagcatgcatactttaacttctatagttttctcctttagagggtcgtcttcagttttagaggtttacttctcccttgcctttgactcattggactagtgcagaggctttaagtagtttaaaatgggcttttgcttttctaggtcattaacgttttttatttagtttctttagccaatagtggctgagtttcgcacttgattttcaatattttatagtaagaaatgacaaactgctttgtttcatttcataaacaaactctgcatttagataactattaaaggttgttaagatgaagatttactgtttctttgttactcgttggtacagctgtttgttttacttgcacatttgtacatatacttaatgttttcaagtgccttaattgtttaaaatctctggcttcaaagtttcttggggaaaggtcggtttacctcacattttttgtttccattagtaatattctaggtacctcacaaaatgtattatggtgccatggctgttagtttttagtgagtgctgtaggattaattcgaaaataggcagaattccattcctcccaaggtggcaaaaattagctatactgatgtaattgtcatttacctgggtatgaattccctgacacacattcatgtcaacatatgtagcaaattttgtgaaaacataacaatttgaagcttctgtaattttgagcactgctctaacaacaagcataatataaaattagttagattttgcaagtctacaaatgagctcttgcaacagaactcacagcctttttacttttttcccctaactttagcaatgtagtatcttgagccattaatttttgggtttttttaaaatccagaaggtatatagaaaccttttcagatttttcatctgatttgttcttgcagatgttcttctatcaaataccttattttaccttacagatatttgttgcacaggcagatactgctgtatttagacatttctatttcagttcattaaaaactgcaaaaccaatctgtatcatgtaccaaactgacttaaaataaatctacatgtttattgaaaaaaaaaaaaaaaaaaaa

SEQ ID NO: 13394 - DNA, 2318 bp, Homo sapiens
ataccagatggaggctttgatttgctcaacctaattggattcaaaaaataaatgatattcacgtggccatggaagaaaatgtcttttgggaatgtaaagcaaatggaaggcctaagcctacatacaagtggctaaaaaatggcgaacctctgctaactcgggatagaattcaaattgagcaaggaacactcaacataacaatagtgaacctctcagatgctggcatgtatcagtgtttggcagagaataaacatggagttatcttttccaacgcagagcttagtgttatagctgtaggtccagatttttcaagaacactcttgaaaagagtaactcttgtcaaagtgggaggtgaagttgtcattgagtgtaagccaaaagcgtctccaaaacctgtttacacctggaagaaaggaagggatatattaaaagaaaatgaaagaattaccatttctgaagatggaaacctcagaatcatcaacgttactaaatcagacgctgggagttatacctgtatagccactaaccattttggaactgctagcagtactggaaacttggtagtgaaagatccaacaagggtaatggtacccccttccagtatggatgtcactgttggagagagtattgttttaccgtgccaggtaacgcatgatcactcgctagacatcgtgtttacttggtcatttaatggacacctgatagactttgacagagatggggaccactttgaaagagttggagggcaggattcagctggtgatttgatgatccgaaacatccaactgaagcatgctgggaaatatgtctgcatggtccaaacaagtgtggacaggctatctgctgctgcagacctgattgtaagaggtcctccaggtcccccagaggctgtgacaatagacgaaatcacagataccactgctcagctctcctggagacccgggcctgacaaccacagccccatcaccatgtatgtcattcaagccaggactccattctccgtgggctggcaagcagtcagtacagtcccagaactcattgatgggaagacattcacagcgaccgtggtgggtttgaacccttgggttgaatatgaattccgcacagttgcagccaacgtgattgggattggggagcccagccgcccctcagagaaacggagaacagaagaagctctccccgaagtcacaccagcgaatgtcagtggtggcggaggcagcaaatctgaactggttataacctgggagacggtccctgaggaattacagaatggtcgaggctttggttatgtggtggccttccggccctacggtaaaatgatctggatgctgacagtgctggcctcagctgatgcctctagatacgtgttcaggaatgagagcgtgcaccccttctctccctttgaggttaaagtaggtgtcttcaacaacaaaggagaaggccctttcagtcccaccacggtggtgtattctgcagaagaagaacccaccaaaccaccagccagtatctttgccagaagtctttctgccacagatattgaagttttctgggcctccccactggagaagaatagaggacgaatacaaggttatgaggttaaatattggagacatgaagacaaagaagaaaatgctagaaaaatacgaacagttggaaatcagacatcaacaaaaatcacgaacttaaaaggcagtgtgctgtatcacttagctgtcaaggcatataattctgctgggacaggcccctctagtgcaacagtcaatgtgacaacccgaaagccaccaccaagtcaaccccccggaaacatcatatggaattcatcagactccaaaattatcctgaattgggatcaagtgaaggccctggataatgagtcggaagtaaaaggatacaaagtcttgtacagatggaacagacaaagcagcacatctgtcattgaaacaaataaaacatcggtggagctttctttgcctttcgatgaagattatataatagaaattaagccattcagcgacggaggagatggcagcagcagtgaacaaattcgaattccaaagatatcaaatgcctacgcgagaggatctggggcttccacttcgaatgcatgtacgctgtcagccatcagtacaataatgatttccctcacagctaggtccagtttatgacaaaagttatctgaaggacttgctgtttataatataagcaacatttagctagttgttttgaagacacccagtactaagtaatattgttgttcaagtacatcttattactggaataaaaatgttttttgcttctttaaaaaaaaaaaaaaaaaa

SEQ ID NO: 13395 - DNA, 5043 bp, Homo sapiens
gaaaaagaacagtgtgtcatgaagacaggcacctggaggtgatttgggtggcattcatgagaaaattcacgttacccgaatcattgacatagagtaactccacagcatgtgtcttcaagagcttccctaaaagattaaaggttatacaaaacttaaaagaagcagcaattctattcgcttgttattggacttgaaactccctttgacctcggaaactgaagatgaggttgccatgggaactgctggtactgcaatcattcattttgtgccttgcagatgattccacactgcatggcccgatttttattcaagaaccaagtcctgtaatgttccctttggattctgaggagaaaaaagtgaagctcaattgtgaagttaaaggaaatccaaaacctcatatcaggtggaagttaaatggaacagatgttgacactggtatggatttccgctacagtgttgttgaagggagcttgttgatcaataaccccaataaaacccaagatgctggaacgtaccagtgcacagcgacaaactcgtttggaacaattgttagcagagaagcaaagcttcagtttgcttatcttgacaactttaaaacaagaacaagaagcactgtgtctgtccgtcgaggtcaaggaatggtgctactgtgtggcccgccaccccattctggagagctgagttatgcctggatcttcaatgaatacccttcctatcaggataatcgccgctttgtttctcaagagactgggaatctgtatattgccaaagtagaaaaatcagatgttgggaattatacctgtgtggttaccaataccgtgacaaaccacaaggtcctggggccacctacaccactaatattgagaaatgatggagtgatgggtgaatatgagcccaaaatagaagtgcagttcccagaaacagttccgactgcaaaaggagcaacggtgaagctggaatgctttgctttaggaaatccagtaccaactattatctggcgaagagctgatggaaagccaatagcaaggaaagccagaagacacaagtcaaatggaattcttgagatccctaattttcagcaggaggatgctggtttatatgaatgtgtagctgaaaattccagagggaaaaatgtagcaaggggacagctaactttctatgctcaacctaattggattcaaaaaataaatgatattcacgtggccatggaagaaaatgtcttttgggaatgtaaagcaaatggaaggcctaagcctacatacaagtggctaaaaaatggcgaacctctgctaactcgggatagaattcaaattgagcaaggaacactcaacataacaatagtgaacctctcagatgctggcatgtatcagtgtttggcagagaataaacatggagttatcttttccaacgcagagcttagtgttatagctgtaggtccagatttttcaagaacactcttgaaaagagtaactcttgtcaaagtgggaggtgaagttgtcattgagtgtaagccaaaagcgtctccaaaacctgtttacacctggaagaaaggaagggatatattaaaagaaaatgaaagaattaccatttctgaagatggaaacctcagaatcatcaacgttactaaatcagacgctgggagttatacctgtatagccactaaccattttggaactgctagcagtactggaaacttggtagtgaaagatccaacaagggtaatggtacccccttccagtatggatgtcactgttggagagagtattgttttaccgtgccaggtaacgcatgatcactcgctagacatcgtgtttacttggtcatttaatggacacctgatagactttgacagagatggggaccactttgaaagagttggagggcaggattcagctggtgatttgatgatccgaaacatccaactgaagcatgctgggaaatatgtctgcatggtccaaacaagtgtggacaggctatctgctgctgcagacctgattgtaagaggtcctccaggtcccccagaggctgtgacaatagacgaaatcacagataccactgctcagctctcctggagacccgggcctgacaaccacagccccatcaccatgtatgtcattcaagccaggactccattctccgtgggctggcaagcagtcagtacagtcccagaactcattgatgggaagacattcacagcgaccgtggtgggtttgaacccttgggttgaatatgaattccgcacagttgcagccaacgtgattgggattggggagcccagccgcccctcagagaaacggagaacagaagaagctctccccgaagtcacaccagcgaatgtcagtggtggcggaggcagcaaatctgaactggttataacctgggagacggtccctgaggaattacagaatggtcgaggctttggttatgtggtggccttccggccctacggtaaaatgatctggatgctgacagtgctggcctcagctgatgcctctagatacgtgttcaggaatgagagcgtgcaccccttctctccctttgaggttaaagtaggtgtcttcaacaacaaaggagaaggccctttcagtcccaccacggtggtgtattctgcagaagaagaacccaccaaaccaccagccagtatctttgccagaagtctttctgccacagatattgaagttttctgggcctccccactggagaagaatagaggacgaatacaaggttatgaggttaaatattggagacatgaagacaaagaagaaaatgctagaaaaatacgaacagttggaaatcagacatcaacaaaaatcacgaacttaaaaggcagtgtgctgtatcacttagctgtcaaggcatataattctgctgggacaggcccctctagtgcaacagtcaatgtgacaacccgaaagccaccaccaagtcaaccccccggaaacatcatatggaattcatcagactccaaaattatcctgaattgggatcaagtgaaggccctggataatgagtcggaagtaaaaggatacaaagtcttgtacagatggaacagacaaagcagcacatctgtcattgaaacaaataaaacatcggtggagctttctttgcctttcgatgaagattatataatagaaattaagccattcagcgacggaggagatggcagcagcagtgaacaaattcgaattccaaagatatcaaatgcctacgcgagaggatctggggcttccacttcgaatgcatgtacgctgtcagccatcagtacaataatgatttccctcacagctaggtccagtttatgacaaaagttatctgaaggacttgctgtttataatataagcaacatttagctagttgttttgaagacacccagtactaagtaatattgttgttcaagtacatcttattactggaataaaaatgttttttgcttctttaggaatggcattatacagtacttcctcaaagcaaatctagctttgtctgaagtttctttggaaactctgcaatgcactgaagacatctgtaatatgatgttaccaaagcagtttacatatgtccttatatgcatattttttattatatatttagtgttttatagaattttttaaagttaacatataatgtagatattaattttttcctcggctgtaaaatgctatgggcaacacaatcatgcaattataatttgaaaatatttcctttaaagacagagtttgaaactcatcttggtaaataaattgcaaattactcgtacagttttacaaggatctcatggcagaacagcggaagacttggtccgtaactcaaggctgttgtatgcaaactactcttctagtggttaatgcacttgacatgtacagtatgtttcccatgccgttgtgattttgacatgtacagtatgttttcatgccgttgtgaattttgttgttcaacccaacttgagatggtttcaggaatggctgcaatctcaaaagctcaatgtactgcccaagaggcaccttgtgcaatattcccatccctgaatttagcattgtacaggaagattttcttttcactcaactgagttagcattgtctttgtggtagcattatcttagacattaaatttgaagtaacatatatcctgtagtaacatagacccaaagttactatagtcaaccaagtctttcaaaggataaaagatcattttattatctttaactgtatctattttgaatgtaaatttaaaaaaagtaattctctgtcaatggattcgtaatttctttacaaaatttcttatatataatatgtgtatctctgtaataatagagcccttcttttgaatcaaaattacatatggactttggaagattgctcctatttcaacaaatagttgctgcaagaatttttaatatgactctataaaagctctttagtacaattgtatggtttcttgatgattctgttttgcaataggtagcctagttgctttatatgctttaccttctaggtcttaaaatcacacattggaaaatgacaatatcaacaaaactgtattcttatgaaaagaactatttgttacaatgagaaaggttttgtgagtaaaccctactggacagtgacataaaaggcaatggaattttctataaacattttctcatgtaaacatgctgccaccttttcttctttctcagagaactcaaatttgctatagtttgtcatttttgcttacaaataatataacttttcaaccttctagttatatttatccaataaagtcataatcgggattccatttgtgtaaaaactagggtggtaaccggaaaaaaatattgtcagtatttcaagctgtgttcctttcttagtttgatatggttacttctatgttgaaataaaatttaaaatcacatgcaaaaaaaaaatcagcaaaataataaaatgaacgaaaaaaaatgacacccagggagttcccaaccccagtgtaaatgatatttaccagtgatctagcatatgtaatcttttttaaaggtattgttaataaatattctgtcatttgtaaaga

SEQ ID NO: 13396 - DNA, 1596 bp, Homo sapiens
agctggggcgcggccgcctgtctgcacagacagcaccatgtcgctcatggtcgtcagcatggtgtgtgttgggttcttcttgctgcagggggcctggccacatgagggagtccacagaaaaccttccctcctggcccacccaggtcccctggtgaaatcagaagagacagtcatcctgcaatgttggtcagatgtcaggtttcagcacttccttctgcacagagaagggaagtttaaggacactttgcacctcattggagagcaccatgatggggtctccaaggccaacttctccatcggtcccatgatgcaagaccttgcagggacctacagatgctacggttctgttactcactccccctatcagttgtcagctcccagtgaccctctggacatcgtcatcacaggtctatatgagaaaccttctctctcagcccagccgggccccacggttctggcaggagagagcgtgaccttgtcctgcagctcccggagctcctatgacatgtaccatctatccagggagggggaggcccatgaacgtaggttctctgcagggcccaaggtcaacggaacattccaggccgactttcctctgggccctgccacccacggaggaacctacagatgcttcggctctttccgtgactctccatacgagtggtcaaactcgagtgacccactgcttgtttctgtcacaggaaacccttcaaatagttggccttcacccactgaaccaagctccgaaaccggtaaccccagacacctgcatgttctgattgggacctcagtggtcatcatcctcttcatcctcctcctcttctttctccttcatcgctggtgctgcaacaaaaaaaatgctgttgtaatggaccaagagcctgcagggaacagaacagtgaacagggaggactctgatgaacaagaccctcaggaggtgacatatgcacagttgaatcactgcgttttcacacagagaaaaatcactcgcccttctcagaggcccaagacacccccaacagatatcatcgtgtacacggaacttccaaatgctgagccctgatccaaagttgtctcctgcccatgagcaccacagtcaggccttgaggggatcttctagggagacaacagccctgtctcaaaactgggttgccagctccaatgtaccagcagctggaatctgaaggcgtgagtctgcatcttagggcatcgctcttcctcacaccacaaatctgaacgtgcctctcccttgcttacaaatgtctaaggtccccactgcctgctggagagaaaacacactcctttgcttagcccacaattctccatttcacttgacccctgcccacctctccaacctaactggcttacttcctagtctacttgaggctgcaatcacactgaggaactcacaattccaaacatacaagaggctccctcttaacacggcacttagacacgtgctgttccaccttccctcatgctgttccacctcccctcagactagctttcagccttctgtcagcagtaaaacttatatattttttaaaataatttcaatgtagttttccctccttcaaataaacatgtctgccctca

SEQ ID NO: 13397 - DNA, 2744 bp, Homo sapiens
gttgttggccacagcgtgggaagcagctctgggggagctcggagctcccgatcacggcttcttgggggtagctacggctgggtgtgtagaacggggccggggctggggctgggtcccctagtggagacccaagtgcgagaggcaagaactctgcagcttcctgccttctgggtcagttccttattcaagtctgcagccggctcccagggagatctcggtggaacttcagaaacgctgggcagtctgcctttcaaccatgcccctgtccctgggagccgagatgtgggggcctgaggcctggctgctgctgctgctactgctggcatcatttacaggccggtgccccgcgggtgagctggggacctcagacgtggtaactgtggtgctgggccaggacgcaaaactgccctgcttctaccgaggggactccggcgagcaagtggggcaagtggcatgggctcgggtggacgcgggcgaaggcgcccaggaactagcgctactgcactccaaatacgggcttcatgtgagcccggcttacgagggccgcgtggagcagccgccgcccccacgcaaccccctggacggctcagtgctcctgcgcaacgcagtgcaggcggatgagggcgagtacgagtgccgggtcagcaccttccccgccggcagcttccaggcgcggctgcggctccgagtgctggtgcctcccctgccctcactgaatcctggtccagcactagaagagggccagggcctgaccctggcagcctcctgcacagctgagggcagcccagcccccagcgtgacctgggacacggaggtcaaaggcacaacgtccagccgttccttcaagcactcccgctctgctgccgtcacctcagagttccacttggtgcctagccgcagcatgaatgggcagccactgacttgtgtggtgtcccatcctggcctgctccaggaccaaaggatcacccacatcctccacgtgtccttccttgctgaggcctctgtgaggggccttgaagaccaaaatctgtggcacattggcagagaaggagctatgctcaagtgcctgagtgaagggcagccccctccctcatacaactggacacggctggatgggcctctgcccagtggggtacgagtggatggggacactttgggctttcccccactgaccactgagcacagcggcatctacgtctgccatgtcagcaatgagttctcctcaagggattctcaggtcactgtggatgttcttgacccccaggaagactctgggaagcaggtggacctagtgtcagcctcggtggtggtggtgggtgtgatcgccgcactcttgttctgccttctggtggtggtggtggtgctcatgtcccgataccatcggcgcaaggcccagcagatgacccagaaatatgaggaggagctgaccctgaccagggagaactccatccggaggctgcattcccatcacacggaccccaggagccagccggaggagagtgtagggctgagagccgagggccaccctgatagtctcaaggacaacagtagctgctctgtgatgagtgaagagcccgagggccgcagttactccacgctgaccacggtgagggagatagaaacacagactgaactgctgtctccaggctctgggcgggccgaggaggaggaagatcaggatgaaggcatcaaacaggccatgaaccattttgttcaggagaatgggaccctacgggccaagcccacgggcaatggcatctacatcaatgggcggggacacctggtctgacccaggcctgcctcccttccctaggcctggctccttctgttgacatgggagattttagctcatcttgggggcctccttaaacacccccatttcttgcggaagatgctccccatcccactgactgcttgacctttacctccaacccttctgttcatcgggagggctccaccaattgagtctctcccaccatgcatgcaggtcactgtgtgtgtgcatgtgtgcctgtgtgagtgttgactgactgtgtgtgtgtggaggggtgactgtccgtggaggggtgactgtgtccgtggtgtgtattatgctgtcatatcagagtcaagtgaactgtggtgtatgtgccacgggatttgagtggttgcgtgggcaacactgtcagggtttggcgtgtgtgtcatgtggctgtgtgtgacctctgcctgaaaaagcaggtattttctcagaccccagagcagtattaatgatgcagaggttggaggagagaggtggagactgtggctcagacccaggtgtgcgggcatagctggagctggaatctgcctccggtgtgagggaacctgtctcctaccacttcggagccatgggggcaagtgtgaagcagccagtccctgggtcagccagaggcttgaactgttacagaagccctctgccctctggtggcctctgggcctgctgcatgtacatattttctgtaaatatacatgcgccgggagcttcttgcaggaatactgctccgaatcacttttaatttttttcttttttttttcttgccctttccattagttgtattttttatttatttttatttttatttttttttagagatggagtctcactatgttgctcaggctggccttgaactcctgggctcaagcaatcctcctgcctcagcctccctagtagctgggactttaagtgtacaccactgtgcctgctttgaatcctttacgaagag

SEQ ID NO: 13398 - DNA, 7896 bp, Homo sapiens
atgcagtccgggccgcggcccccacttccagcccccggcctggccttggctttgaccctgactatgttggccagacttgcatccgcggcttccttcttcggtgagaaccacctggaggtgcctgtggccacggctctgaccgacatagacctgcagctgcagttctccacgtcccagcccgaagccctccttctcctggcagcaggcccagctgaccacctcctgctgcagctctactctggacgcctgcaggtcagacttgttctgggccaggaggagctgaggctgcagactccagcagagacgctgctgagtgactccatcccccacactgtggtgctgactgtcgtagagggctgggccacgttgtcagtcgatgggtttctgaacgcctcctcagcagtcccaggagcccccctagaggtcccctatgggctctttgttgggggcactgggacccttggcctgccctacctgaggggaaccagccgacccctgaggggttgcctccatgcagccaccctcaatggccgcagcctcctccggcctctgacccccgatgtgcatgagggctgtgctgaagagttttctgccagtgatgatgtggccctgggcttctctgggccccactctctggctgccttccctgcctggggcactcaggacgaaggaaccctagagtttacactcaccacacagagccggcaggcacccttggccttccaggcagggggccggcgtggggacttcatctatgtggacatatttgagggccacctgcgggccgtggtggagaagggccagggtaccgtattgctccacaacagtgtgcctgtggccgatgggcagccccatgaggtcagtgtccacatcaatgctcaccggctggaaatctccgtggaccagtaccctacgcatacttcgaaccgaggagtcctcagctacctggagccacggggcagtctccttctcggggggctggatgcagaggcctctcgtcacctccaggaacaccgcctgggcctgacaccagaggccaccaatgcctccctgctgggctgcatggaagacctcagtgtcaatggccagaggcgggggctgcgggaagctttgctgacgcgcaacatggcagccggctgcaggctggaggaggaggagtatgaggacgatgcctatggacattatgaagctttctccaccctggcccctgaggcttggccagccatggagctgcctgagccatgcgtgcctgagccagggctgcctcctgtctttgccaatttcacccagctgctgactatcagcccactggtggtggccgaggggggcacagcctggcttgagtggaggcatgtgcagcccacgctggacctgatggaggctgagctgcgcaaatcccaggtgctgttcagcgtgacccgaggggcacgccatggcgagctcgagctggacatcccgggagcccaggcacgaaaaatgttcaccctcctggacgtggtgaaccgcaaggcccgcttcatccacgatggctctgaggacacctccgaccagctggtgctggaggtgtcggtgacggctcgggtgcccatgccctcatgccttcggaggggccaaacatacctcctgcccatccaggtcaaccctgtcaatgacccaccccacatcatcttcccacatggcagcctcatggtgatcctggaacacacgcagaagccgctggggcctgaggttttccaggcctatgacccggactctgcctgtgagggcctcaccttccaggtccttggcacctcctctggcctccccgtggagcgccgagaccagcctggggagccggcgaccgagttctcctgccgggagttggaggccggcagcctagtctatgtccaccgcggtggtcctgcacaggacttgacgttccgggtcagcgatggactgcaggccagccccccggccacgctgaaggtggtggccatccggccggccatacagatccaccgcagcacagggttgcgactggcccaaggctctgccatgcccatcttgcccgccaacctgtcggtggagaccaatgccgtggggcaggatgtgagcgtgctgttccgcgtcactggggccctgcagtttggggagctgcagaagcagggggcaggtggggtggagggtgctgagtggtgggccacacaggcgttccaccagcgggatgtggagcagggccgcgtgaggtacctgagcactgacccacagcaccacgcttacgacaccgtggagaacctggccctggaggtgcaggtgggccaggagatcctgagcaatctgtccttcccagtgaccatccagagagccactgtgtggatgctgcggctggagccactgcacactcagaacacccagcaggagaccctcaccacagcccacctggaggccaccctggaggaggcaggcccaagccccccaaccttccattatgaggtggttcaggctcccaggaaaggcaaccttcaactacagggcacaaggctgtcagatggccagggcttcacccaggatgacatacaggctggccgggtgacctatggggccacagcacgtgcctcagaggcagtcgaggacaccttccgtttccgtgtcacagctccaccatatttctccccactctataccttccccatccacattggtggtgacccagatgcgcctgtcctcaccaatgtcctcctcgtggtgcctgagggtggtgagggtgtcctctctgctgaccacctctttgtcaagagtctcaacagtgccagctacctctatgaggtcatggagcggccccgccatgggaggttggcttggcgtgggacacaggacaagaccactatggtgacatccttcaccaatgaagacctgttgcgtggccggctggtctaccagcatgatgactccgagaccacagaagatgatatcccatttgttgctacccgccagggcgagagcagtggtgacatggcctgggaggaggtacggggtgtcttccgagtggccatccagcccgtgaatgaccacgcccctgtgcagaccatcagccggatcttccatgtggcccggggtgggcggcggctgctgactacagacgacgtggccttcagcgatgctgactcgggctttgctgacgcccagctggtgcttacccgcaaggacctcctctttggcagtatcgtggccgtagatgagcccacgcggcccatctaccgcttcacccaggaggacctcaggaagaggcgagtactgttcgtgcactcaggggctgaccgtggctggatccagctgcaggtgtccgacgggcaacaccaggccactgcgctgctggaggtgcaggcctcggaaccctacctccgtgtggccaacggctccagccttgtggtccctcaaggaggccagggcaccatcgacacggccgtgctccacctggacaccaacctcgacatccgcagtggggatgaggtccactaccacgtcacagctggccctcgctggggacagctagtccgggctggtcagccagccacagccttctcccagcaggacctgctggatggggccgttctctatagccacaatggcagcctcagcccccgcgacaccatggccttctccgtggaagcagggccagtgcacacggatgccaccctacaagtgaccattgccctagagggcccactggccccactgaagctggtccggcacaagaagatctacgtcttccagggagaggcagctgagatcagaagggaccagctggaggcagcccaggaggcagtgccacctgcagacatcgtattctcagtgaagagcccaccgagtgccggctacctggtgatggtgtcgcgtggcgccttggcagatgagccacccagcctggaccctgtgcagagcttctcccaggaggcagtggacacaggcagggtcctgtacctgcactcccgccctgaggcctggagcgatgccttctcgctggatgtggcctcaggcctgggtgctcccctcgagggcgtccttgtggagctggaggtgctgcccgctgccatcccactagaggcgcaaaacttcagcgtccctgagggtggcagcctcaccctggcccctccactgctccgtgtctccgggccctacttccccactctcctgggcctcagcctgcaggtgctggagccaccccagcatggagccctgcagaaggaggacggacctcaagccaggaccctcagcgccttctcctggagaatggtggaagagcagctgatccgctacgtgcatgacgggagcgagacactgacagacagttttgtcctgatggctaatgcctccgagatggatcgccagagccatcctgtggccttcactgtcactgtcctgcctgtcaatgaccaaccccccatcctcactacaaacacaggcctgcagatgtgggagggggccactgcgcccatccctgcggaggctctgaggagcacggacggcgactctgggtctgaggatctggtctacaccatcgagcagcccagcaacgggcgggtagtgctgcggggggcgccgggcactgaggtgcgcagcttcacgcaggcccagctggacggcgggctcgtgctgttctcacacagaggaaccctggatggaggcttccgcttccgcctctctgacggcgagcacacttcccccggacacttcttccgagtgacggcccagaagcaagtgctcctctcgctgaagggcagccagacactgactgtctgcccagggtccgtccagccactcagcagtcagaccctcagggccagctccagcgcaggcactgacccccagctcctgctctaccgtgtggtgcggggcccccagctaggccggctgttccacgcccagcaggacagcacaggggaggccctggtgaacttcactcaggcagaggtctacgctgggaatattctgtatgagcatgagatgccccccgagcccttttgggaggcccatgataccctagagctccagctgtcctcgccgcctgcccgggacgtggccgccacccttgctgtggctgtgtcttttgaggctgcctgtccccagcgccccagccacctctggaagaacaaaggtctctgggtccccgagggccagcgggccaggatcaccgtggctgctctggatgcctccaatctcttggccagcgttccatcaccccagcgctcagagcatgatgtgctcttccaggtcacacagttccccagccggggccagctgttggtgtccgaggagcccctccatgctgggcagccccacttcctgcagtcccagctggctgcagggcagctagtgtatgcccacggcggtgggggcacccagcaggatggcttccactttcgtgcccacctccaggggccagcaggggcctccgtggctggaccccaaacctcagaggcctttgccatcacggtgagggatgtaaatgagcggccccctcagccacaggcctctgtcccactccggctcacccgaggctctcgtgcccccatctcccgggcccagctgagtgtggtggacccagactcagctcctggggagattgagtacgaggtccagcgggcaccccacaacggcttcctcagcctggtgggtggtggcctggggcccgtgacccgcttcacgcaagccgatgtggattcagggcggctggccttcgtggccaacgggagcagcgtggcaggcatcttccagctgagcatgtctgatggggccagcccacccctgcccatgtccctggctgtggacatcctaccatccgccatcgaggtgcagctgcgggcacccctggaggtgccccaagctttggggcgctcctcactgagccagcagcagctccgggtggtttcagatcgggaggagccagaggcagcataccgcctcatccagggaccccagtatgggcatctcctggtgggcgggcggcccacctcggccttcagccaattccagatagaccagggcgaggtggtctttgccttcaccaacttctcctcctctcatgaccacttcagagtcctggcactggctaggggtgtcaatgcatcagccgtagtgaacgtcactgtgagggctctgctgcatgtgtgggcaggtgggccatggccccagggtgccaccctgcgcctggaccccaccgtcctagatgctggcgagctggccaaccgcacaggcagtgtgccgcgcttccgcctcctggagggaccccggcatggccgcgtggtccgcgtgccccgagccaggacggagcccgggggcagccagctggtggagcagttcactcagcaggaccttgaggacgggaggctggggctggaggtgggcaggccagaggggagggcccccggccccgcaggtgacagtctcactctggagctgtgggcacagggcgtcccgcctgctgtggcctccctggactttgccactgagccttacaatgctgcccggccctacagcgtggccctgctcagtgtccccgaggccgcccggacggaagcagggaagccagagagcagcacccccacaggcgagccaggccccatggcatccagccctgagcccgctgtggccaagggaggcttcctgagcttccttgaggccaacatgttcagcgtcatcatccccatgtgcctggtacttctgctcctggcgctcatcctgcccctgctcttctacctccgaaaacgcaacaagacgggcaagcatgacgtccaggtcctgactgccaagccccgcaacggcctggctggtgacaccgagacctttcgcaaggtggagccaggccaggccatcccgctcacagctgtgcctggccaggggccccctccaggaggccagcctgacccagagctgctgcagttctgccggacacccaaccctgcccttaagaatggccagtactgggtgtgaggcctggcctgggcccagatgctgatcgggccagggacaggcttgcccatgtcccgggccccattgcttccatgcctggtgctgtctgagtatccccagagcaagagagacctggagacaccaggggtggagggtcctgggagatagtcccaggggtccgggacagagtggagtcaagagctggaacctccctcagctcactccgagcctggagaactgcaggggccaaggtggaggcaggcttaagttcagtcctcctgccctggagctggtttgggctgtcaaaaccagggtaacctcctacatgggtcatgactctgggtcctgggtctgtgaccttgggtaagtcgcgcctgacccaggctgctaagagggcaaggagaaggaagtaccctggggagggaagggacagaggaagctattcctggcttttccactccaacccaggccaccctttgtctctgccccagagttgagaaaaaaacttcctcccctggttttttagggagatggtatcccctggagtagagggcaagaggagagagcgcctccagtctagaaggcataagccaataggataatatattcagggtgcagggtgggtaggttgctctggggatgggtttatttaagggagattgcaaggaagctatttaacatggtgctgagctagccaggactgatggagcccctgggggtgtgggatggaggagggtctgcagccagttcattcccagggccccatcttgatgggccaagggctaaacatgcatgtgtcagtggctttggagcaggttaggctggggctcatcgagggtctcaggccgaggccactgcggtgccagtgcccccctgaggactagggcaggcagctgggggcacttggttccatggagcctggataaacagtgctttggaggctctgga

SEQ ID NO: 13399 - DNA, 2230 bp, Homo sapiens
cttggagacaacatgtggttcttgacaactctgctcctttgggttccagttgatgggcaagtggacaccacaaaggcagtgatcactttgcagcctccatgggtcagcgtgttccaagaggaaaccgtaaccttgcattgtgaggtgctccatctgcctgggagcagctctacacagtggtttctcaatggcacagccactcagacctcgacccccagctacagaatcacctctgccagtgtcaatgacagtggtgaatacaggtgccagagaggtctctcagggcgaagtgaccccatacagctggaaatccacagaggctggctactactgcaggtctccagcagagtcttcacggaaggagaacctctggccttgaggtgtcatgcgtggaaggataagctggtgtacaatgtgctttactatcgaaatggcaaagcctttaagtttttccactggaattctaacctcaccattctgaaaaccaacataagtcacaatggcacctaccattgctcaggcatgggaaagcatcgctacacatcagcaggaatatctgtcactgtgaaagagctatttccagctccagtgctgaatgcatctgtgacatccccactcctggaggggaatctggtcaccctgagctgtgaaacaaagttgctcttgcagaggcctggtttgcagctttacttctccttctacatgggcagcaagaccctgcgaggcaggaacacatcctctgaataccaaatactaactgctagaagagaagactctgggttatactggtgcgaggctgccacagaggatggaaatgtccttaagcgcagccctgagttggagcttcaagtgcttggcctccagttaccaactcctgtctggtttcatgtccttttctatctggcagtgggaataatgtttttagtgaacactgttctctgggtgacaatacgtaaagaactgaaaagaaagaaaaagtgggatttagaaatctctttggattctggtcatgagaagaaggtaatttccagccttcaagaagacagacatttagaagaagagctgaaatgtcaggaacaaaaagaagaacagctgcaggaaggggtgcaccggaaggagccccagggggccacgtagcagcggctcagtgggtggccatcgatctggaccgtcccctgcccacttgctccccgtgagcactgcgtacaaacatccaaaagttcaacaacaccagaactgtgtgtctcatggtatgtaactcttaaagcaaataaatgaactgacttcaactgggatacatttggaaatgtggtcatcaaagatgacttgaaatgaggcctactctaaagaattcttgaaaaacttacaagtcaagcctagcctgataatcctattacatagtttgaaaaatagtattttatttctcagaacaaggtaaaaaggtgagtgggtgcatatgtacagaagattaagacagagaaacagacagaaagagacacacacacagccaggagtgggtagatttcagggagacaagagggaatagtatagacaataaggaaggaaatagtacttacaaatgactcctaagggactgtgagactgagagggctcacgcctctgtgttcaggatacttagttcatggcttttctctttgactttactaaaagagaatgtctccatacgcgttctaggcatacaagggggtaactcatgatgagaaatggatgtgttattcttgccctctcttttgaggctctctcataacccctctatttctagagacaacaaaaatgctgccagtcctaggcccctgccctgtaggaaggcagaatgtaactgttctgtttgtttaacgattaagtccaaatctccaagtgcggcactgcaaagagacgcttcaagtggggagaagcggcgataccatagagtccagatcttgcctccagagatttgctttaccttcctgattttctggttactaattagcttcaggatacgctgctctcatacttgggctgtagtttggagacaaaatattttcctgccactgtgtaacatagctgaggtaaaaactgaactatgtaaatgactctactaaaagtttagggaaaaaaaacaggaggagtatgacacaaaaaaaaaaaaaaaaaaaaaaaaaaaaaaaaaaaaaaaaaaaaaaaaaaaaaaaaaaaaaaaaaaaaaaaaaaaaaaaaaaaaaaaaaaaaa

SEQ ID NO: 13400 - DNA, 2022 bp, Homo sapiens
gcggcggcggcggctcgggagagagggacgcgggctgcaggcgcgatgcttggctagaggacgcgtccgacggcggccggacgctgaggtggtcggggctagtcagcccggcctgggcatggagcgcggggtggcagagcctctggacgtttggggcgcgcccagtccgagcccccggcgcgcctgaagttgcgagcggcgagcggcgagcggcgagcggcccgcggagacccaggagctgccggcacgccgcggatgagccttcgcgccggcgggaagacgcggcggtggccagggccagagcaggcggcccgcgggggccgatccggcggagagcagagcccgaggcgaggcgaggcgcggcgccgctgcacacacgcacacggagccatggggcgccatgttgccaccagctgccacgtggcctggcttttggtgctgatctctggatgctggggccaggtgaaccggctgcccttcttcaccaaccacttctttgatacatacctgctgatcagcgaggacacgcctgtgggttcttctgtgacccagttgctggcccaagacatggacaatgaccccctggtgtttggcgtgtctggggaggaggcctctcgcttctttgcagtggagcctgacactggcgtggtgtggctccggcagccactggacagagagaccaagtcagagttcaccgtggagttctctgtcagcgaccaccagggggtgatcacacggaaggtgaacatccaggttggggatgtgaatgacaacgcgcccacatttcacaatcagccctacagcgtccgcatccctgagaatacaccagtggggacgcccatcttcatcgtgaatgccacagaccccgacttgggggcagggggcagcgtcctctactccttccagcccccctcccaattcttcgccattgacagcgcccgcggtatcgtcacagtgatccgggagctggactacgagaccacacaggcctaccagctcacggtcaacgccacagatcaagacaagaccaggcctctgtccaccctggccaacttggccatcatcatcacagatgtccaggacatggaccccatcttcatcaacctgccttacagcaccaacatctacgagcattctcctccgggcacgacggtgcgcatcatcaccgccatagaccaggataaaggacgtccccggggcattggctacaccatcgtttcagggaataccaacagcatctttgccctggactacatcagcggagtgctgaccttgaatggcctgctggaccgggagaaccccctgtacagccatggcttcatcctgactgtgaagggcacggagctgaacgatgaccgcaccccatctgacgctacagtcaccacgaccttcaatatcctggttattgacatcaatgacaatgccccggagttcaacagctccgagtacagcgtggccatcactgagctggcacaggtcggctttgcccttccactcttcatccaggtggtggacaaggatgagaatttgggcctgaacagcatgtttgaggtgtacttggtggggaacaactcccaccacttcatcatctccccgacctccgtccaggggaaggcggacattcgtattcgggtggccatcccactggactacgagaccgtggaccgctacgactttgatctctttgccaatgagagtgtgcctgaccatgtgggctatgccaaggtgaagatcactctcatcaatgaaaatgacaaccggcccatcttcagccagccactgtacaacatcagcctgtacgagaacgtcaccgtggggacctctgtgctgacagtcctggtgagtccccgcttcactgcagggccactgagctctccagggccgactgtggtgaggcacccagagggattttgtccaagggacctcagcaatcagggaaggaggcacccccaaatccctgagctgtgtttgttggtgtattaaataaagtttttggactcttaaaaaaaaaaaaaaaaaaaa

SEQ ID NO: 13401 - DNA, 3084 bp, Homo sapiens
caatgccggcgttcgggaggcgcaacgtcggcggtcgctgagtatccagcccgcagcagtgacggccggcaggagcgtgctcttccccgcggctcgtgctctccaggagtccggagcatggtcctgggtcaccgttggtgtagcgtgttggtggaacgtggacgcctagagggaggatggtgggctgtggggtggcagttttatgtttgtgggtttcctgcggcgctgcagcgggacagctcgagtactcagtgccggaggagacggagcggggcgtagccgtaggcaatctctccgcggacttgaggctgccagcggccgctatgtcctcgcggaactttcgcttcctttccagccaccgcgagctctacttcggggtggatctacccagcggcaatttggtggtcagagagccggcggaccgcgaacagctgtgcagggccaaagctgcctgcgtcttgacctacgacctggtgctcgaggacccgctggagctgcacaagattcggattcacgtcctggacaccaatgacaactcacctctctttcctgccggcgacgtgcagctgcacatccccgagttcctgacgcccggagcccgctttactctcccgaatgcccaagatgacgacgagggaagcaatgggatactaagctacagcctaagccccagtcagcactttcgcctggacatgggatcgcgggttgacggcagcgaatacccggagttggtgttggagaaagcactggatcgcgaacagcgcgccacccacctgctggtgcttacagctcgggacggcgggctacctgcccgctcaggagacgcacaagtcaccatcattgtggtggacacaaatgacaacgcgcctgtatttgagcgctccgtataccgcaccaaggttccagagactgcacccaatgggactgtgttattccgagttcaagccttggatccagatgaagggtccaatggggaagtccagtactccctaagcaacagcacgcaagcagagctgcgacaccgctttcacgtgcaccctaaaagtggggaggtgcaagtagctgcttcactaggtccgcctgaaacgctcttggaggcatacattgaggcgagggacgaaggtgtctttggtttagctagcaccgctaaactgctggtggaggtgactgacgtgaacgatcatgcccccgaactggacttcctgactctttcgaacccagtacctgaggacgctgcccctggcacagtgattgctctctttagtgtaaaggatgaagacctcgattctaatggtagggtcatttgtggcatgtctagtgcaggcccttttcagctgacggcttcctttgacaactactacagcctgctgattgatgggcccctggaccgggagcagatcagtgaataccaagtcctgatcacggcctcagatagtggctcacccccacttagcacccgaaggacaatcactgtgtcagttgctgatgtgaatgacaatacaccaaactttcctcaaccccagcaggaacttttcgttgctgaaaacaatggccctggggcctctctaggccgagtgtttgcccaggaccccgacctggggaagaatggccttgtctcttatgagctgttggatgttatctctgaagggccatcagcctctagcttgctggcagtggaatcatccagtggggccatcactgccaaaacttcctttgactttgagcagctcagggggtttcatttccaagtagaaggccgggatggtggcattcctcccagaagtgcaacagtgactataaacttgtttgtggtagataggaatgacaattatccggttatcttgtttcccttgcccagaaatggttctgtcccagtggaaattgtgccccgctctgccaggactggacacttggtcacaaaagtggtagcagaggatgctgacagtggttctaatgcctggctttcctaccacatctcccgggcgtctgactctagtctctttagaatttcagccaatataggtgagctccgtactgctcgcttagttcttcccactgatgcagttaagcagagggtggtggtagtggttcgggaccatggagacccaccactttcctcctctgtcactctgggtgtgctgttgagcaactctgtccctcagttacttccagactttgaagatgtctgggaaccaggagggcagctttctgcccagaacttgtatttagtaattgccttggcttgtatttcctttttatttctggggtgcttacttttcttcgtgtgtaccaagttgcaccagagcccaggctgttgcgctcagagctgctgtcgctctacagaggatctgaggtatggaagtaagatggtttcaaatccttgcatgacatcagccaccatagatgtcactacagttgagagactttctcagacttatctctatcgggcctctctgggacttggttctgataataacagtttgctgttgcgtggggagtacaatgctgccgacctgcgaaatcttgccactggggtaggactgaatttgccaatatcctgtattcagattcggaataggaaaggggatcacgctaatgtcaatgccatggtaagcaaattttatggaatttgattcctttggcccggagatggctgctagctgtgttttgaaatatttcttagacaagcctttcacaacatttcatcaattgaactaaacactccttcttagcacttcctgtgccaagaaatctggaagtatagaagtattagaagattgccctaggcctcaagggacttatagtttatttttgagaaacaagggcaaaaattaaaacctatttaagaacaataaaagtaatatgacataaaggtctaaaattaaaaataaaataccaaaatattttataagcaacagatgtgtaaggcactctaatatttaaagtgaagaatgaaaaatatgtaagagtctgctttatatgaatataatatggaaggtgaaacatttacttaaactattgcaatgcattattaaaagatgacgataaccacaaaagatgtaaaaataaattacaatgggggtt

SEQ ID NO: 13402 - DNA, 5475 bp, Homo sapiens
caatgccggcgttcgggaggcgcaacgtcggcggtcgctgagtatccagcccgcagcagtgacggccggcaggagcgtgctcttccccgcggctcgtgctctccaggagtccggagcatggtcctgggtcaccgttggtgtagcgtgttggtggaacgtggacgcctagagggaggatggtgggctgtggggtggcagttttatgtttgtgggtttcctgcggcgctgcagcgggacagctcgagtactcagtgccggaggagacggagcggggcgtagccgtaggcaatctctccgcggacttgaggctgccagcggccgctatgtcctcgcggaactttcgcttcctttccagccaccgcgagctctacttcggggtggatctacccagcggcaatttggtggtcagagagccggcggaccgcgaacagctgtgcagggccaaagctgcctgcgtcttgacctacgacctggtgctcgaggacccgctggagctgcacaagattcggattcacgtcctggacaccaatgacaactcacctctctttcctgccggcgacgtgcagctgcacatccccgagttcctgacgcccggagcccgctttactctcccgaatgcccaagatgacgacgagggaagcaatgggatactaagctacagcctaagccccagtcagcactttcgcctggacatgggatcgcgggttgacggcagcgaatacccggagttggtgttggagaaagcactggatcgcgaacagcgcgccacccacctgctggtgcttacagctcgggacggcgggctacctgcccgctcaggagacgcacaagtcaccatcattgtggtggacacaaatgacaacgcgcctgtatttgagcgctccgtataccgcaccaaggttccagagactgcacccaatgggactgtgttattccgagttcaagccttggatccagatgaagggtccaatggggaagtccagtactccctaagcaacagcacgcaagcagagctgcgacaccgctttcacgtgcaccctaaaagtggggaggtgcaagtagctgcttcactaggtccgcctgaaacgctcttggaggcatacattgaggcgagggacgaaggtgtctttggtttagctagcaccgctaaactgctggtggaggtgactgacgtgaacgatcatgcccccgaactggacttcctgactctttcgaacccagtacctgaggacgctgcccctggcacagtgattgctctctttagtgtaaaggatgaagacctcgattctaatggtagggtcatttgtggcatgtctagtgcaggcccttttcagctgacggcttcctttgacaactactacagcctgctgattgatgggcccctggaccgggagcagatcagtgaataccaagtcctgatcacggcctcagatagtggctcacccccacttagcacccgaaggacaatcactgtgtcagttgctgatgtgaatgacaatacaccaaactttcctcaaccccagcaggaacttttcgttgctgaaaacaatggccctggggcctctctaggccgagtgtttgcccaggaccccgacctggggaagaatggccttgtctcttatgagctgttggatgttatctctgaagggccatcagcctctagcttgctggcagtggaatcatccagtggggccatcactgccaaaacttcctttgactttgagcagctcagggggtttcatttccaagtagaaggccgggatggtggcattcctcccagaagtgcaacagtgactataaacttgtttgtggtagataggaatgacaattatccggttatcttgtttcccttgcccagaaatggttctgtcccagtggaaattgtgccccgctctgccaggactggacacttggtcacaaaagtggtagcagaggatgctgacagtggttctaatgcctggctttcctaccacatctcccgggcgtctgactctagtctctttagaatttcagccaatataggtgagctccgtactgctcgcttagttcttcccactgatgcagttaagcagagggtggtggtagtggttcgggaccatggagacccaccactttcctcctctgtcactctgggtgtgctgttgagcaactctgtccctcagttacttccagactttgaagatgtctgggaaccaggagggcagctttctgcccagaacttgtatttagtaattgccttggcttgtatttcctttttatttctggggtgcttacttttcttcgtgtgtaccaagttgcaccagagcccaggctgttgcgctcagagctgctgtcgctctacagaggatctgaggtatggaagtaagatggtttcaaatccttgcatgacatcagccaccatagatgtcactacagttgagagactttctcagacttatctctatcgggcctctctgggacttggttctgataataacagtttgctgttgcgtggggagtacaatgctgccgacctgcgaaatcttgccactggggtaggactgaatttgccaatatcctgtattcagattcggaataggaaaggggatcacgctaatgtcaatgccatgccacgacagcccaaccctgactggcgttactctgcctccctgagagcaggcatgcacagctctgtgcacctagaggaggctggcattctacgggctggtccaggagggcctgatcagcagtggccaacagtatccagtgcaacaccagaaccagaggcaggagaagtgtcccctccagtcggtgcgggtgtcaacagcaacagctggacctttaaatacggaccaggcaaccccaaacaatccggtcccggtgagttgcccgacaaattcattatcccaggatctcctgcaatcatctccatccggcaggagcctactaacagccaaattgacaaaagtgacttcataaccttcggcaaaaaggaggagaccaagaaaaagaagaaaaagaagaagggtaacaagacccaggagaaaaaagagaaagggaacagcacgactgacaacagtgaccagtgaggtcctcaaatggaaacaagccacttagccagtttttgtaataatggcaaatctctcccatgtagcaattccctgctcctttttcctatctacatgagccctcttagagacctcagaaatctgcagaaagttccctgtgtctgtctagaacgcatttaacaggttttgtcgtaaaagctttactaagtctggtgttaactctttctctccactctggcttgttttcagaacctaaaaagcagacccaagtttcctttctcctccgccgcaaaggagaggcttcccagccccgccagtgagaggttggactctctgccctgtgctccggggatcctgtcttgatgacacttgcagggcaggctgaaaagttttgagattgagcagcttgggagtttgtggccactgggtatgtgtggctaccgcgggtatgcgagtgccagatattggctgagacgagccagcttagactaattggtacaaggaaggcaagaaaacaaagacaaataaacagcggaagttatcagtatggaggggaagtgtaaacttaaagggaccagactttctaaatcttacaactcaagaggtggcagccaccctctaggagacaaaactacccccactgacaaggctttaggagaccctaaagtctgttggctgtgacgtcattatacctaaaatctgcatcatacctgcaagccaacagttcagtgttttaacagagaaccaccctgggaaacagaagcagatctgatgtgtttcctatacatgtcctgtgctcactttattaaaaattcttttgcacacaatgtttatgaaaaggccagatccttttccaatacttatgcaaaagcaaaagaaaaccccgacacctcacctttcgctgtttgttgtttcatagatttatttaaaaaaagagaaagtctatagctataaatctttaaagagaaatatgaatacaattcccctaaactctcctcaaaagagaattcagtctacagccatttaaatgatcattgctgctacagaagtgctttaagagaattgcctgaaacatctgtattatatcggccacctgccaatcacagctttactctttcaggtcactctggggctgcctcttgcatgtattactaaataaaatgatctctctttctctctctctctctcttttctaagaaacaattatgtgcactttgatacacaaccttctctaaccaactatatatcaagacccaaaaattgaagaaaaatattgttttctcatacagtgagcagatttttcaatctactaattctgtgacttgtcttggtgtgctagcctacaccttctctttggtttagttttccttttctataacactctgaattgctaatcttactaacacctatgatgttacctgaaatcaatctcccatatgtatgctgtatgctatgctaagactcctgaaatatacttactctgtgcttgtgtatgtgaatgttaatgcaactattacctagagtgaactttaagctttattgttgaatgtaattccattatatttccttttgtacacctgtgaaaaagtggagtagtgtttttttaaccattgttaatcagcttttgtgtatgaaagacacagtaaaatttctttcttaaatcaagatactggtgattcaaggaattttatttatggtccagccaagagccatctcgtgccaagacttctgctggcaagggaatggataaagctgttttgttctagtaacaattttggaatgaatactgacaatattccatgagggtgtgcaagcacaaattttaccaatctgacctctttgaagttgcagaatgctttgaaattctaatggtatctgaaatatcagctcatagaaagtaacaaaatttgctgtcaccttaaataagacattttaattttgttataatgtacaatttagaagtttgattaattatattatctatttaggcattaatataaaagaggtaggagtctgttatttaaaaaaagcattaaatttaaaaaaaaactgtcttgtctacttttagcttcattctcccatattttgaagggtgtgtaacttcagctctgcaggattgcatggggtaaaacttgttaccaacacatgtgaaccattgctacattgtaggttgtgatcattttgccccactgaagcccatgtatctgaccttacgtgccttttgaactaggagaatcgggctaatttattaatgatgataattataatgtatctgtacagcactttttacatttgcgaagtgctttccaatccatgttagttactagttattacagctgtaaggataaaacacgtcatgtggattcattttgaattggtgctattggtatttcctctgttattgctaataaatgaaaatggtggtatg

SEQ ID NO: 13403 - DNA, 1872 bp, Homo sapiens
ttaattacaaaaactaatgactaagagagaggtggctagagctgaggcccctgagtcaggctgtgggtgggatcatctccagtacaggaagtgagactttcatttcctcctttccaagagagggctgagggagcagggttgagcaactggtgcagacagcctagctggactttgggtgaggcggttcagccatgaggctggctgtgcttttctcgggggccctgctggggctactggcagcccaggggacagggaatgactgtcctcacaaaaaatcagctactttgctgccatccttcacggtgacacccacggttacagagagcactggaacaaccagccacaggactaccaagagccacaaaaccaccactcacaggacaaccaccacaggcaccaccagccacggacccacgactgccactcacaaccccaccaccaccagccatggaaacgtcacagttcatccaacaagcaatagcactgccaccagccagggaccctcaactgccactcacagtcctgccaccactagtcatggaaatgccacggttcatccaacaagcaacagcactgccaccagcccaggattcaccagttctgcccacccagaaccacctccaccctctccgagtcctagcccaacctccaaggagaccattggagactacacgtggaccaatggttcccagccctgtgtccacctccaagcccagattcagattcgagtcatgtacacaacccagggtggaggagaggcctggggcatctctgtactgaaccccaacaaaaccaaggtccagggaagctgtgagggtgcccatccccacctgcttctctcattcccctatggacacctcagctttggattcatgcaggacctccagcagaaggttgtctacctgagctacatggcggtggagtacaatgtgtccttcccccacgcagcacagtggacattctcggctcagaatgcatcccttcgagatctccaagcacccctggggcagagcttcagttgcagcaactcgagcatcattctttcaccagctgtccacctcgacctgctctccctgaggctccaggctgctcagctgccccacacaggggtctttgggcaaagtttctcctgccccagtgaccggtccatcttgctgcctctcatcatcggcctgatccttcttggcctcctcgccctggtgcttattgctttctgcatcatccggagacgcccatccgcctaccaggccctctgagcatttgcttcaaaccccagggcactgagggggttggggtgtggtgggggggtacccttatttcctcgacacgcaactggctcaaagacaatgttattttccttccctttcttgaagaacaaaaagaaagccgggcatgacggctcatgcctgtaatcccagcactttgggaggctgaggcaggtggatcactggaggtcaggagtttgagaccagcctggccaacatggtgaaaccctgtctctactaaaaatacaattagccaggtgtggcggcgtaatcccagctggcctgtaatcccagctacttgggaggctgaggcagaactgcttgaacccaggaggtggaggttgcagtgagccgtcatcgcgccactaagccaagatcgcgccactgcactccagcctgggcgacagagccagactgtctcaaataaataaatatgagataatgcagtcgggagaagggagggagagaattttattaaatgtgacgaactgccccccccccccccccagcaggagagcagcaaaatttatgcaaatctttgacggggttttccttgtcctgccaggattaaaagccatgagtttcttgtcaaaaaaaaaaaaaaaaa

SEQ ID NO: 13404 - DNA, 2450 bp, Homo sapiens
tccgggtgctgtggcccggccttggcggggcggcctccggctcaggctggctgagaggctcccagctgcagcgtccccgcccgcctcctcgggagctctgatctcagctgacagtgccctcggggaccaaacaagcctggcaggacaaaattagaagatcaaaatggaaaatatgctgctttggttgatatttttcacccctgggtggaccctcattgatggatctgaaatggaatgggattttatgtggcacttgagaaaggtaccccggattgtcagtgaaaggactttccatctcaccagccccgcatttgaggcagatgctaagatgatggtaaatacagtgtgtggcatcgaatgccagaaagaactcccaactcccagcctttctgaattggaggattatctttcctatgagactgtctttgagaatggcacccgaaccttaaccagggtgaaagttcaagatttggttcttgagccgactcaaaatatcaccacaaagggagtatctgttaggagaaagagacaggtgtatggcaccgacagcaggttcagcatcttggacaaaaggttcttaaccaatttccctttcagcacagctgtgaagctttccacgggctgtagtggcattctcatttcccctcagcatgttctaactgctgcccactgtgttcatgatggaaaggactatgtcaaagggagtaaaaagctaagggtagggttgttgaagatgaggaataaaagtggaggcaagaaacgtcgaggttctaagaggagcaggagagaagctagtggtggtgaccaaagagagggtaccagagagcatctgcaggagagagcgaagggtgggagaagaagaaaaaaatctggccggggtcagaggattgccgaagggaggccttcctttcagtggacccgggtcaagaatacccacattccgaagggctgggcacgaggaggcatgggggacgctaccttggactatgactatgctcttctggagctgaagcgtgctcacaaaaagaaatacatggaacttggaatcagcccaacgatcaagaaaatgcctggtggaatgatccacttctcaggatttgataacgatagggctgatcagttggtctatcggttttgcagtgtgtccgacgaatccaatgatctcctttaccaatactgcgatgctgagtcgggctccaccggttcgggggtctatctgcgtctgaaagatccagacaaaaagaattggaagcgcaaaatcattgcggtctactcagggcaccagtgggtggatgtccacggggttcagaaggactacaacgttgctgttcgcatcactcccctaaaatacgcccagatttgcctctggattcacgggaacgatgccaattgtgcttacggctaacagagacctgaaacagggcggtgtatcatctaaatcacagagaaaaccagctctgcttaccgtagtgagatcacttcataggttatgcctggacttgaactctgtcaatagcatttcaacatttttcaaaatcaggagattttcgtccatttaaaaaatgtataggtgcagatattgaaactaggtgggcacttcaatgccaagtatatactcttctttacatggtgatgagtttcatttgtagaaaaattttgttgccttcttaaaaattagacacactttaaaccttcaaacaggtattataaataacatgtgactccttaatggacttattctcagggtcctactctaagaagaatctaataggatgctggttgtgtattaaatgtgaaattgcatagataaaggtagatggtaaagcaattagtatcagaatagagacagaaagttacaacacagtttgtactactctgagatggatccattcagctcatgccctcaatgtttatattgtgttatctgttgggtctgggacatttagtttagtttttttgaagaattacaaatcagaagaaaaagcaagcattataaacaaaactaataactgttttactgctttaagaaataacaattacaatgtgtattatttaaaaatgggagaaatagtttgttctatgaaataaacctagtttagaaatagggaagctgagacattttaagatctcaagtttttatttaactaatactcaaaatatggacttttcatgtatgcatagggaagacacttcacaaattatgaatgatcatgtgttgaaagccacattattttatgctatacattctatgtatgaggtgctacatttttaggacaaagaattctgtaatctttttcaagaaagagtctttttctccttgacaaaatccagcttttgtatgaggactatagggtgaattctctgattagtaattttagatatgtcctttcctaaaaatgaataaaatttatgaatatgacttaaaaaaaaaaaaaaaaaaaaaaaaaaaa

SEQ ID NO: 13405 - DNA, 4744 bp, Homo sapiens
ccacgcgtccggggagccggaggggcccgccgaggcggcggcggcggcggcaagatggcggacttcctgccgtcgcggtccgtgctgtccgtgtgcttccccggctgcctgctgacgagtggcgaggccgagcagcaacgcaagtccaaggagatcgacaaatgcctgtctcgggaaaagacctatgtgaagcggctggtgaagatcctgctgctgggcgcgggcgagagcggcaagtccaccttcctgaagcagatgcggatcatccacgggcaggacttcgaccagcgcgcgcgcgaggagttccgccccaccatctacagcaacgtgatcaaaggtatgagggtgctggttgatgctcgagagaagcttcatattccctggggagacaactcaaaccaacaacatggagataagatgatgtcgtttgatacccgggcccccatggcagcccaaggaatggtggaaacaagggttttcttacaatatcttcctgctataagagcattatgggcagacagcggcatacagaatgcctatgaccggcgtcgagaatttcaactgggtgaatctgtaaaatatttcctggataacttggataaacttggagaaccagattatattccatcacaacaagatattctgcttgccagaagacccaccaaaggcatccatgaatacgactttgaaataaaaaatgttcctttcaaaatggttgatgtaggtggtcagagatcagaaaggaaacgttggtttgaatgtttcgacagtgtgacatcaatacttttccttgtttcctcaagtgaatttgaccaggtgcttatggaagatcgactgaccaatcgccttacagagtctctgaacatttttgaaacaatcgtcaataaccgggttttcagcaatgtctccataattctgttcttaaacaagacagacttgcttgaggagaaggtgcaaattgtgagcatcaaagactatttcctagaatttgaaggggatccccactgcttaagagacgtccaaaaattcctggtggaatgtttccggaacaaacgccgggaccagcaacagaagcccttataccaccacttcaccactgctatcaacacggagaacatccgccttgttttccgtgacgtgaaggatactattctgcatgacaacctcaagcagcttatgctacagtgatgtacaaaagacttgctgttttaatatctttttgtgtttttgatgttttctgtttgttttgttttttaaaatagcagtttacaaccagaattagaacaatcttaattctacgtttaacttcttgaaaatcttagtactttttctgcggcctttggtttgtggctgaaagctgttgagtgactcatcgccaagatttgctgtaatgcaggctttgatctgtttcaccatggcttctattcaagtccagttaaaacctcccagctgacctcagactaggcatatttcaggctttaaattattctactttccaaactgaattctcctgcagtgccaagtatcaaaggtgtccttaaatacttgtagggatgaggttaggaatattcagttccaaaacaagatatcttctgtccgccttacatatagcagtgacacttgttgcctaactttatggtgacctcctattttgtaagggctgttagaagttctatctaagaaatggcattctgtaggtttatagaaggtttagccttcatattttaattgcttgtatacacaacagctgttttgcttttagatttctgtgtttctgaaggtaatgttcttcctgttttcaagtttacataaggatctttggtctgatgctgatgaagagttcacaggtggtatgggagagcaaaaggcaagctaatgctgtttaccgtgttttggtcaaacgtaacgagtgaaatagaatttgcctttctcatatttaattatcatgtagtttaatgtaccatatgtgaaacattctggccatagcagcaactaaaaactgcaagcaacttggtaacagaactttctaaataaacttaacctgttccagaatgtcatgtatttgacttttaagccctatctcagttggtcagtaaagaccaatccttactgtaggaaatcattgttgtatcatcacaaacatctatcttttgctgtcctgtccagtcccatcaactccacactgtgccatttgtggcatcgttttgtttatttggagtttgctaagggcagtatttttctgtcaagactattcaagaaggcattatttgagattcctgttcattcttggtgtgtctctaacagatacagtatgtatacatttgtataattgttgttgttgaaagtccagcttttttgaggtatattttaaatgttttaaggatgcttctaaggatcagtagtaatttttttagttcgcacctaaagatgattacattgacctcccccgactgcttaccaaattaaaatgtgtccacgaagtagctttgtgatcgcagatacattcatagtgaactcatcagaatggctggtttgcagtactgaaatactatcttctaggctgtatgtagtgctacaattagagaaacagaagtccaaggctggcgacagcttgaaaagtctgacagcttttctacttttcctgaaaattttaagactgtgatatctgtcattttactgtatagctgactgtgtactcaggtattttattggtccttgaaagattggtcgttatggatcacccagcctttccaagtcagtggctgttgttctgtcttgctgtctgatacgagagtggggcttttcagtgaactaaccagggattgttcttgacatacctgacttttctcacatttgaacttccactatcattgtatccatataacttctagcattttcatgccatggtaatccatgagctacacatacgtagcccggcaccgtgatgcaagttcatggtatcgtgcatgttcgtggtatcatggtatcattcatgcgtgtttgaatagttctacatctagtgcttcttgccaaaaagaatacattgtttaaattcacaaaattagcataattgcagtgctaatgaatatcggaatatgtgcacagtaacatttggactattcattggagagtttacccatacatttagcaaattgaatggccaaaacatttgactccagtgagggctcaagttagatccctatagaaagaggacacttcatcttacttaagtcatagttaagatctgtgatacgaaccatagatattgcctgacaaagcagaaatcaccaagtttcccccttttgaattaccaccaagaagtgttgaaacaccaaatagatatcatgttattttgggcatttgcagttttcttccctgctgcatgtaatgtctcagaatcaacattcttttaaaatctagactatattttgaggcaatgaattacttatattcaacttaggcttgttttgacattcagtagaactttaagttcaatctaaaggcttcagtccacatttttttatacgttgtattttaaaaacgtttgaaaggagtcttacacctgtatcatgaaaactgaatccttttgaaataccactatatgaagagagagatgaaatttagtgaacagaattgaaaaggtgctcataatttcactatgcaaacttaccccagtctctaaaaaagtaatttagatttaaagttctttgatgtatttgattttctaaatctttatggttatgatttggaataaaatgtgcctaatcctgtgttacattctgttcttaaatctgaatgccttctcatttaattctgaggaaatatcacacaagtgtcttcattgaccttgaagaaatgtatatacagttgccttataaaacaacataaatttagaccataacttttatagagaaagggttttgtcaaatgttttctgaaaatctgagtaattcaaagcatgcctctgcccctttaatatttttaataacctgcattgttgctgtctgccaaatattaaattgaaatcttcatttcaattttattatctggaaagggcactggattgctctgcaaccaaagaaagcaatatggaatgaaaaaactcattcacttttgtcttattttcttttaaggtgtattggcatgtaatttgcatagagaaggtcctctggttagtctctcaaattgaggctgtttagggaaatccttattcagttggtggcagtggttggtttaaagtagaaggaaataagatcgccttaataccagaaatgattagaagtgctgatttagattcaacaaataccatatgtccttatcattttttgtaagaagaaattggttaagtcctaactttcaatgtgtacccaaatacttgtatttatgcttttgataaaatgtattttcagcattaatacacatccgattatgccttatttatatatgaagaataaagttaccatgttatactgttatgtcctaaaattcaaatcactatttgagaaaccctcaaattggtgctttcattatataatgatacatttagacaaaaccccaaactaagccatttgaaacaagattctctccattgcagtttgtagcaatgttatttctgtgtatgtcatgagaaggctaaatatcagtgttaatttcttgtttgaatccgtgaaatcatgcctgtaaagcccaaacatttgtaacaaactccctaataaatttagagaaagtcaaaaaaaaaaaaaaa

SEQ ID NO: 13406 - DNA, 5915 bp, Homo sapiens
cgaagatggcggaagggctggagcgtgtgcggatctccgcgtcggagctgcgcgggatcctggctactctggccccgcaggccgggagcagagaaaacatgaaggaattaaaggaggccaggccgcgcaaagataacaggcgtcctgatctggaaatctataagcctggcctttctcggctaaggaacaagcccaaaatcaaggaaccccctgggagtgaggagttcaaagatgaaattgttaatgaccgagattgctctgctgttgaaaatggtacacagcccgttaaagatgtctgcaaggaactgaacaaccaagagcagaatggtcctatagacccggaaaataatcggggacaagaatcctttcctaggactgctggacaagaggatcgtagtctaaaaattatcaaaagaacaaagaaacccgacctgcagatctatcagcctggacgacgtttgcagactgttagcaaagaatccgccagtcgggtggaggaggaagaagtcctcaaccaggtagaacaactgagagtagaggaagatgagtgtaggggaaatgttgcgaaggaggaagttgcgaataaaccagacagggccgagatagaaaagagcccaggtggtgggagagtaggggctgcaaaaggagaaaaaggaaagaggatgggaaaaggggagggggtgagggaaacccacgacgacccggcccgcgggaggccgggctccgcaaagcgctactcccgctcagacaaacgaaggaatcgctaccgcacgcgcagcaccagctcagctggcagcaacaacagcgctgagggagctggcctgacggataatggatgtcgccgccgccgacaggataggaccaaggagaggccacgactgaagaagcaagtgtctgtgtcctcaaccgattccttagacgaggacagaattgatgagcctgatggattaggacccaggagaagttcagaaaggaagagacatttagaaagaaactggtctggccgtggggagggtgagcagaaaaccagtgctaaagaatatcgaggcactcttcgtgtcactttcgatgcagaagccatgaacaaagagtctcccatggtgaggtcagccagggatgatatggatagaggaaagcctgacaaaggcttgagcagtgggggcaaaggctctgagaagcaggagtccaaaaacccgaaacaagaacttcggggtcgtggtcgtggcattctgattttgcctgcccataccaccctatctgtcaattcagcaggttctccagagtccgcgcctttgggacctcggcttttgtttggatctggtagtaaggggtctcggagttggggccgtggaggcaccacacgccgattgtgggacccaaacaatcctgatcagaaacctgctctaaagactcagacgccccagctacatttcttggacactgatgatgaagtcagccctacatcttggggtgactcacgccaggctcaggcatcttactataagtttcaaaactctgacaacccctattattacccccggacaccaggccctgcctcccagtatccctatacgggctataaccctctacagtacccagtgggccctacgaatggtgtgtacccagggccttactacccaggctacccgactccgtcaggacagtatgtgtgtagccctctgcctaccagcaccatgagtcccgaggaggtagagcagcacatgaggaacctgcagcaacaggagctgcacaggcttctccgggtggctgacaaccaggaactgcagctcagcaacctgctctccagggaccgcatcagtccggagggcctggagaagatggcgcaactcagagctgaactgctgcagctatatgagcgctgtattctattagatattgagttctctgataatcagaatgtggatcagatcctgtggaagaatgctttctatcaggtgattgagaagttcaggcaacttgtcaaggatccgaatgttgagaacccagaacagattcggaacagacttttggagctcttggatgagggtagtgacttctttgatagtttgcttcagaagctgcaggttacttacaagttcaaactggaagactacatggatggtcttgccattcgcagcaagccattacgcaagacagtaaaatatgccttgatcagtgcccagcgatgcatgatatgccaaggagatattgctaggtaccgggagcaagccagtgatacagcgaattatgggaaagcacgcagttggtacctgaaggcccagcacattgctcccaagaatgggcgcccctataaccagttggctttgctggcagtgtatacgaggaggaagcttgacgctgtctattactatatgcgcagtttagctgccagcaaccctatcctgactgccaaggagagtctcatgagcttgtttgaagagaccaagcggaaggcagaacagatggaaaagaagcaacatgaggaatttgacctgagccctgaccagtggcggaaaggaaagaagtctactttccggcatgttggagatgacaccactcgcctggagatctggattcatccatcccatccacggtcttcccagggcactgagtctgggaaggattctgagcaagagaatgggctgggcagcctgagtcccagtgatctgaacaaaaggttcatcctcagttttctccatgcccatgggaagctgtttacccggattgggatggagacattccctgcagtggctgagaaggtcctcaaggagttccaggtgttactgcagcacagcccctctcccattggaagtacccgcatgctgcagcttatgaccatcaatatgtttgcagtacacaactcccagctgaaagactgcttctcggaggagtgccgctctgtgatccaggaacaagccgcagctctgggcttggccatgttttctctactggtccgccgctgcacctgcttacttaaggagtccgccaaagctcagctgtcctctcctgaggaccaggatgaccaagacgacatcaaggtgtcttcctttgtcccggacctgaaggagctgctccccagtgtcaaagtctggtcagattggatgctcggctacccggacacctggaatcctcctcccacatccctggatctgccctcgcatgttgctgtggatgtatggtcgacgctggctgatttctgtaacatactgactgcagtgaatcagtctgaggtgccactgtacaaggacccggatgatgacctcacccttcttatcctggaagaggatcggcttctctcgggctttgtccccttgctggctgcccctcaggacccctgctacgtggagaaaacctcggataaggttattgcagctgactgcaaaagggtcacagtgctgaagtattttctggaagccctttgtggacaagaagagcctctgctggcattcaagggtggaaagtatgtgtcagtggcacccgtcccagacaccatgggaaaggaaatgggaagccaagagggaacacgactggaagatgaggaggaggatgtggtgattgaagactttgaggaagattcagaggctgaaggcagcggaggcgaggatgacatcagggagcttcgggccaagaagctggctctggccaggaagatagctgagcagcagcgtcgccaggaaaagatccaggctgtcctggaggaccacagtcagatgaggcagatggagctcgaaatcagacctttgttcctcgtaccagacaccaacggcttcattgaccacctggccagtctggcgcggctgctggagagcaggaagtacatcctggtggtgcccctcatcgtgatcaatgagctggacggcctggccaaggggcaggagacagaccaccgggctgggggctacgcccgtgtggtacaagagaaggcccgcaagtccatcgagttcctcgagcagcgattcgagagtcgggactcttgcctgcgagccctgaccagccgtggcaatgaactcgaatccatcgccttccgcagtgaggacatcactggccagctgggtaacaacgatgatctcatcctgtcctgctgcctccactactgcaaagacaaggctaaggacttcatgcccgccagcaaagaggagccaatccggctactgcgggaggtggtgctgttgacggatgaccggaacctgcgtgtgaaggcgctcacaaggaatgttcctgtacgggacatcccagccttcctcacgtgggcccaggtgggctgagggagccacactggggccccccccccccgtggaaccgttcctgaaaggccaccaggcgcccagtgtagcacggaagatgcccacgtgcctgagccaccaatccacccagacaataaaccatcctcttccaacccacgccacggccatgctgtgggggacctgctcctcacagagcccctcccaaggatcgggcggaagctgctgggaccctcctgggctgccaggatttagcagggaggtggctggctacagcaacagcagctgggcaagccagataggccgcccatgctctcagcctttctccctcccccgtctcattccaaggctgagggagggccttctcgcctggggacgcagccactttctccagtggagacagggcaggggttcagagtttccgtcagatgcagtgaaatcacagttccctttcatcttcagaacctctgtcgtgaatgtgttcaagaggctttggttaagtcaggaagaagtgcccagggtgtgtgtccccagtctccctgaggcctggactcgcccatgaacccaagtcggcttctagacagcatgtccctaacagcagccctgggcccccacctcttctaccatccaccccagacttaccacacacccttcctgctgctcctcttcctgcccttatcaacctgggtccctcacacttcgccagttgcgtccccgtggacagtcatgagtctagaggaaaggggcatctggtctcaggcccgtgctctcgggtggcctccacctgctccctttctcctcactggcctttctttccgtctagcctcctcttcaggaaatgtcctgactctcctcagctcccccttcacccctccttgcccgcctaccctccctccagaatagcccctcacccttcttccccttctagttgatccttttcacctccctgatccccttcatttcttcaccgcggttcctcgtcataggggttctcactctgaactttccctctctactacccatggcaggaacctagtacaggtctcccacccagggccttccaccctcggctcctgtgctgggagaaacttccaggcgtggacagcccagcctgaggcattccagtgctggggcaccgtcgcctaacctggtttctagctttgccctcactccccggaaaaactgacactgacacaggggccctttccttgcccctttagctggtacctcagtggggaggcttccttaccaagaatgagttcctgaaacccagggccagagacaaggacaacttaggggaagacggggttttcggtggagccaggggcaaatcttaatgggaccagtgggggataccccagagcccatggcctgactgcacagcctgcctggaggatgggtgcgcagctctgccctccctgaggcccaggactatgccagaagcgatggggtaccgtgtaggggagccaaggccagtagtttgggggtaggagtcccctagagtctcagaagactgggctctttggagtacagggtccccggcctctcctttaagattctctccccagctggaaggccgatgactgggtggtcgggagggagacccagctctcctttctgtcccgtttgcagcactggttttgtttccttaataaatttttagttatgaaacat

SEQ ID NO: 13407 - DNA, 932 bp, Homo sapiens
gaaagcctgccagcacctattccacctcccagcccagcatggcacccctgctgcccatccggaccttgcccttgatcctgattctgctggctctgctgtccccaggggctgcagacttcaacatctcaagcctctctggtctgctgtccccggcgctaacggagagcctgctggttgccttgcccccctgtcacctcacaggaggcaatgccacactgatggtccggagagccaatgacagcaaagtggtgacgtccagctttgtggtgcctccgtgccgtgggcgcagggaactggtgagtgtggtggacagtggtgctggcttcacagtcactcggctcagtgcataccaggtgacaaacctcgtgccaggaaccaaattctacatttcctacctagtgaagaaggggacagccactgagtccagcagagagatcccaatgtccacactccctcgaaggaacatggaatccattgggctgggtatggcccgcacagggggcatggtggtcatcacggtgctgctctctgtcgccatgttcctgctggtgctgggcttcatcattgccctggcactgggctcccgcaagtaaggaggtctgcccggagcagcagcttctccaggaagcccagggcaccatccagctccccagcccacctgctcccaggccccaggcctgtggctcccttggtgccctcgcctcctcctcctgccctcctctcccctagagccctctcctccctctgtccctctccttgcccccagtgcctcaccttccaacactccattattcctctcaccccactcctgtcagagttgactttcctcccattttaccactttaaacacccccataacaattcccccatccttcagtgaactaagtccctataataaaggctgaggctgcatctgccaaaaaaaaaaaaaa

SEQ ID NO: 13408 - DNA, 4909 bp, Homo sapiens
tagacgcaccctctgaagatggtgactccctcctgagaagctggaccccttggtaaaagacaaggccttctccaagaagaatatgaaagtgttactcagacttatttgtttcatagctctactgatttcttctctggaggctgataaatgcaaggaacgtgaagaaaaaataattttagtgtcatctgcaaatgaaattgatgttcgtccctgtcctcttaacccaaatgaacacaaaggcactataacttggtataaagatgacagcaagacacctgtatctacagaacaagcctccaggattcatcaacacaaagagaaactttggtttgttcctgctaaggtggaggattcaggacattactattgcgtggtaagaaattcatcttactgcctcagaattaaaataagtgcaaaatttgtggagaatgagcctaacttatgttataatgcacaagccatatttaagcagaaactacccgttgcaggagacggaggacttgtgtgcccttatatggagttttttaaaaatgaaaataatgagttacctaaattacagtggtataaggattgcaaacctctacttcttgacaatatacactttagtggagtcaaagataggctcatcgtgatgaatgtggctgaaaagcatagagggaactatacttgtcatgcatcctacacatacttgggcaagcaatatcctattacccgggtaatagaatttattactctagaggaaaacaaacccacaaggcctgtgattgtgagcccagctaatgagacaatggaagtagacttgggatcccagatacaattgatctgtaatgtcaccggccagttgagtgacattgcttactggaagtggaatgggtcagtaattgatgaagatgacccagtgctaggggaagactattacagtgtggaaaatcctgcaaacaaaagaaggagtaccctcatcacagtgcttaatatatcggaaattgaaagtagattttataaacatccatttacctgttttgccaagaatacacatggtatagatgcagcatatatccagttaatatatccagtcactaatttccagaagcacatgattggtatatgtgtcacgttgacagtcataattgtgtgttctgttttcatctataaaatcttcaagattgacattgtgctttggtacagggattcctgctatgattttctcccaataaaagcttcagatggaaagacctatgacgcatatatactgtatccaaagactgttggggaagggtctacctctgactgtgatatttttgtgtttaaagtcttgcctgaggtcttggaaaaacagtgtggatataagctgttcatttatggaagggatgactacgttggggaagacattgttgaggtcattaatgaaaacgtaaagaaaagcagaagactgattatcattttagtcagagaaacatcaggcttcagctggctgggtggttcatctgaagagcaaatagccatgtataatgctcttgttcaggatggaattaaagttgtcctgcttgagctggagaaaatccaagactatgagaaaatgccagaatcgattaaattcattaagcagaaacatggggctatccgctggtcaggggactttacacagggaccacagtctgcaaagacaaggttctggaagaatgtcaggtaccacatgccagtccagcgacggtcaccttcatctaaacaccagttactgtcaccagccactaaggagaaactgcaaagagaggctcacgtgcctctcgggtagcatggagaagttgccaagagttctttaggtgcctcctgtcttatggcgttgcaggccaggttatgcctcatgctgacttgcagagttcatggaatgtaactatatcatcctttatccctgaggtcacctggaatcagattattaagggaataagccatgacgtcaatagcagcccagggcacttcagagtagagggcttgggaagatcttttaaaaaggcagtaggcccggtgtggtggctcacgcctataatcccagcactttgggaggctgaagtgggtggatcaccagaggtcaggagttcgagaccagcccagccaacatggcaaaaccccatctctactaaaaatacaaaaatgagctaggcatggtggcacacgcctgtaatcccagctacacctgaggctgaggcaggagaattgcttgaaccggggagacggaggttgcagtgagccgagtttgggccactgcactctagcctggcaacagagcaagactccgtctcaaaaaaagggcaataaatgccctctctgaatgtttgaactgccaagaaaaggcatggagacagcgaactagaagaaagggcaagaaggaaatagccaccgtctacagatggcttagttaagtcatccacagcccaagggcggggctatgccttgtctggggaccctgtagagtcactgaccctggagcggctctcctgagaggtgctgcaggcaaagtgagactgacacctcactgaggaagggagacatattcttggagaactttccatctgcttgtattttccatacacatccccagccagaagttagtgtccgaagaccgaattttattttacagagcttgaaaactcacttcaatgaacaaagggattctccaggattccaaagttttgaagtcatcttagctttccacaggagggagagaacttaaaaaagcaacagtagcagggaattgatccacttcttaatgctttcctccctggcatgaccatcctgtcctttgttattatcctgcattttacgtctttggaggaacagctccctagtggcttcctccgtctgcaatgtcccttgcacagcccacacatgaaccatccttcccatgatgccgctcttctgtcatcccgctcctgctgaaacacctcccaggggctccacctgttcaggagctgaagcccatgctttcccaccagcatgtcactcccagaccacctccctgccctgtcctccagcttcccctcgctgtcctgctgtgtgaattcccaggttggcctggtggccatgtcgcctgcccccagcactcctctgtctctgctcttgcctcgacccttcctcctcctttgcctaggaggccttctcgcattttctctagctgatcagaattttaccaaaattcagaacatcctccaattccacagtctctgggagactttccctaagaggcgacttcctctccagccttctctctctggtcaggcccactgcagagatggtggtgagcacatctgggaggctggtctccctccagctggaattgctgctctctgagggagaggctgtggtggctgtctctgtccctcactgccttccaggagcaatttgcacatgtaacatagatttatgtaatgctttatgtttaaaaacattccccaattatcttatttaatttttgcaattattctaattttatatatagagaaagtgacctattttttaaaaaaatcacactctaagttctattgaacctaggacttgagcctccatttctggcttctagtctggtgttctgagtacttgatttcaggtcaataacggtcccccctcactccacactggcacgtttgtgagaagaaatgacattttgctaggaagtgaccgagtctaggaatgcttttattcaagacaccaaattccaaacttctaaatgttggaattttcaaaaattgtgtttagattttatgaaaaactcttctactttcatctattctttccctagaggcaaacatttcttaaaatgtttcattttcattaaaaatgaaagccaaatttatatgccaccgattgcaggacacaagcacagttttaagagttgtatgaacatggagaggacttttggtttttatatttctcgtatttaatatgggtgaacaccaacttttatttggaataataattttcctcctaaacaaaaacacattgagtttaagtctctgactcttgcctttccacctgctttctcctgggcccgctttgcctgcttgaaggaacagtgctgttctggagctgctgttccaacagacagggcctagctttcatttgacacacagactacagccagaagcccatggagcagggatgtcacgtcttgaaaagcctattagatgttttacaaatttaattttgcagattattttagtctgtcatccagaaaatgtgtcagcatgcatagtgctaagaaagcaagccaatttggaaacttaggttagtgacaaaattggccagagagtgggggtgatgatgaccaagaattacaagtagaatggcagctggaatttaaggagggacaagaatcaatggataagcgtgggtggaggaagatccaaacagaaaagtgcaaagttattccccatcttccaagggttgaattctggaggaagaagacacattcctagttccccgtgaacttcctttgacttattgtccccactaaaacaaaacaaaaaacttttaatgccttccacattaattagattttcttgcagtttttttatggcatttttttaaagatgccctaagtgttgaagaagagtttgcaaatgcaacaaaatatttaattaccggttgttaaaactggtttagcacaatttatattttccctctcttgcctttcttatttgcaataaaaggtattgagccattttttaaatgacatttttgataaattatgtttgtactagttgatgaaggagttttttttaacctgtttatataattttgcagcagaagccaaattttttgtatattaaagcaccaaattcatgtacagcatgcatcacggatcaatagactgtacttattttccaataaaattttcaaactttgtactgttaaa

SEQ ID NO: 13409 - DNA, 2165 bp, Homo sapiens
gcggccgccccggcggctcctggaaccccggttcgcggcgatgccagccaccccagcgaagccgccgcagttcagtgcttggataatttgaaagtacaatagttggtttccctgtccacccgccccacttcgcttgccatcacagcacgcctatcggatgtgagaggagaagtcccgctgctcgggcactgtctatatacgcctaacacctacatatattttaaaaacattaaatataattaacaatcaaaagaaagaggagaaaggaagggaagcattactgggttactatgcacttgcgactgatttcttggctttttatcattttgaactttatggaatacatcggcagccaaaacgcctcccggggaaggcgccagcgaagaatgcatcctaacgttagtcaaggctgccaaggaggctgtgcaacatgctcagattacaatggatgtttgtcatgtaagcccagactattttttgctctggaaagaattggcatgaagcagattggagtatgtctctcttcatgtccaagtggatattatggaactcgatatccagatataaataagtgtacaaaatgcaaagctgactgtgatacctgtttcaacaaaaatttctgcacaaaatgtaaaagtggattttacttacaccttggaaagtgccttgacaattgcccagaagggttggaagccaacaaccatactatggagtgtgtcagtattgtgcactgtgaggtcagtgaatggaatccttggagtccatgcacgaagaagggaaaaacatgtggcttcaaaagagggactgaaacacgggtccgagaaataatacagcatccttcagcaaagggtaacctgtgtcccccaacaaatgagacaagaaagtgtacagtgcaaaggaagaagtgtcagaagggagaacgaggaaaaaaaggaagggagaggaaaagaaaaaaacctaataaaggagaaagtaaagaagcaatacctgacagcaaaagtctggaatccagcaaagaaatcccagagcaacgagaaaacaaacagcagcagaagaagcgaaaagtccaagataaacagaaatcggtatcagtcagcactgtacactagagggttccatgagattattgtagactcatgatgctgctatctcaaccagatgcccaggacaggtgctctagccattaggaccacaaatggacatgtcagttattgctctgtctaaacaacattcccagtagttgctatattcttcatacaagcatagttaacaacaaagagccaaaagatcaaagaagggatactttcagatggttgtcttgtgtgcttctctgcatttttaaaagacaagacattcttgtacatattatcaataggctataagatgtaacaacgaaatgatgacatctggagaagaaacatcttttccttataaaaatgtgttttcaagctgttgttttaagaagcaaaagatagttctgcaaattcaaagatacagtatcccttcaaaacaaataggagttcagggaagagaaacatccttcaaaggacagtgttgttttgaccgggagatctagagagtgctcagaattagggcctggcatttggaatcacaggatttatcatcacagaaacaactgttttaagattagttccatcactctcatcctgtatttttataagaaacacaagagtgcataccagaattgaatataccatatgggattggagaaagacaaatgtggaagaaatcatagagctggagactacttttgtgctttacaaaactgtgaaggattgtggtcacctggaacaggtctccaatctatgttagcactatgtggctcagcctctgttaccccttggattatatatcaacctgtaaacatgtgcctgtaacttacttccaaaaacaaaatcatacttattagaagaaaattctgattttatagaaaaaaaatagagcaaggagaatataacatgtttgcaaagtcatgtgttttctttctcaatgagggaaaaacaattttattacctgcttaatggtccacctggaactaaaagggatactattttctaacaaggtatatctagtaggggagaaagccaccacaataaatatatttgttaatagtttttcaaaaaaaaaaaaaaaaaaaaaaaaaa

SEQ ID NO: 13410 - DNA, 2195 bp, Homo sapiens
gcctctgtgtgcccaggaagggacttcatttctgcctgtggattctttagaatgcccagtcgtctgcgggtcctgccctgatcacaaggagaagccaggagcctcctcttcaggctacaaccttccttcttaagggccacagagtttgtggccccacccccagcacagccccaccttggccccaggaaccctgggagtggccttggcttcctgcaggacagccatggacctactctggatgcccctgctgctggtggccgcttgtgtctctgctgtccacagctcaccagaggttaacgccggtgtttccagcatccacataaccaagcctgtgcacatcctggaggaacgcagtctcctagtgctaacgcccgctggcctgacccagatgctgaaccagacccgcttcctcatggtgcttttccacaacccatcctcaaagcaatccaggaacttggcggaagagctgggcaaagctgtggagatcatgggcaaaggcaagaatgggatcggctttggcaaagtggacattaccatagagaaggagcttcagcaggagtttgggattaccaaggccccggagttgaagctgttttttgagggcaacaggtcagagcccatcagctgcaaaggagtggttgaatctgctgccttagtcgtttggttgagacgacaaattagccagaaagcatttttgttcaacagcagcgagcaggtggcagagtttgtgatatccaggcccttggtcatcgttggcttcttccaggatttagaggaagaagtagcagagttgttctatgatgtgatcaaagactttccagagctaacgtttggagtcataacgattggcaatgtcattgggcgtttccacgtcacccttgacagcgtcctggtgttcaaaaagggaaaaattgtgaaccgccaaaagcttattaatgacagtaccaacaaacaggaactcaatcgtgtcataaaacagcaccttacagattttgtgatcgaatacaacactgagaataaggatctgatttccgagttgcacatcatgagtcacatgctgctgtttgtctccaaaagctccgagtcatatggtatcataattcagcattataagctggcatcaaaggaattccaaaacaagatccttttcatccttgtggatgcagacgaacccagaaatggacgtgtcttcaagtacttccgggtcacagaggtcgatatcccatccgtccaaatcctaaacttgagctctgacgccaggtacaaaatgccttcagatgacataacctacgaaagcctcaagaaatttggccgcagcttcctgagtaaaaatgccacaaaacatcaatccagtgaagagattccaaaatactgggaccagggactggttaagcagctcgtggggaagaacttcaacgtagtcgtctttgacaaagaaaaggacgtatttgtgatgttctatgcaccctggtctaaaaagtgcaagatgctgttcccactgttggaggaattgggcagaaaatatcaaaaccactccacaattatcattgccaagatcgatgtcacagcaaatgacattcagctgatgtacctggaccggtacccattcttcaggctgttccccagcggctctcaacaagctgtcctgtataagggagaacacaccctgaagggcttctctgacttcctggaaagccacatcaaaactaagattgaggatgaggatgagctgttgtctgttgagcaaaatgaagtgatagaagaggaagtgctagctgaggaaaaggaggtgcctatgatgaggaaagggttacctgaacagcagtcgcctgagctggagaacatgaccaagtacgtatccaagctggaagagcccgctgggaagaagaaaacatctgaggaggtggtggtggtggtggctaagccaaagggacctccagtgcaaaagaagaaaccaaaagtcaaggaagaactttagcttctccaataccaggaaaaaagatgcttattttccagatcctggcatcattttctgaatggattgattccaataaaagcatatatcattgtggtagggtaggtggggcgggggtaggggtggataataaagcctctgagtgtccttggaaaaaaaaaaaaaaaaaaaaaaaaaaaaaaaaaaaaaaaaaaaaaaaaaaaaaaaaaaaaaaaaaaaa

SEQ ID NO: 13411 - DNA, 2439 bp, Homo sapiens
attcccatggctggccagaggaggaacgctttgtgttctcatcggagctgcatgggaagtctgcatacagcaaagtgacctgcatgcctcaccttatggaaaggatggtgggctctggcctcctgtggctggccttggtctcctgcattctgacccaggcatctgcagtgcagcgaggttatggaaaccccattgaagccagttcgtatgggctggacctggactgcggagctcctggcaccccagaggctcatgtctgttttgacccctgtcagaattacaccctcctggatgaacccttccgaagcacagagaactcagcagggtcccaggggtgcgataaaaacatgagcggctggtaccgctttgtaggggaaggaggagtaaggatgtcggagacctgtgtccaggtgcaccgatgccagacagacgctcccatgtggctgaatgggacccaccctgcccttggggatggcatcaccaaccacactgcctgtgcccattggagtggcaactgctgtttctggaaaacagaggtgctggtgaaggcctgcccaggcgggtaccatgtgtaccggttggaaggcactccctggtgtaatctgagatactgcacagacccatccactgtggaggacaagtgtgagaaggcctgccgccccgaggaggagtgccttgccctcaacagcacctggggctgtttctgcagacaggacctcaatagttctgatgtccacagtttgcagcctcagctagactgtgggcccagggagatcaaggtgaaggtggacaaatgtttgctgggaggcctgggtttgggggaggaggtcattgcctacctgcgagacccaaactgcagcagcatcttgcagacagaggagaggaactgggtatctgtgaccagccccgtccaggctagtgcctgcaggaacattctggagagaaatcaaacccatgccatctacaaaaacaccctctccttggtcaatgatttcatcatcagagacaccatcctcaacatcaacttccaatgtgcctacccactggacatgaaagtcagcctccaagctgccttgcagcccattgtaagttccctgaacgtcagtgtggacgggaatggagagttcattgtcaggatggccctcttccaagaccagaactacacgaatccttacgaaggggatgcagttgaactgtctgttgagtccgtgctgtatgtgggtgccatcttggaacaaggggacacctcccggtttaacctggtgttgaggaactgctatgccacccccactgaagacaaggctgaccttgtgaagtatttcatcatcagaaacagctgctcaaatcaacgtgattccaccatccacgtggaggagaatgggcagtcctcggaaagccggttctcagttcagatgttcatgtttgctggacattatgacctagttttcctgcattgtgagattcatctctgtgattctcttaatgaacagtgccagccttcttgctcaagaagtcaagtccgcagtgaagtaccggccatcgacctagcccgggttctagatttggggcccatcactcggagaggtgcacagtctcccggtgtcatgaatggaacccctagcactgcagggttcctggtggcctggcctatggtcctcctgactgtcctcctggcttggctgttctgagagctccgctgagcatctggccttgaagtttgtgttcttccctctggcaatggctcccttcagcacttctgctttccactccaattcacacaggcttggtattaacagaatcaaggccaggctaggttaggaaaagggaagagctttcaccttctttaaaactctcggctgggcgcagtggctcatgcctgtaatcccagcattttgggaggctgaggcaggtggatcacctgaggtcagcagttcaaaatcagcctggccaaaatgctgaaactccgtctctactaaaaatacaaaaattagccaggcatggtggcaggcgcctgtaatcccagctactcgggaggccaaggcaggagaattgctcgaactcagggggtggaggttgcagtgagttgagattgtgccattgcactccagcctgggcaacagagcaagactctgtctcaggaaaaaaaaaaaaaaaaaagaaaagcaacatagtggggtttctgtcaatctgtcctcggctgcccttctcatttgttgatgggaccttgaaagcaagcttgctaggtgccctctgtggctccagcctttaccggaagtgtggtgcatgtttttaacttcagggaagcggtatcctgtcactggggtatgggatgagcatggagaagaggcaccagccacgattccttcctaagcatctcctgttctgactgctcatgaattgaagaaactgacccttgtgttcaaaaaaaaaaaaaaaaaa

SEQ ID NO: 13412 - DNA, 1472 bp, Homo sapiens
gagcctcctggggtgtccacgtgagcgcgcgtgagtccgcccccccagtcacgtgaccgctgactcggggcgttctccactatcgcttacctacctccctctgcaggaacccggcgatatggctgccgctgtgccccgcgccgcatttctctccccgctgcttccccttctcctgggcttcctgctcctctccgctccgcatggcggcagcggcctgcacaccaagggcgcccttcccctggatacggtcactttctacaaggtcattcccaaaagcaagttcgtcttggtgaagttcgacacccagtacccctacggtgagaagcaggatgagttcaagcgtcttgctgaaaactcggcttccagcgatgatctcttggtggcagaggtggggatctcagattatggtgacaagctgaacatggagctgagtgagaaatacaagctggacaaagagagctacccagtcttctacctcttccgggatggggactttgagaacccagtcccatacactggggcagttaaggttggagccatccagcgctggctgaaggggcaaggggtctacctaggtatgcctggttgcctgcctgtatacgacgccctggccggggagttcatcagggcctctggtgtggaggcccgccaggccctcttgaagcaggggcaagataacctctcaagtgtgaaggagactcagaagaagtgggccgagcaatacctgaagatcatggggaagatcttagaccaaggggaggacttcccagcatcagagatgacacggatcgccaggctgattgagaagaacaagatgagtgacgggaagaaggaggagctccagaagagcttaaacatcctgactgccttccagaagaagggggccgagaaagaggagctgtaaaaaggctgtctgtgattttccagggtttggtgggggtagggaggggagagttaacctgctggctgtgagtcccttgtggaatataagggggtagtgggaaaagtggtactaacccacgattctgagccctgagtatgcctggacattgatgctaacatgaccatgcttgggatgtctctagctggtctggggatagctggagcacttactcaggtggctggtgaaatgacacctcagaaggaatgagtgctatagagaggagagaggagtgtactgcccaggtctttgacagatgtaattctcattcaattaaagtttcagtgttttggttaagtggacctgaagccattcttttttcttttcaaattatactttcgtctatgacctgctttcctctttgaatctaagctggtatagactccactttcccagggtaacaaactatcctcataacactgtggaaactggcatacctttgttattttccagtgatattcagactgacatggattgactgtcaatggtaaagtttgtctattttccagtccttaaaactcaatagcagtat

SEQ ID NO: 13413 - DNA, 9030 bp, Homo sapiens
gcttagtgctgagcacatccagtgggtaaagttccttaaaatgctctgcaaagaaattgggacttttcattaaatcagaaattttacttttttcccctcctgggagctaaagatattttagagaagaattaaccttttgcttctccagttgaacatttgtagcaataagtcatgcaaatagagctctccacctgcttctttctgtgccttttgcgattctgctttagtgccaccagaagatactacctgggtgcagtggaactgtcatgggactatatgcaaagtgatctcggtgagctgcctgtggacgcaagatttcctcctagagtgccaaaatcttttccattcaacacctcagtcgtgtacaaaaagactctgtttgtagaattcacggatcaccttttcaacatcgctaagccaaggccaccctggatgggtctgctaggtcctaccatccaggctgaggtttatgatacagtggtcattacacttaagaacatggcttcccatcctgtcagtcttcatgctgttggtgtatcctactggaaagcttctgagggagctgaatatgatgatcagaccagtcaaagggagaaagaagatgataaagtcttccctggtggaagccatacatatgtctggcaggtcctgaaagagaatggtccaatggcctctgacccactgtgccttacctactcatatctttctcatgtggacctggtaaaagacttgaattcaggcctcattggagccctactagtatgtagagaagggagtctggccaaggaaaagacacagaccttgcacaaatttatactactttttgctgtatttgatgaagggaaaagttggcactcagaaacaaagaactccttgatgcaggatagggatgctgcatctgctcgggcctggcctaaaatgcacacagtcaatggttatgtaaacaggtctctgccaggtctgattggatgccacaggaaatcagtctattggcatgtgattggaatgggcaccactcctgaagtgcactcaatattcctcgaaggtcacacatttcttgtgaggaaccatcgccaggcgtccttggaaatctcgccaataactttccttactgctcaaacactcttgatggaccttggacagtttctactgttttgtcatatctcttcccaccaacatgatggcatggaagcttatgtcaaagtagacagctgtccagaggaaccccaactacgaatgaaaaataatgaagaagcggaagactatgatgatgatcttactgattctgaaatggatgtggtcaggtttgatgatgacaactctccttcctttatccaaattcgctcagttgccaagaagcatcctaaaacttgggtacattacattgctgctgaagaggaggactgggactatgctcccttagtcctcgcccccgatgacagaagttataaaagtcaatatttgaacaatggccctcagcggattggtaggaagtacaaaaaagtccgatttatggcatacacagatgaaacctttaagactcgtgaagctattcagcatgaatcaggaatcttgggacctttactttatggggaagttggagacacactgttgattatatttaagaatcaagcaagcagaccatataacatctaccctcacggaatcactgatgtccgtcctttgtattcaaggagattaccaaaaggtgtaaaacatttgaaggattttccaattctgccaggagaaatattcaaatataaatggacagtgactgtagaagatgggccaactaaatcagatcctcggtgcctgacccgctattactctagtttcgttaatatggagagagatctagcttcaggactcattggccctctcctcatctgctacaaagaatctgtagatcaaagaggaaaccagataatgtcagacaagaggaatgtcatcctgttttctgtatttgatgagaaccgaagctggtacctcacagagaatatacaacgctttctccccaatccagctggagtgcagcttgaggatccagagttccaagcctccaacatcatgcacagcatcaatggctatgtttttgatagtttgcagttgtcagtttgtttgcatgaggtggcatactggtacattctaagcattggagcacagactgacttcctttctgtcttcttctctggatataccttcaaacacaaaatggtctatgaagacacactcaccctattcccattctcaggagaaactgtcttcatgtcgatggaaaacccaggtctatggattctggggtgccacaactcagactttcggaacagaggcatgaccgccttactgaaggtttctagttgtgacaagaacactggtgattattacgaggacagttatgaagatatttcagcatacttgctgagtaaaaacaatgccattgaaccaagaagcttctcccagaattcaagacaccctagcactaggcaaaagcaatttaatgccaccacaattccagaaaatgacatagagaagactgacccttggtttgcacacagaacacctatgcctaaaatacaaaatgtctcctctagtgatttgttgatgctcttgcgacagagtcctactccacatgggctatccttatctgatctccaagaagccaaatatgagactttttctgatgatccatcacctggagcaatagacagtaataacagcctgtctgaaatgacacacttcaggccacagctccatcacagtggggacatggtatttacccctgagtcaggcctccaattaagattaaatgagaaactggggacaactgcagcaacagagttgaagaaacttgatttcaaagtttctagtacatcaaataatctgatttcaacaattccatcagacaatttggcagcaggtactgataatacaagttccttaggacccccaagtatgccagttcattatgatagtcaattagataccactctatttggcaaaaagtcatctccccttactgagtctggtggacctctgagcttgagtgaagaaaataatgattcaaagttgttagaatcaggtttaatgaatagccaagaaagttcatggggaaaaaatgtatcgtcaacagagagtggtaggttatttaaagggaaaagagctcatggacctgctttgttgactaaagataatgccttattcaaagttagcatctctttgttaaagacaaacaaaacttccaataattcagcaactaatagaaagactcacattgatggcccatcattattaattgagaatagtccatcagtctggcaaaatatattagaaagtgacactgagtttaaaaaagtgacacctttgattcatgacagaatgcttatggacaaaaatgctacagctttgaggctaaatcatatgtcaaataaaactacttcatcaaaaaacatggaaatggtccaacagaaaaaagagggccccattccaccagatgcacaaaatccagatatgtcgttctttaagatgctattcttgccagaatcagcaaggtggatacaaaggactcatggaaagaactctctgaactctgggcaaggccccagtccaaagcaattagtatccttaggaccagaaaaatctgtggaaggtcagaatttcttgtctgagaaaaacaaagtggtagtaggaaagggtgaatttacaaaggacgtaggactcaaagagatggtttttccaagcagcagaaacctatttcttactaacttggataatttacatgaaaataatacacacaatcaagaaaaaaaaattcaggaagaaatagaaaagaaggaaacattaatccaagagaatgtagttttgcctcagatacatacagtgactggcactaagaatttcatgaagaaccttttcttactgagcactaggcaaaatgtagaaggttcatatgacggggcatatgctccagtacttcaagattttaggtcattaaatgattcaacaaatagaacaaagaaacacacagctcatttctcaaaaaaaggggaggaagaaaacttggaaggcttgggaaatcaaaccaagcaaattgtagagaaatatgcatgcaccacaaggatatctcctaatacaagccagcagaattttgtcacgcaacgtagtaagagagctttgaaacaattcagactcccactagaagaaacagaacttgaaaaaaggataattgtggatgacacctcaacccagtggtccaaaaacatgaaacatttgaccccgagcaccctcacacagatagactacaatgagaaggagaaaggggccattactcagtctcccttatcagattgccttacgaggagtcatagcatccctcaagcaaatagatctccattacccattgcaaaggtatcatcatttccatctattagacctatatatctgaccagggtcctattccaagacaactcttctcatcttccagcagcatcttatagaaagaaagattctggggtccaagaaagcagtcatttcttacaaggagccaaaaaaaataacctttctttagccattctaaccttggagatgactggtgatcaaagagaggttggctccctggggacaagtgccacaaattcagtcacatacaagaaagttgagaacactgttctcccgaaaccagacttgcccaaaacatctggcaaagttgaattgcttccaaaagttcacatttatcagaaggacctattccctacggaaactagcaatgggtctcctggccatctggatctcgtggaagggagccttcttcagggaacagagggagcgattaagtggaatgaagcaaacagacctggaaaagttccctttctgagagtagcaacagaaagctctgcaaagactccctccaagctattggatcctcttgcttgggataaccactatggtactcagataccaaaagaagagtggaaatcccaagagaagtcaccagaaaaaacagcttttaagaaaaaggataccattttgtccctgaacgcttgtgaaagcaatcatgcaatagcagcaataaatgagggacaaaataagcccgaaatagaagtcacctgggcaaagcaaggtaggactgaaaggctgtgctctcaaaacccaccagtcttgaaacgccatcaacgggaaataactcgtactactcttcagtcagatcaagaggaaattgactatgatgataccatatcagttgaaatgaagaaggaagattttgacatttatgatgaggatgaaaatcagagcccccgcagctttcaaaagaaaacacgacactattttattgctgcagtggagaggctctgggattatgggatgagtagctccccacatgttctaagaaacagggctcagagtggcagtgtccctcagttcaagaaagttgttttccaggaatttactgatggctcctttactcagcccttataccgtggagaactaaatgaacatttgggactcctggggccatatataagagcagaagttgaagataatatcatggtaactttcagaaatcaggcctctcgtccctattccttctattctagccttatttcttatgaggaagatcagaggcaaggagcagaacctagaaaaaactttgtcaagcctaatgaaaccaaaacttacttttggaaagtgcaacatcatatggcacccactaaagatgagtttgactgcaaagcctgggcttatttctctgatgttgacctggaaaaagatgtgcactcaggcctgattggaccccttctggtctgccacactaacacactgaaccctgctcatgggagacaagtgacagtacaggaatttgctctgtttttcaccatctttgatgagaccaaaagctggtacttcactgaaaatatggaaagaaactgcagggctccctgcaatatccagatggaagatcccacttttaaagagaattatcgcttccatgcaatcaatggctacataatggatacactacctggcttagtaatggctcaggatcaaaggattcgatggtatctgctcagcatgggcagcaatgaaaacatccattctattcatttcagtggacatgtgttcactgtacgaaaaaaagaggagtataaaatggcactgtacaatctctatccaggtgtttttgagacagtggaaatgttaccatccaaagctggaatttggcgggtggaatgccttattggcgagcatctacatgctgggatgagcacactttttctggtgtacagcaataagtgtcagactcccctgggaatggcttctggacacattagagattttcagattacagcttcaggacaatatggacagtgggccccaaagctggccagacttcattattccggatcaatcaatgcctggagcaccaaggagcccttttcttggatcaaggtggatctgttggcaccaatgattattcacggcatcaagacccagggtgcccgtcagaagttctccagcctctacatctctcagtttatcatcatgtatagtcttgatgggaagaagtggcagacttatcgaggaaattccactggaaccttaatggtcttctttggcaatgtggattcatctgggataaaacacaatatttttaaccctccaattattgctcgatacatccgtttgcacccaactcattatagcattcgcagcactcttcgcatggagttgatgggctgtgatttaaatagttgcagcatgccattgggaatggagagtaaagcaatatcagatgcacagattactgcttcatcctactttaccaatatgtttgccacctggtctccttcaaaagctcgacttcacctccaagggaggagtaatgcctggagacctcaggtgaataatccaaaagagtggctgcaagtggacttccagaagacaatgaaagtcacaggagtaactactcagggagtaaaatctctgcttaccagcatgtatgtgaaggagttcctcatctccagcagtcaagatggccatcagtggactctcttttttcagaatggcaaagtaaaggtttttcagggaaatcaagactccttcacacctgtggtgaactctctagacccaccgttactgactcgctaccttcgaattcacccccagagttgggtgcaccagattgccctgaggatggaggttctgggctgcgaggcacaggacctctactgagggtggccactgcagcacctgccactgccgtcacctctccctcctcagctccagggcagtgtccctccctggcttgccttctacctttgtgctaaatcctagcagacactgccttgaagcctcctgaattaactatcatcagtcctgcatttctttggtggggggccaggagggtgcatccaatttaacttaactcttacctattttctgcagctgctcccagattactccttccttccaatataactaggcaaaaagaagtgaggagaaacctgcatgaaagcattcttccctgaaaagttaggcctctcagagtcaccacttcctctgttgtagaaaaactatgtgatgaaactttgaaaaagatatttatgatgttaacatttcaggttaagcctcatacgtttaaaataaaactctcagttgtttattatcctgatcaagcatggaacaaagcatgtttcaggatcagatcaatacaatcttggagtcaaaaggcaaatcatttggacaatctgcaaaatggagagaatacaataactactacagtaaagtctgtttctgcttccttacacatagatataattatgttatttagtcattatgaggggcacattcttatctccaaaactagcattcttaaactgagaattatagatggggttcaagaatccctaagtcccctgaaattatataaggcattctgtataaatgcaaatgtgcatttttctgacgagtgtccatagatataaagccatttggtcttaattctgaccaataaaaaaataagtcaggaggatgcaattgttgaaagctttgaaataaaataacaatgtcttcttgaaatttgtgatggccaagaaagaaaatgatgatgacattaggcttctaaaggacatacatttaatatttctgtggaaatatgaggaaaatccatggttatctgagataggagatacaaactttgtaattctaataatgcactcagtttactctctccctctactaatttcctgctgaaaataacacaacaaaaatgtaacaggggaaattatataccgtgactgaaaactagagtcctacttacatagttgaaatatcaaggaggtcagaagaaaattggactggtgaaaacagaaaaaacactccagtctgccatatcaccacacaataggatcccccttcttgccctccacccccataagattgtgaagggtttactgctccttccatctgcctgaccccttcactatgactacacagaatctcctgatagtaaagggggctggaggcaaggataagttatagagcagttggaggaagcatccaaagattgcaacccagggcaaatggaaaacaggagatcctaatatgaaagaaaaatggatcccaatctgagaaaaggcaaaagaatggctacttttttctatgctggagtattttctaataatcctgcttgacccttatctgacctctttggaaactataacatagctgtcacagtatagtcacaatccacaaatgatgcaggtgcaaatggtttatagccctgtgaagttcttaaagtttagaggctaacttacagaaatgaataagttgttttgttttatagcccggtagaggagttaaccccaaaggtgatatggttttatttcctgttatgtttaacttgataatcttattttggcattcttttcccattgactatatacatctctatttctcaaatgttcatggaactagctcttttattttcctgctggtttcttcagtaatgagttaaataaaacattgacacataca

SEQ ID NO: 13414 - DNA, 2130 bp, Homo sapiens
cattgtgttgggcacagctctcactcaccctccggcttcctgtcggggctttctcagccccaccccacgtttggacatttggagcatttccttccctgacagccggacctgggactgggctggggccctggcggatggagacatgctgcccctgctgctgctgcccctgctgtggggggggtccctgcaggagaagccagtgtacgagctgcaagtgcagaagtcggtgacggtgcaggagggcctgtgcgtccttgtgccctgctccttctcttacccctggagatcctggtattcctctcccccactctacgtctactggttccgggacggggagatcccatactacgctgaggttgtggccacaaacaacccagacagaagagtgaagccagagacccagggccgattccgcctccttggggatgtccagaagaagaactgctccctgagcatcggagatgccagaatggaggacacgggaagctatttcttccgcgtggagagaggaagggatgtaaaatatagctaccaacagaataagctgaacttggaggtgacagccctgatagagaaacccgacatccactttctggagcctctggagtccggccgccccacaaggctgagctgcagccttccaggatcctgtgaagcgggaccacctctcacattctcctggacggggaatgccctcagccccctggaccccgagaccacccgctcctcggagctcaccctcacccccaggcccgaggaccatggcaccaacctcacctgtcagatgaaacgccaaggagctcaggtgaccacggagagaactgtccagctcaatgtctcctatgctccacagaccatcaccatcttcaggaacggcatagccctagagatcctgcaaaacacctcataccttccggtcctggagggccaggctctgcggctgctctgtgatgctcccagcaacccccctgcacacctgagctggttccagggctcccctgccctgaacgccacccccatctccaataccgggatcttggagcttcgtcgagtaaggtctgcagaagaaggaggcttcacctgccgcgctcagcacccgctgggcttcctgcaaatttttctgaatctctcagtttactccctcccacagttgctgggcccctcctgctcctgggaggctgagggtctgcactgcagatgctcctttcgagcccggccggccccctccctgtgctggcggcttgaggagaagccgctggaggggaacagcagccagggctcattcaaggtcaactccagctcagctgggccctgggccaacagctccctgatcctccacggggggctcagctccgacctcaaagtcagctgcaaggcctggaacatctatgggtcccagagcggctctgtcctgctgctgcaagggagatcgaacctcgggacaggagtggttcctgcagcccttggtggtgctggtgtcatggccctgctctgtatctgtctgtgcctcatcttctttttaatagtgaaagcccgcaggaagcaagcagctgggagaccagagaaaatggatgatgaagaccccattatgggtaccatcacctcgggttccaggaagaagccctggccagacagccccggagatcaagcatctcctcctggggatgcccctcccttggaagaacaaaaggagctccattatgcctcccttagtttttctgagatgaagtcgagggagcctaaggaccaggaggccccaagcaccacggagtactcggagatcaagacaagcaagtgaggatttgcccagagttcagtcctggctggaggagccacagcctgtctgggggaaaggacaagtcagggaccacttgctgaagcacgaagagcccttgtggcaatgttaacattaactgatgtttaagtgctccaagcagagcagaaagaaaacagatgatggaattagagaggtgggctcaaatctaggccctggcactgtcatcaagcaattcactgcatccctctgtgcctcagtttcccattctgtaaatcagagatcatgcatgctacctcaaaggttgttgtgaacattaaagaaatcaacacatggaaatcaaaaaaaaaaaaaaa

SEQ ID NO: 13415 - DNA, 1635 bp, Homo sapiens
atgtggctgctgcggtgcgttttgctgtgtgtttcattatctcttgctgtgagtggccagcataagcctgaggcaccagattattccagtgtgctccactgtgggccgtggagcttccagtttgctgtaaacctcaaccaggaggcaacgtctcctcctgtactaatagcttgggacaaccaagggctgctgcacgagctgcagaatgactccgactgtggcacctggataagaaaaggtccaggcagctccgtggtgttggaggcaacctatagcagctgctatgtcactgagtgggactcccactacatcatgccagttggagttgaaggagcaggcgcggctgaacacaaggtggttacagagaggaagctgctcaagtgtcctatggatcttctagcccgagatgctccagatactgactggtgtgactccatcccagcacgggacagactgccatgtgcaccttcacccatctctcgaggagactgtgaagggctaggctgttgttatagctctgaagaggtgaattcctgctactatggaaacactgtgaccttgcattgtacccgagagggccatttctctattgctgtgtctcggaacgtgacctcgccaccactgctcttggattctgtgcgcttggcccttaggaatgacagtgcgtgtaaccctgtgatggcaacacaagcttttgttctgttccagtttccatttacttcctgtggcaccacaagacagatcactggagaccgagcagtatatgaaaatgaactggtggcaactagggatgtgaaaaatgggagccgtggctctgtcactcgtgacagcatcttcaggctccatgtcagctgcagctactcagtaagtagcaactctctcccaatcaatgtccaggttttcactctcccaccaccctttcctgagacccagcctggacccctcactctggaacttcagattgccaaagataaaaactatggctcttactacggtgttggtgactacccagtggtgaagttgcttcgggatcccatttacgtggaggtctccatccttcacagaacagacccctacctggggctgctcctacaacagtgttgggcaacacccagcactgaccccctgagtcagccacagtggcccatcctggtaaagggctgcccctacattggagacaactatcagacccagctgatccctgtccagaaagccttggatcttccatttccctctcaccaccagcgcttcagcatcttcaccttcagctttgtgaaccctacagtggagaaacaggccctcaggggaccggtgcatctgcactgcagcgtgtcagtctgccagcctgctgagacaccatcctgtgtggtgacctgtcctgatctcagtcgaagaagaaattttgacaacagttctcagaacactactgctagtgtttctagcaaaggccccatgattctactccaagccactaaggaccctccagaaaagctccgtgttcctgtagactcgaaagttctgtgggtggcaggcctttctgggaccttaatccttggagccttgttagtatcctacttggctgtcaagaaacagaagagttgcccagaccaaatgtgtcaataaaaccagagtgta

SEQ ID NO: 13416 - DNA, 3250 bp, Homo sapiens
gcggaaacatggcggcgggaagggagtgagccgccccgcgcccccgccgcgccctcagatggagaaattagcatacaaagaaactgacttgtcagaagtcagagcaaggtattggtggatccagggataaatcccaaacttcttaacccctagaccggtttttagtccattgactatgcagcctaatgtgatagactggagtgatgttagaaaacacaaatatggtcacctatcagagtctgcatcccaatatcaagaagctgctgacatcctggatctagggttgtaaagaagattacatgagctaatggatgtgaaaacatcttaaaaactctcaaatacttttcaactttggaggattattatgattttcattctgttcagcggccatactcagactttactctaaaagtcaaatcttctgacattctttgaagtgaagcattctatgaatgtgagctgaagaaatgaatgaaatgaaataatgcagtcctacacacctccaagcaacgagttcaagatcagtatgaaattggaagcacaggaccccaggaacaccacatccacctgtattgccacagtagttggactgacaggtgcccgccttcgcctgcgccttgatgggagcgacaacaaaaatgacttctggcggctggttgactcagctgaaatccagcctattgggaactgtgaaaagaatgggggtatgctacagccacctcttggatttcggctgaatgcgtcttcttggcccatgttccttttgaagacgctaaatggagcagagatggctcccatcaggattttccacaaggagccaccatcgccttcccacaacttcttcaaaatgggaatgaagctagaagctgtggacaggaagaaccctcatttcatttgcccagccactattggggaggttcggggctcagaggtgcttgtcacttttgatgggtggcgaggggcctttgactactggtgccgcttcgactcccgagacatcttccctgtgggctggtgttccttgactggagacaacctgcagcctcctggcaccaaagttgtgattccaaagaatccctatcctgcctccgatgtgaatactgagaagcccagcatccacagcagcaccaaaactgtcttggaacatcaaccagggcagagggggcgtaaaccaggaaagaagcggggccggacacccaagaccctaatttcccatcccatctctgccccatccaagacagctgaacctttgaaattcccaaagaagagaggtcccaaacctggcagcaagaggaaacctcggactttgctgaacccaccacctgcctcaccaacaaccagcactcctgaaccggataccagcactgtaccccaggatgctgccaccatccccagctcagccatgcaggccccaacagtttgtatctacttgaacaagaatggcagcacaggcccccacttagataagaagaaggtccagcaactccctgaccattttggaccagcccgtgcctctgtggtgttgcagcaggctgtccaggcctgtatcgactgtgcttatcaccagaaaaccgtcttcagcttcctcaagcaaggccatggtggtgaggttatctcagccgtgtttgaccgggaacagcataccctcaacctcccagcagtcaacagcatcacctacgtcctccgcttcctggagaaactctgccacaaccttcgtagtgacaatctgtttggcaaccagccctttacacagactcacttgtcactcactgccatagagtacagccacagccacgacaggtacctaccaggtgaaacctttgtcctggggaatagtctggcccgctccttggaaccacactcagactcaatggactctgcctcaaatcccaccaaccttgtcagcacctcccaaaggcaccggcccttgctttcatcctgtggcctcccaccaagcactgcctcagctgtgcgcaggctatgctccagggggtcggaccgatacctggagagccgcgatgcctctcgactgagtggccgggacccctcctcgtggacagtcgaggatgtgatgcagtttgtccgggaagctgatcctcagcttggaccccacgctgacctgtttcgcaaacacgagatcgatggcaaggccctgctgctgctgcgcagtgacatgatgatgaagtacatgggcctgaagctggggcctgcactcaagctctcctaccacattgaccggctgaagcagggcaagttctgaaccaggagaggcagcctagacaaccaagtggcagcaggtgggggcattcttctaagaatgaggggcatcagcccaccccaggcacctcagtggggttccgggccacctcaggactccaagaggctgtgtggagccaccactcctagccacagctgccatgataagtccttccatgaaggactgaggagggagagtgggggtccagggctggtgctgctcttccctcagctctgccggggctctaaggtccctctatttatttctcaaccctggctggcctctcaccaggagtttaggctgaatgccttccacgtgatggaggaaaaggccaactctgtcctggtcttgctgtggcaccccatcgccccacagctcgtaccttctcaccagattcccctgaatccaaactcgtggtgcaaacctctaccttttttacaaaaagatcttattgttaatttattgtttctggcacttgggcaaaccctgtagttaatactcctcccacactagacactgggtttcaggaggagggagactgccctgctttggtcccagagaggccctctgcagataggcgtggcccctcttcagaggacactaccctagggcactttctctttgaggtggagagacccataaagccttgaccacatcactccatatggggaggagaaggatccctgtcaccttctcctctcttcacggggcccttttgcagccctaggcctcatctgtgggaagggagtccctggctcatactgcccccaccacagctccttgccctggccagaactgctgtcgaagaaaatcaggccggaaggccaagaaggcgctaagggggatgggagggcaggttttccaggctggagtcggttccacccactcgcctgtccacaggcttccttgtaagcaagtcagcagcacagctactcacgctgccatctggacttattttatgtcaatctgtttataaataaaaaccaatatagg

SEQ ID NO: 13417 - DNA, 6202 bp, Homo sapiens
agggagagagggcggggttattggaagaagaaaaagaaaaaaagaactagataaaggagggcacatccctctcactcccgcctttccccttacctttctgtctctcgggacccttatttcttcgtcacggtgtccaggaccattttgaccctgtcggccccggcacccccccgccgcaccccagccccgagcatggggacggcgctgctccagcgcgggggctgttttcttctgtgcctctcgctgctgctcctgggctgctgggcggagctgggcagcgggctggagtttccgggcgccgagggccaatggacgcgcttccccaagtggaacgcctgctgcgagagcgagatgagcttccagctcaagactcgcagcgcccgcggcctcgtgctctacttcgacgacgagggcttctgcgacttcctggagctgattctgacgcgcggcggccgcctgcagctcagcttctccatcttctgcgctgagcctgcgacgctcctggccgacacgccggttaacgacggcgcctggcacagcgtgcgcatccgccgccagttccgcaacaccacgctcttcatcgaccaggtggaggccaagtgggtggaggtcaagtccaagcgcagggacatgacggtgttcagcggccttttcgtcggggggctgcccccggaactgcgcgccgcggcgctcaagctcaccctggcctcggtgagggagcgggagcccttcaaggggtggattcgtgacgtgagggtcaactcctcgcaggtcctgcccgtggacagcggcgaggtgaagctggacgatgagccgcccaacagcggcgggggaagcccgtgcgaggcgggcgaggagggcgagggcggggtgtgcctcaacggaggtgtgtgctccgtggtggacgaccaggccgtgtgcgactgctcgcgaaccggcttccgcggcaaggactgcagccaagaagacaacaatgtggaaggtctggcgcacctgatgatgggcgaccaaggtaaaagtaaaggaaaagaagaatatattgccacgttcaaaggatctgaatacttctgctacgacttgtctcaaaaccccattcaaagcagcagtgatgaaataactctgtcatttaaaacccttcagaggaatggactgatgcttcacactgggaaatcggctgattatgtcaatcttgccctgaaaaatggagctgtctctctggtcattaatttgggatcaggggcctttgaagcactagtggagcctgtgaatggaaagtttaatgataatgcctggcatgatgtgaaagtcaccaggaatctgcgtcagcactcaggcattggacacgctatggtgacaatatcagtggatgggattcttaccacaacgggctacacgcaagaagattataccatgctggggtctgatgactttttctatgttggaggcagtcccagcacagccgaccttccagggtcaccagtcagtaacaactttatgggctgtctcaaagaggttgtatataaaaataatgatgtgaggctggaattatctcgacttgccaagcaaggagatcctaagatgaagatccatggagtggtggcatttaaatgtgagaatgttgcaactttagacccaatcacctttgaaaccccagagtctttcatctctttgcctaaatggaatgcaaagaaaactggctccatatcatttgatttccgtacaacagagccaaatggcctcatcttatttagccatggcaagccaagacatcagaaagatgccaagcacccacagatgataaaggtggacttctttgctattgagatgctagatggccacctctacctcctcctggacatggggtcaggtactataaaaataaaagccctgttgaagaaagtgaatgatggagaatggtatcatgtggacttccagagagacggacggtcaggtaccatttctgtcaacacgttgcgtactccctacactgctcctggtgagagtgagattctggacctggatgatgagttgtacctgggggggctgccagaaaataaagctggccttgtcttccccaccgaggtgtggactgctctgctcaactatggctacgtgggctgcatcagggatttgttcatcgatggccaaagcaaagatatccggcaaatggctgaagttcaaagtactgctggagtgaagccttcctgctcaaaggaaacagcaaaaccgtgccttagcaacccttgcaaaaacaatggcatgtgcagggatgggtggaacagatatgtctgtgattgttccggaacaggctatcttggcaggtcctgtgagagagaggcaacggttttgagctatgatgggagcatgtttatgaaaattcagctccccgtagtcatgcatacggaggctgaggatgtttccttacggttccgatcccagcgtgcatatggcattctgatggcaaccacttctagagactctgctgacaccctccgcctggagctagacgcaggacgtgtgaaactgacggtcaatctagattgtatcaggattaactgtaattccagcaaaggtcccgagactctttttgctggctataacctcaatgataacgagtggcacacagtgcgtgtagttcggcgtggaaaaagtttaaagttaacagtggatgaccaacaggccatgacaggtcaaatggcaggtgatcatactaggctggagttccataacatagagactggcatcatcacagaacgacggtatctttcttctgtcccctccaacttcattggacacctgcagagcttgacatttaatggaatggcatacattgacctgtgtaaaaatggcgacatagattactgtgagcttaatgccagatttggcttcaggaacatcatagcagatcctgtcaccttcaagaccaaatcgagctatgttgccttagctaccttgcaagcctacacttctatgcatctttttttccagttcaagacaacatccctagatggattaattctatataacagtggggatggaaatgactttattgtggttgaattagttaaagggtacttacattacgtgtttgatttgggaaatggtgctaacctcatcaaaggaagctcaaataaacctctcaatgacaatcagtggcacaacgtgatgatatcaagggacaccagcaacctccacactgtaaagattgacacaaaaatcacaacgcaaatcaccgccggagccaggaacttagacctcaagagtgacttatatataggaggagtagctaaagaaacatacaaatccttaccaaaacttgtacatgccaaagaaggctttcaaggctgcctggcatcagttgatttaaatggacggcttccggacctcatctccgatgctcttttctgcaacggacagatcgagagaggatgtgaagggcccagcacaacctgccaagaggactcatgttccaatcaaggtgtgtgcttgcaacaatgggatggcttcagctgtgactgtagtatgacttccttcagtggaccactctgcaatgaccctgggacgacatatatctttagcaaaggtggtggacaaatcacgtataagtggcctcctaatgaccgacccagtacgcgagcagacagactggccataggttttagcactgttcagaaagaagctgtattggtgcgagtggacagttcttcaggcttgggtgactacctagaactgcatatacaccagggaaaaattggagttaagtttaatgttgggacagatgacatcgccattgaagaatccaatgcaatcattaatgatgggaaataccatgtagttcgtttcacgaggagtggtggcaatgccacgttgcaggtggacagctggccagtgatcgagcgctaccctgcagggcgtcagctcacaatcttcaatagccaagcaaccataataattggcgggaaagagcagggccagcccttccagggccagctctctgggctgtactacaatggcttgaaagttctgaatatggcagccgaaaacgatgccaacatcgccatagtgggaaatgtgagactggttggtgaagtgccttcctctatgacaactgagtcaacagccactgccatgcaatcagagatgtccacatcaattatggagactaccacgaccctggctactagcacagccagaagaggaaagcccccgacaaaagaacccattagccagaccacagatgacatccttgtggcctcagcagagtgtcccagcgatgatgaggacattgacccctgtgagccgagctcaggtgggttagccaacccaacccgagcaggcggcagagagccgtatccaggctcagcagaagtgatccgggagtccagcagcaccacgggtatggtcgttgggatagtagccgctgccgccctgtgcatccttatcctcctctatgccatgtacaagtacagaaaccgggatgaaggctcataccatgtggacgagagtcgaaactacatcagtaactcagcacagtccaatggggctgttgtaaaggagaaacaacccagcagtgcgaaaagctccaacaaaaataagaaaaacaaggataaagagtattatgtctgatcccaagatcttaaatggacacttgtatagaaatagtcttcattttatctgagacataatataaacttatttactttcctttttatgaagcacatacaaaagaagacagagaatgcaatcaggaaggaaagactttttaaaaaataaaaacaagtatctcatgctcttgtttctcaaaaaagaaaaacaaaaaacaaaaaacaggggccaataaattccctaacatccacagtgttttcatttactctgcttgtctttatgttgctggaacatttctaaaagacagtgatgaccgcacgcattcataaagcaaaggagtactacagcatcaaggcacaacacaaaaaccaacacaaaacataacacaaaaaagaagctacctatgatcctggatttagccaaagtgctagcgctttcctgagaagtcagtccaattgccagagaagactgtccttttgagtgactcaacctgcaaacctttaagagtttgccgcctggtgcaactggagcagtggttggaacttgcatttgaaacaaagtgctggcttttttgaagacttgtgtaggaacacattcaaaaagcccctttctggttgtgagagaggaaaaaaaagtatggaggccttattttcaaaaatgtgaaatataaggcacgttttcacacaaaatttcaaaacaaaaacaagagggcatagatgcaatcattgggaaattttcatgcacgcttattatgttattacatatgtttatataaaatccatctctgtgtgctttctggactgtgataagtgacgttttatagcctgttgtatagaaaatgcaaaatatatctctgctcttcagccatttttggtaaattcaatgttataagtgttgctaagtatagggagttttatgacatcagagcaacaattatttcagttgggtttttctttttttttgccaccattataaattgccacaattacttttattttttaaagaaattacagtgtagtgtttattctaaggaagatatgtatgaatgtatatacaaagactcagctacttcttttcttatatgtacagccttcattctgttgcaattaagttttagtacttgtatgaaaggtgtgaattagaaagtcacatatatacatatgtatcttataatcttttctccctgaaatactcacattcccacatacattcactattttcacacacacacacacacacacacacacacgaatccacagcaatccatcagatatgctggaagatccaaacgtgcatacagtagcaaatatttattgacaaattgaaaagcaggaaggaagagggttgtgccaaggtattgatgacaaatggggtgatttgcttcattgagatcttgctcccaggtaaccttaagaagattttagtccctaaagaaatgaacctttccttatcaaatagaatatcactgatatactgctgcatgaataagaaccattatgtgggcaggttatggaagcaaaattggttaatctacaccttaactctggctgctgcaattgaaaactttctttctaataaaataatatatatatctctg

SEQ ID NO: 13418 - DNA, 1766 bp, Homo sapiens
cggtcaggtccagcacttgggagctgactgtgctggaggtgacaggctttgcggggtccgcctgtgtgcaggagtcgcaaggtcgctgagcaggacccaaaggtggcccgaggcagccgggatgacagctctccccaggaatcctgctgcctgctgagaaacatggtcagcaagtcccgctggaagctcctggccatgttggctctggtcctggtcgtcatggtgtggtattccatctcccgggaagacagtttttattttcccatcccagagaagaaggagccgtgcctccagggtgaggcagagagcaaggcctctaagctctttggcaactactcccgggatcagcccatcttcctgcggcttgaggattatttctgggtcaagacgccatctgcttacgagctgccctatgggaccaaggggagtgaggatctgctcctccgggtgctagccatcaccagctcctccatccccaagaacatccagagcctcaggtgccgccgctgtgtggtcgtggggaacgggcaccggctgcggaacagctcactgggagatgccatcaacaagtacgatgtggtcatcagattgaacaatgccccagtggctggctatgagggtgacgtgggctccaagaccaccatgcgtctcttctaccctgaatctgcccacttcgaccccaaagtagaaaacaacccagacacactcctcgtcctggtagctttcaaggcaatggacttccactggattgagaccatcctgagtgataagaagcgggtgcgaaagggtttctggaaacagcctcccctcatctgggatgtcaatcctaaacagattcggattctcaaccccttcttcatggagattgcagctgacaaactgctgagcctgccaatgcaacagccacggaagattaagcagaagcccaccacgggcctgttggccatcacgctggccctccacctctgtgacttggtgcacattgccggctttggctacccagacgcctacaacaagaagcagaccattcactactatgagcagatcacgctcaagtccatggcggggtcaggccataatgtctcccaagaggccctggccattaagcggatgctggagatgggagctatcaagaacctcacgtccttctgacctgggcaagagctgtagcctgtcggttgcctactctgctgtctgggtgacccccatgcgtggctgtgggggtggctggtgccagtatgacccacttggactcaccccctcttggggagggagttctgggcctggccaggtctgagatgaggccatgcccctggctgctcttatggagccgagatccagtcagggtgggggcgctggagccgtgggagcccggccagggcagggggctcgtcgctgtggcaccccctctctgccagcaccaagagattatttaatgggctatttaattaaggggtaggaaggtgctgtgggctggtcccacacatccaggaaagaggccagtagagaattctgcccactttttataaaaacttacagcgatggccccaccaaggcctagacacggcactggcctcccaggagggcaggggcattgggaatgggtgggtgccctccagagaggggctgctacctcccagcaggcatgggaagagcactggtgtgggggttccaccgagaaggggacctcatctagaaaagaggttacaaacctaccattaaactatttttcctaaaacggaaaaaaaaaaaaaaaaaaaaaaaaa

SEQ ID NO: 13419 - DNA, 7041 bp, Homo sapiens
ggtggtttgcagatcactgaggctggacaacgttcatggctctcgggtagaacctagtgaaacggccagaatgaattctatggacaggcacatccagcagaccaatgaccgactgcagtgcatcaagcagcacttacagaatcctgccaacttccacaatgccgccacggagctgctggactggtgcggagacccacgggccttccagcggcccttcgagcagagcctgatgggctgtttgacggtggtcagtcgggtggcagcccagcaaggctttgacctggacctcggctacagactgctggctgtgtgtgctgcaaaccgagacaagttcaccccgaagtctgccgccttgttgtcctcctggtgcgaagagctcggccgcctgctgctgctccgacatcagaagagccgccagagcgatccccctgggaaactccccatgcagccccctctcagctccatgagctccatgaaacccactctgtcgcacagtgatgggtcgttcccctatgactctgtcccttggcagcagaacaccaaccagcctcccggctccctttccgtggtcaccacggtttggggagtaaccaacacatcccagagccaggtccttgggaaccctatggccaatgccaacaaccccatgaatccaggcggcaaccccatggcgtcgggcatgaccaccagcaacccaggcctcaactccccacagtttgcggggcagcagcagcagttctcagccaaggctggccccgctcagccctacatccagcagagcatgtatggccggcccaactaccccggcagcgggggctttggggccagttaccctgggggtcctaacgcccccgcaggcatgggcatccctccgcacaccaggccgcctgctgacttcactcagcccgcggcagccgctgcagcagcggcagtggcagcagcagcagccacagctacagccacagccacggccactgtggcagccctgcaggagacacagaacaaggatataaaccagtatggaccgatgggtcccacccaggcgtataacagccaattcatgaaccagcccgggccgcgggggcctgcctccatggggggcagcatgaaccccgcgagcatggcggctggcatgacgccctcggggatgagcggccctcccatgggcatgaaccagccccggccgcccggcatcagcccctttggcacacacgggcagcggatgccccagcagacctacccgggcccccggccccagtcccttcctattcagaacataaagaggccataccctggagagcccaactatggaaaccagcaatatggaccaaacagccagttccccacccagccaggccagtacccagcccccaaccccccgaggccactcacctcccccaactacccaggacagaggatgcccagccagccgagctccgggcagtacccgccccccacggtcaacatggggcagtattacaagccagaacagtttaatggacaaaataacacgttctcgggaagcagctacagtaactacagccaagggaatgtcaacaggcctcccaggccggttcctgtggcaaattacccccactcacctgttccagggaaccccacaccccccatgacccctgggagcagcatccctccatacctgtcccccagccaagacgtcaaaccacccttcccgcctgacatcaagccaaatatgagcgctctgccaccacccccagccaaccacaatgacgagctgcggctcacattccctgtgcgggatggcgtggtgctggagcccttccgcctggagcacaacctggcggtcagcaaccatgtgttccacctgcggcccacggtccaccagacgctgatgtggaggtctgacctggagctgcagttcaagtgctaccaccacgaggaccggcagatgaacaccaactggcccgcctcggtgcaggtcagcgtgaacgccacgcccctcaccattgagcgcggcgacaacaagacctcccacaagcccctgcacctgaagcacgtgtgccagccgggccgcaacaccatccagatcaccgtcacggcctgctgctgctcccacctcttcgtgctgcagctggtacaccggccctccgtccgctctgtgctgcaaggactcctcaagaagcgcctcctgcccgcagagcactgtatcacgaaaatcaagcggaatttcagcagcgtggctgcctcctcgggcaacacgaccctcaacggggaggatggggtggagcagacggccatcaaggtgtctctgaagtgccccatcacattccggcgcatccagctgcctgctcgaggacacgattgcaagcatgtgcagtgctttgatctggagtcatacctgcagctgaattgcgagagagggacctggaggtgtcctgtgtgcaataaaaccgctctgctggagggcctggaggtggatcagtacatgtggggaatcctgaatgccatccaacactccgagtttgaagaggtcaccatcgatcccacgtgcagctggcggccggtgcccatcaagtcggacttacacatcaaggacgaccctgatggcatcccctccaagcggttcaagaccatgagtcccagccagatgatcatgcccaatgtcatggagatgatcgcagccctgggccccggcccgtccccctatcccctcccgcctcccccagggggcaccaactccaacgactacagcagccaaggcaacaactaccaaggccatggcaactttgacttcccccacgggaaccctggagggacatccatgaatgacttcatgcacgggcccccccagctctcccaccccccggacatgcccaacaacatggccgccctcgagaaacccctcagccaccccatgcaggaaactatgccacacgctggcagctctgaccagccccacccctccatacaacaaggtttgcacgtaccacaccccagcagccagtcagggcctccattacatcacagtggggctcctcctcctcctccttcccagcctccccggcagccgccacaggccgctcccagcagccatccacacagcgacctgacctttaacccctcctcagccttagagggtcaggccggagcgcagggagcgtccgacatgccggagccttcgctggatctccttcccgaactcacaaatcctgacgagctcctgtcttatctggacccccccgacctgccgagcaatagtaacgatgacctcctgtctctatttgagaacaactgagggccacccggtcggggccatccctccacactctgcatcctaccccacctacccaacacacttttccacctgggagcctgtgccctcagaccgccccgcaccagagccacgggctgtggggcggggagccctcccccgctgcagccctctcagaacagaggggtagggagggtgcaccagtgcaccaggaaggctgtgtgggtctggagcccacgtcccacctccacacccttggcttgggcccatgcccagcgcaggcctgaagaccaccctcccgagaggaaccagcccggtaagagggcacacgctgatgcggcttcccggtccctccgcgtgtgccgattccagatgaccttccagtgtccccaaggttcttccatcttctagactgtaaccctgcctccctgcttcctggtccagagcctccctccagtgactgtggagcctgagaaggcccccgggccccagcatgggccccgagccttggaggagcactggcagttggtggcagtgagaccagcccacccaccaccacccaccacagaaaagcacaaacctctgggaaagacaacgtctctcgggggccaggggtcatcggtttgacccctgacctataagccaagataccccataaacacactcagaaagcagagaaaaaggacaagagtctgtgtttgagagggggtctgccattcctgcttggggactggtggggaagagggccaggacatcttctgagccaggacgtccctgaggctccacctccaagctcagacagggcccaggcttggggaacagagagagcaggtgtacacccaaccaaagtgattgtgcccttggttggggggcgcgggcatataacctgtcagaagcaaacaggagcggcaacttctaactttgctccaagccactctctttttaaacagcaacaatttaaagctatgaagtcacctggagaaaaggaacgttgctcttggacagcaagcaaaccatttctctccgtctgttctgtttttctcctagtccctctcctgccacctctccaagacttccgtgggacacccacttccctctgtcctagttctctttgtccaatcagatggcaagggcagtgcgtggaaaggccggggaggtgcagaaaccagagcccagggcaatggtgtctgtccagcccctccctctgtccctgtgctccaagctgcccccggctgcagcccaggccatggacatgtgcaccagtatgtacctgcaggcatgggggggaggggggcgtgtttctgggcctgccccagacactgcccttggctgccagcctaccctgcctgcactcctccaccatcacaatctcacccaaactcctgctcactcaagcaaaagcagcctctggccttccctccaccgctttgctccatctggcttaccactctccagggcctcctggggagcctgtcctgtgttcactttgtttcaggctggtctgtgccccgtgagccacatggcctagggtgatgccaggttgtcccgtcactggggtcccatctgtaaattctttgcgcccttcccggctgctgcctggggccctttcctgctctcccgtccgctgtgggtggtccccagctctcctctgtgggttttaccggaaaggtggccccagctgttgacttccagtcactgtcccagacggcacaaggttttctgtaggaaagctgccattgccccggccccttttcttcctttgtcccgttgtcgaggttttttcaaatagcgtgttgttcagtatgcaaatcaattattttaagaatcgcttttgtaaatatctttgtgaatattttagtatcgtctttgataatattcaacattttcatgacctggttatagcctttgctggtgtttttaaaatacctggactcaatgacaaagaccgagtcttctttttttttaaacaaaaacaaaaaaagcaaccagggctatttgtacagttgaaggggtgaacagaatgggcggctgtgctgggagttggaagaccgggcagcccgctatttagagccatccctcagtcagctggcagggacaagccaacgccaggtagcatgtggccacccttgcccagtgtctgtggcctggcaagtggccacgccctgtgtcagaccatctgggaattaagctccagacagacttacagatgccttccttaggagttcttgcttcttgcgttgatactttgccccagaaaggcctgggattcattctggttcttatcagggtgtgtccacactctgctcacaggtggatccacggctttccagtgcggagagtcgagatgctccctgcagcccaggccccgggcacctcctgcaaccatctctgggctcagcacctgaggcgggtttcctgggtcccctctccagcaagcctccaccagcaagctcggcccagagcttcccttccggctggctctgaaccgtgcgtggtgcctacagcctgcagtctggagacaagctcttccggagtgctctgggagccaggccagggtgtgagggaggtgcagaggcatccggggcgggagcaagccccaggttgtgacaggtgcaggtagacaacgcccataaacagagatggtcctgaactctggagagatccttccctgatcctttcggacgactacttggagccataagtaacctcagcaaaaacgaggcctctgcaagccacttttccatgccaagcatccacccggcccacaggcatgtttctgccgccactccgcaagatggacagggagccagcaggcaggcgggaagggccaagtacaggcaatcacccccatcttcttggtttgaagctttatccatgtatcatgttccgtgtagccattttattttttaagaaactgctaatactttctccctaatggaagccctgatcccccagagagctacaggtctgctcccgacgggcctcgggcctgacccgtccacacagggccgtgtcaacagcagcgactcaagggacgtgtgtacatatgtaaatgagaaatagagacgtgtcaacagatgcattcatttctcttggaatgtgtattgtttttattttgcgaaacaaaacaaaacaaaaaaaaaagcttggaactccatcacgtggaaaaactagatcctgttggttatagcatttgtgagttctccacgtctgtctctctcgctcatgtaatatactctgaccctgagtggaaaggggtttttgttctgtttttattttacctacatgtactatttagcttcagtgtactagtcctgccacctgtgtatttttagggtgctatggaaataatgaaaagaaacggggatttcagaagaaaattgtaaccaaattcatactttgtataatttttgatatcatgatcacaggtgattcacacgtacacacataaacacacccaccagtgcagcctgaagtaactcccacagaaaccatcatcgtctttgtacatcgtatgtacaatgcaatcatttcatactttaaactggtcaaaaaactaattgtgatttctagtcttgcaaagctgtatgtagttagatgatgtgacaacctctaatatttatctaataaatatgtattcagatgaaacctgtatattaggtgttcatgtggttattttgtatttaaagatcaaattatttgactattgctagacatttctatactctgttgtaacactgaggtatctcatttgcccatgttaatttttttctaaataaattgacaaaaac

SEQ ID NO: 13420 - DNA, 3158 bp, Homo sapiens
cctcgctcccggaccccacggctgcaaactgatctggcgcgcggggaggaggagagcgcaggcgagcgaacccgcgagagagggagagagcgagcgagcaacagcgagagcgagagcgagagagccgggaggcagagggagtagtgaccgccttccggagccgggattcatgcctgtcctcgggaccagcgaaggggactttacggctgagtatgagccaggctgctaggagccaggtacccccacgcctgcagtccccgcgccgtgcccggaatgcgagctggacgcagggctctcccaagttcccaccgagccgaataaaaagcgtccgcccgcagctctccgccaaagacggacattgactccaggactccacagaatggagcaagaatgagaggaaaaaggccggcagaaaagcatgaactggaggtttgttgagctcctctacttcctgtttatatggggccgtatctcagtgcagccctcccaccaggaaccagctgggacagaccaacatgtctccaaggaatttgattggctcatttcagacagggggcctttccaccactccaggagctacctatcctttgtggaaagacaccgtcaaggatttacaaccagatataaaatatacagggagtttgcccgttggaaggtgaggaacacagccatcgagaggagagatctggtccgccatccagtgcccctcatgccggagtttcaaaggagcatccgcctgcttggcaggagacctaccactcagcagttcatcgataccatcatcaaaaagtacggcacccacctgctcatctcagccacattgggaggggaggaggctttgaccatgtatatggacaaaagtcgcctcgacaggaagtcagggaatgccactcaaagtgttgaagctctgcaccagctcgcatcatcctactttgttgaccgtgatggtaccatgaggaggcttcatgagatccagatatcaactggagcaatcaaggtcacagagacacgcactgggcctctgggctgtaacagttatgacaatctggactctgtgagttccgtccttctgcaaagcacggagagcaaactgcaccttcaaggtcttcagataatctttcctcagtatctgcaagagaagtttgtccagtcggccttgagctatatcatgtgcaatggggagggggagtacctgtgccagaacagccagtgtcgctgccaatgtgccgaggagtttccgcagtgcaactgccccatcacggacatccagatcatggagtacacgctggccaacatggccaagtcttgggccgaagcttataaggacctggagaattcagatgagtttaaatcatttatgaagcgcctccccagcaaccacttcctgaccatcggaagcatccatcagcactggggcaatgactgggacctgcagaaccgctacaagctcctgcagagtgccacggaggcacagagacaaaagatccaacgcactgcccgcaagcttttcggcctcagtgtacgctgtcgccacaatcccaaccaccagctgcctagagagaggacaattcagcagtggcttgcaagggtccagtcactcctctactgtaatgagaatgggttttggggaaccttcctggagagccagcggagctgcgtgtgccacggcagcaccacgctgtgccagcgccccatcccctgcgtgataggcgggaacaacagctgcaccatgtgcagcctggccaacatctccctctgtggctcctgcaacaagggctacaagctgtatcgaggccgctgtgaaccacagaacgtggactcggagcggagcgagcagttcatcagctttgagactgacctggacttccaggacctggagctgaagtacctgctgcagaagatggactcacgcctctacgtccacaccaccttcatcagcaacgagatccgcctcgacaccttctttgaccctcggtggcgcaagcgcatgtccctcactctcaagagcaacaagaaccgcatggacttcatccacatggtgatcggcatgtccatgcgcatctgccagatgcgcaacagcagcctggaccccatgttctttgtctatgtcaacccctttagcgggagccattcggagggctggaacatgcccttcggggaatttggctacccacgctgggagaagatccgtctccaaaacagccagtgctacaactggactcttttgctgggcaatcggtggaaaacatttttcgagacggtccacatctacctacgtagtcggactcggctacctaccctactgcgaaatgagactggccagggccccgtggacctgtcggatccctccaagaggcagttctacatcaagatctcagacgtgcaggtgtttgggtatagcctgaggttcaacgccgacctcctgcgcagtgcagtgcagcaggtcaaccagtcctacacacagggcggccagttctattcctcttcgtcagtgatgctcctcttgttggatattcgggaccgaattaatcgcctggcccctcctgtggccccggggaaaccccagctggacttgttctcctgtatgctgaaacaccgcctgaaactgaccaacagcgagatcatcagggtgaaccacgccttggacctgtacaacacggagatcctcaaacagtcggaccagatgacagccaaactctgctaacccgggactccttgccatggacttttcctgttgttgtacacacacaacagaacaaaatgaagcaaaacaaaacaaaaaaacccacaaaaatttgtaaaatgtaattaatattcaaagaaaaggaggaaaatcttcatttgttggaaatgaaaacgttctagcaactgtataaaagcgttgggcatgtttgttatttctatactcactctgtcatgaagaagggtctcagccttttgtggagcattgagggagttgcttcttaggcctcaggtgctgtattgggggagaagggagaaagcatatgcaatgaattgtaaagatctctgctgtgcaggtgctaagattaaacactaaaaagaaagagagatatatgtaatgtacaactgacactgccatttttcctttttggaggaaatggacatagataaagaagatatttcttcggttaagattt

SEQ ID NO: 13421 - DNA, 1576 bp, Homo sapiens
gcgaggcagccagcgagggagagagcgagcgggcgagccggagcgaggaagggaaagcgcaagagagagcgcacacgcacacacccgccgcgcgcactcgcgcacggacccgcacggggacagctcggaagtcatcagttccatgggcgagatgctgctgctggcgagatgtctgctgctagtcctcgtctcctcgctgctggtatgctcgggactggcgtgcggaccgggcagggggttcgggaagaggaggcaccccaaaaagctgacccctttagcctacaagcagtttatccccaatgtggccgagaagaccctaggcgccagcggaaggtatgaagggaagatctccagaaactccgagcgatttaaggaactcacccccaattacaaccccgacatcatatttaaggatgaagaaaacaccggagcggacaggctgatgactcagaggtgtaaggacaagttgaacgctttggccatctcggtgatgaaccagtggccaggagtgaaactgcgggtgaccgagggctgggacgaagatggccaccactcagaggagtctctgcactacgagggccgcgcagtggacatcaccacgtctgaccgcgaccgcagcaagtacggcatgctggcccgcctggcggtggaggccggcttcgactgggtgtactacgagtccaaggcacatatccactgctcggtgaaagcagagaactcggtggcggccaaatcgggaggctgcttcccgggctcggccacggtgcacctggagcagggcggcaccaagctggtgaaggacctgagccccggggaccgcgtgctggcggcggacgaccagggccggctgctctacagcgacttcctcactttcctggaccgcgacgacggcgccaagaaggtcttctacgtgatcgagacgcgggagccgcgcgagcgcctgctgctcaccgccgcgcacctgctctttgtggcgccgcacaacgactcggccaccggggagcccgaggcgtcctcgggctcggggccgccttccgggggcgcactggggcctcgggcgctgttcgccagccgcgtgcgcccgggccagcgcgtgtacgtggtggccgagcgtgacggggaccgccggctcctgcccgccgctgtgcacagcgtgaccctaagcgaggaggccgcgggcgcctacgcgccgctcacggcccagggcaccattctcatcaaccgggtgctggcctcgtgctacgcggtcatcgaggagcacagctgggcgcaccgggccttcgcgcccttccgcctggcgcacgcgctcctggctgcactggcgcccgcgcgcacggaccgcggcggggacagcggcggcggggaccgcgggggcggcggcggcagagtagccctaaccgctccaggtgctgccgacgctccgggtgcgggggccaccgcgggcatccactggtactcgcagctgctctaccaaataggcacctggctcctggacagcgaggccctgcacccgctgggcatggcggtcaagtccagctgaagccggggggccgggggaggggcgcgggagggggcg

SEQ ID NO: 13422 - DNA, 3843 bp, Homo sapiens
gagcgagagtgtgtcgagtgagtgtgcgtctgtgtgtcccggcgagggtgcgcgctcggcgccgggagcgcggccagccgagtccggaggcatcgggaggtcgagagccgccgggaccccagctctgcgttcactgccccgtccggagctggacttcggggccggggccggggccgtgcgccggggacaggcagggccgggtcgcgggccgcgcgtcccccaggccggagatctgcgagtgaagagggacgagggaaaagaaacaaagccacagacgcaacttgagactcccgcatcccaaaagaagcaccagatcagcaaaaaaagaagatgggccccccgagcctcgtgctgtgcttgctgtccgcaactgtgttctccctgctgggtggaagctcggccttcctgtcgcaccaccgcctgaaaggcaggtttcagagggaccgcaggaacatccgccccaacatcatcctggtgctgacggacgaccaggatgtggagctgggttccatgcaggtgatgaacaagacccggcgcatcatggagcagggcggggcgcacttcatcaacgccttcgtgaccacacccatgtgctgcccctcacgctcctccatcctcactggcaagtacgtccacaaccacaacacctacaccaacaatgagaactgctcctcgccctcctggcaggcacagcacgagagccgcacctttgccgtgtacctcaatagcactggctaccggacagctttcttcgggaagtatcttaatgaatacaacggctcctacgtgccacccggctggaaggagtgggtcggactccttaaaaactcccgcttttataactacacgctgtgtcggaacggggtgaaagagaagcacggctccgactactccaaggattacctcacagacctcatcaccaatgacagcgtgagcttcttccgcacgtccaagaagatgtacccgcacaggccagtcctcatggtcatcagccatgcagccccccacggccctgaggattcagccccacaatattcacgcctcttcccaaacgcatctcagcacatcacgccgagctacaactacgcgcccaacccggacaaacactggatcatgcgctacacggggcccatgaagcccatccacatggaattcaccaacatgctccagcggaagcgcttgcagaccctcatgtcggtggacgactccatggagacgatttacaacatgctggttgagacgggcgagctggacaacacgtacatcgtatacaccgccgaccacggttaccacatcggccagtttggcctggtgaaagggaaatccatgccatatgagtttgacatcagggtcccgttctacgtgaggggccccaacgtggaagccggctgtctgaatccccacatcgtcctcaacattgacctggcccccaccatcctggacattgcaggcctggacatacctgcggatatggacgggaaatccatcctcaagctgctggacacggagcggccggtgaatcggtttcacttgaaaaagaagatgagggtctggcgggactccttcttggtggagagaggcaagctgctacacaagagagacaatgacaaggtggacgcccaggaggagaactttctgcccaagtaccagcgtgtgaaggacctgtgtcagcgtgctgagtaccagacggcgtgtgagcagctgggacagaagtggcagtgtgtggaggacgccacggggaagctgaagctgcataagtgcaagggccccatgcggctgggcggcagcagagccctctccaacctcgtgcccaagtactacgggcagggcagcgaggcctgcacctgtgacagcggggactacaagctcagcctggccggacgccggaaaaaactcttcaagaagaagtacaaggccagctatgtccgcagtcgctccatccgctcagtggccatcgaggtggacggcagggtgtaccacgtaggcctgggtgatgccgcccagccccgaaacctcaccaagcggcactggccaggggcccctgaggaccaagatgacaaggatggtggggacttcagtggcactggaggccttcccgactactcagccgccaaccccattaaagtgacacatcggtgctacatcctagagaacgacacagtccagtgtgacctggacctgtacaagtccctgcaggcctggaaagaccacaagctgcacatcgaccacgagattgaaaccctgcagaacaaaattaagaacctgagggaagtccgaggtcacctgaagaaaaagcggccagaagaatgtgactgtcacaaaatcagctaccacacccagcacaaaggccgcctcaagcacagaggctccagtctgcatcctttcaggaagggcctgcaagagaaggacaaggtgtggctgttgcgggagcagaagcgcaagaagaaactccgcaagctgctcaagcgcctgcagaacaacgacacgtgcagcatgccaggcctcacgtgcttcacccacgacaaccagcactggcagacggcgcctttctggacactggggcctttctgtgcctgcaccagcgccaacaataacacgtactggtgcatgaggaccatcaatgagactcacaatttcctcttctgtgaatttgcaactggcttcctagagtactttgatctcaacacagacccctaccagctgatgaatgcagtgaacacactggacagggatgtcctcaaccagctacacgtacagctcatggagctgaggagctgcaagggttacaagcagtgtaacccccggactcgaaacatggacctgggacttaaagatggaggaagctatgagcaatacaggggacaactgtgggaaggctgggaaggttaagaaacaacagaggtggacctccaaaaacatagaggcatcacctgactgcacaggcaatgaaaaaccatgtgggtgatttccagcagacctgtggtattggccaggaggcctgagaaagcaagcacgcactctcagtcaacatgacagattctggaggataaccagcaggagcagagataacttcaggaagtccatttttgcccctgcttttgctttggattatacctcaccagctgcacaaaatgcattttttcgtatcaaaaagtcaccactaaccctcccccagaagctcacaaaggaaaacggagagagcgagcgagagagatttccttggaaatttctcccaagggcgaaagtcattggaatttttaaatcataggggaaaagcagtcctgttctaaatcctcttattcttttggtttgtcacaaagaaggaactaagaagcaggacagaggcaacgtggagaggctgaaaacagtgcagagacgtttgacaatgagtcagtagcacaaaagagatgacatttacctagcactataaaccctggttgcctctgaagaaactgccttcattgtatatatgtgactatttacatgtaatcaacatgggaacttttaggggaacctaataagaaatcccaattttcaggagtggtggtgtcaataaacgctctgtggccagtgtaaaagaaaatccctcgcagttgtggacatttctgttcctgtccagataccatttctcctagtatttctttgttatgtcccagaactgatgttttttttttaaggtactgaaaagaaatgaagttgatgtatgtcccaagttttgatgaaactgtatttgtaaaaaaaattttgtagtttaagtattgtcatacagtgttcaaaaccccagccaatgaccagcagttggtatgaagaacctttgacattttgtaaaaggccatttcttgg

SEQ ID NO: 13423 - DNA, 3897 bp, Homo sapiens
gagcgagagtgtgtcgagtgagtgtgcgtctgtgtgtcccggcgagggtgcgcgctcggcgccgggagcgcggccagccgagtccggaggcatcgggaggtcgagagccgccgggaccccagctctgcgttcactgccccgtccggagctggacttcggggccggggccggggccgtgcgccggggacaggcagggccgggtcgcgggccgcgcgtcccccaggccggagatctgcgagtgaagagggacgagggaaaagaaacaaagccacagacgcaacttgagactcccgcatcccaaaagaagcaccagatcagcaaaaaaagaagatgggccccccgagcctcgtgctgtgcttgctgtccgcaactgtgttctccctgctgggtggaagctcggccttcctgtcgcaccaccgcctgaaaggcaggtttcagagggaccgcaggaacatccgccccaacatcatcctggtgctgacggacgaccaggatgtggagctgggttccatgcaggtgatgaacaagacccggcgcatcatggagcagggcggggcgcacttcatcaacgccttcgtgaccacacccatgtgctgcccctcacgctcctccatcctcactggcaagtacgtccacaaccacaacacctacaccaacaatgagaactgctcctcgccctcctggcaggcacagcacgagagccgcacctttgccgtgtacctcaatagcactggctaccggacagctttcttcgggaagtatcttaatgaatacaacggctcctacgtgccacccggctggaaggagtgggtcggactccttaaaaactcccgcttttataactacacgctgtgtcggaacggggtgaaagagaagcacggctccgactactccaaggattacctcacagacctcatcaccaatgacagcgtgagcttcttccgcacgtccaagaagatgtacccgcacaggccagtcctcatggtcatcagccatgcagccccccacggccctgaggattcagccccacaatattcacgcctcttcccaaacgcatctcagcacatcacgccgagctacaactacgcgcccaacccggacaaacactggatcatgcgctacacggggcccatgaagcccatccacatggaattcaccaacatgctccagcggaagcgcttgcagaccctcatgtcggtggacgactccatggagacgatttacaacatgctggttgagacgggcgagctggacaacacgtacatcgtatacaccgccgaccacggttaccacatcggccagtttggcctggtgaaagggaaatccatgccatatgagtttgacatcagggtcccgttctacgtgaggggccccaacgtggaagccggctgtctgaatccccacatcgtcctcaacattgacctggcccccaccatcctggacattgcaggcctggacatacctgcggatatggacgggaaatccatcctcaagctgctggacacggagcggccggtgaatcggtttcacttgaaaaagaagatgagggtctggcgggactccttcttggtggagagaggcaagctgctacacaagagagacaatgacaaggtggacgcccaggaggagaactttctgcccaagtaccagcgtgtgaaggacctgtgtcagcgtgctgagtaccagacggcgtgtgagcagctgggacagaagtggcagtgtgtggaggacgccacggggaagctgaagctgcataagtgcaagggccccatgcggctgggcggcagcagagccctctccaacctcgtgcccaagtactacgggcagggcagcgaggcctgcacctgtgacagcggggactacaagctcagcctggccggacgccggaaaaaactcttcaagaagaagtacaaggccagctatgtccgcagtcgctccatccgctcagtggccatcgaggtggacggcagggtgtaccacgtaggcctgggtgatgccgcccagccccgaaacctcaccaagcggcactggccaggggcccctgaggaccaagatgacaaggatggtggggacttcagtggcactggaggccttcccgactactcagccgccaaccccattaaagtgacacatcggtgctacatcctagagaacgacacagtccagtgtgacctggacctgtacaagtccctgcaggcctggaaagaccacaagctgcacatcgaccacgagattgaaaccctgcagaacaaaattaagaacctgagggaagtccgaggtcacctgaagaaaaagcggccagaagaatgtgactgtcacaaaatcagctaccacacccagcacaaaggccgcctcaagcacagaggctccagtctgcatcctttcaggaagggcctgcaagagaaggacaaggtgtggctgttgcgggagcagaagcgcaagaagaaactccgcaagctgctcaagcgcctgcagaacaacgacacgtgcagcatgccaggcctcacgtgcttcacccacgacaaccagcactggcagacggcgcctttctggacactggggcctttctgtgcctgcaccagcgccaacaataacacgtactggtgcatgaggaccatcaatgagactcacaatttcctcttctgtgaatttgcaactggcttcctagagtactttgatctcaacacagacccctaccagctgatgaatgcagtgaacacactggacagggatgtcctcaaccagctacacgtacagctcatggagctgaggagctgcaagggttacaagcagtgtaacccccggactcgaaacatggacctgggacttaaagatggaggaagctatgagcaatacaggcagtttcagcgtcgaaagtggccagaaatgaagagaccttcttccaaatcactgggacaactgtgggaaggctgggaaggttaagaaacaacagaggtggacctccaaaaacatagaggcatcacctgactgcacaggcaatgaaaaaccatgtgggtgatttccagcagacctgtggtattggccaggaggcctgagaaagcaagcacgcactctcagtcaacatgacagattctggaggataaccagcaggagcagagataacttcaggaagtccatttttgcccctgcttttgctttggattatacctcaccagctgcacaaaatgcattttttcgtatcaaaaagtcaccactaaccctcccccagaagctcacaaaggaaaacggagagagcgagcgagagagatttccttggaaatttctcccaagggcgaaagtcattggaatttttaaatcataggggaaaagcagtcctgttctaaatcctcttattcttttggtttgtcacaaagaaggaactaagaagcaggacagaggcaacgtggagaggctgaaaacagtgcagagacgtttgacaatgagtcagtagcacaaaagagatgacatttacctagcactataaaccctggttgcctctgaagaaactgccttcattgtatatatgtgactatttacatgtaatcaacatgggaacttttaggggaacctaataagaaatcccaattttcaggagtggtggtgtcaataaacgctctgtggccagtgtaaaagaaaatccctcgcagttgtggacatttctgttcctgtccagataccatttctcctagtatttctttgttatgtcccagaactgatgttttttttttaaggtactgaaaagaaatgaagttgatgtatgtcccaagttttgatgaaactgtatttgtaaaaaaaattttgtagtttaagtattgtcatacagtgttcaaaaccccagccaatgaccagcagttggtatgaagaacctttgacattttgtaaaaggccatttcttgg

SEQ ID NO: 13424 - DNA, 3552 bp, Homo sapiens
atgcccggcgtggcccgcctgccgctgctgctcgggctgctgctgctcccgcgtcccggccggccgctggacttggccgactacacctatgacctggcggaggaggacgactcggagcccctcaactacaaagacccctgcaaggcggctgcctttcttggggacattgccctggacgaagaggacctgagggccttccaggtacagcaggctgtggatctcagacggcacacagctcgtaagtcctccatcaaagctgcagttccaggaaacacttctacccccagctgccagagcaccaacgggcagcctcagaggggagcctgtgggagatggagaggtagatcccgtagccggcgggcggcgacgtcccgaccagagcgtgtgtggcccgatggggtcatcccctttgtcattgggggaaacttcactggtagccagagggcagtcttccggcaggccatgaggcactgggagaagcacacctgtgtcaccttcctggagcgcactgacgaggacagctatattgtgttcacctatcgaccttgcgggtgctgctcctacgtgggtcgccgcggcgggggcccccaggccatctccatcggcaagaactgtgacaagttcggcattgtggtccacgagctgggccacgtcgtcggcttctggcacgaacacactcggccagaccgggaccgccacgtttccatcgttcgtgagaacatccagccagggcaggagtataacttcctgaagatggagcctcaggaggtggagtccctgggggagacctatgacttcgacagcatcatgcattacgctcggaacacattctccaggggcatcttcctggataccattgtccccaagtatgaggtgaacggggtgaaacctcccattggccaaaggacacggctcagcaagggggacattgcccaagcccgcaagctttacaagtgcccagcctgtggagagaccctgcaagacagcacaggcaacttctcctcccctgaataccccaatggctactctgctcacatgcactgcgtgtggcgcatctctgtcacacccggggagaagatcatcctgaacttcacgtccctggacctgtaccgcagccgcctgtgctggtacgactatgtggaggtccgagatggcttctggaggaaggcgcccctccgaggccgcttctgcgggtccaaactccctgagcctatcgtctccactgacagccgcctctgggttgaattccgcagcagcagcaattgggttggaaagggcttctttgcagtctacgaagccatctgcgggggtgatgtgaaaaaggactatggccacattcaatcgcccaactacccagacgattaccggcccagcaaagtctgcatctggcggatccaggtgtctgagggcttccacgtgggcctcacattccagtcctttgagattgagcgccacgacagctgtgcctacgactatctggaggtgcgcgacgggcacagtgagagcagcaccctcatcgggcgctactgtggctatgagaagcctgatgacatcaagagcacgtccagccgcctctggctcaagttcgtctctgacgggtccattaacaaagcgggctttgccgtcaactttttcaaagaggtggacgagtgctctcggcccaaccgcgggggctgtgagcagcggtgcctcaacaccctgggcagctacaagtgcagctgtgaccccgggtacgagctggccccagacaagcgccgctgtgaggctgcttgtggcggattcctcaccaagctcaacggctccatcaccagcccgggctggcccaaggagtacccccccaacaagaactgcatctggcagctggtggcccccacccagtaccgcatctccctgcagtttgacttctttgagacagagggcaatgatgtgtgcaagtacgacttcgtggaggtgcgcagtggactcacagctgactccaagctgcatggcaagttctgtggttctgagaagcccgaggtcatcacctcccagtacaacaacatgcgcgtggagttcaagtccgacaacaccgtgtccaaaaagggcttcaaggcccacttcttctcagacaaggacgagtgctccaaggataacggcggctgccagcaggactgcgtcaacacgttcggcagttatgagtgccaatgccgcagtggcttcgtcctccatgacaacaagcacgactgcaaagaagccggctgtgaccacaaggtgacatccaccagtggtaccatcaccagccccaactggcctgacaagtatcccagcaagaaggagtgcacgtgggccatctccagcacccccgggcaccgggtcaagctgaccttcatggagatggacatcgagtcccagcctgagtgtgcctacgaccacctagaggtgttcgacgggcgagacgccaaggcccccgtcctcggccgcttctgtgggagcaagaagcccgagcccgtcctggccacaggcagccgcatgttcctgcgcttctactcagataactcggtccagcgaaagggcttccaggcctcccacgccacagagtgcgggggccaggtacgggcagacgtgaagaccaaggacctttactcccacgcccagtttggcgacaacaactaccctgggggtgtggactgtgagtgggtcattgtggccgaggaaggctacggcgtggagctcgtgttccagacctttgaggtggaggaggagaccgactgcggctatgactacatggagctcttcgacggctacgacagcacagcccccaggctggggcgctactgtggctcagggcctcctgaggaggtgtactcggcgggagattctgtcctggtgaagttccactcggatgacaccatcaccaaaaaaggtttccacctgcgatacaccagcaccaagttccaggacacactccacagcaggaagtgaccactgcctgagcaggggcggggactggagcctgctgcccttggtcgcctagactggatagtgggggtgggcggaacgcaacgcaccatccctctcccccaggccccaggacctgcagggccaatggcctggtgagactgtccataggaggtgggggaactggactccggcataagccacttccccacaaacccccaccagcaaggggctggggccagggagcagagcttccacaagacatttcgaagtcatcattcctctcttagggggccctgcctggtggcaagagggaatgtcagcaggaccccatcgccatccctgtgtctctacacgctgtattgtgtatcaccgggggcattattttcattgtaatgttcatttcccacccctgctccagcctcgatttggttttattttgagcccccattccaccacagtttcctggggcacaagtgtctgtgcatgtcccccaggagccaccgtggggagccgatggggaggggatggagaaacaagacagggcttctctcagcccatggccggtcagccacaccagggcaccgcagccaataaaccgaaagtgttacagcc

SEQ ID NO: 13425 - DNA, 2487 bp, Homo sapiens
gccgcttccctcgccgccgccccgccagcatgcccggcgtggcccgcctgccgctgctgctcgggctgctgctgctcccgcgtcccggccggccgctggacttggccgactacacctatgacctggcggaggaggacgactcggagcccctcaactacaaagacccctgcaaggcggctgcctttcttggggacattgccctggacgaagaggacctgagggccttccaggtacagcaggctgtggatctcagacggcacacagctcgtaagtcctccatcaaagctgcagttccaggaaacacttctacccccagctgccagagcaccaacgggcagcctcagaggggagcctgtgggagatggagaggtagatcccgtagccggcgggcggcgacgtcccgaccagagcgtgtgtggcccgatggggtcatcccctttgtcattgggggaaacttcactggtagccagagggcagtcttccggcaggccatgaggcactgggagaagcacacctgtgtcaccttcctggagcgcactgacgaggacagctatattgtgttcacctatcgaccttgcgggtgctgctcctacgtgggtcgccgcggcgggggcccccaggccatctccatcggcaagaactgtgacaagttcggcattgtggtccacgagctgggccacgtcgtcggcttctggcacgaacacactcggccagaccgggaccgccacgtttccatcgttcgtgagaacatccagccagggcaggagtataacttcctgaagatggagcctcaggaggtggagtccctgggggagacctatgacttcgacagcatcatgcattacgctcggaacacattctccaggggcatcttcctggataccattgtccccaagtatgaggtgaacggggtgaaacctcccattggccaaaggacacggctcagcaagggggacattgcccaagcccgcaagctttacaagtgcccagcctgtggagagaccctgcaagacagcacaggcaacttctcctcccctgaataccccaatggctactctgctcacatgcactgcgtgtggcgcatctctgtcacacccggggagaagatcatcctgaacttcacgtccctggacctgtaccgcagccgcctgtgctggtacgactatgtggaggtccgagatggcttctggaggaaggcgcccctccgaggccgcttctgcgggtccaaactccctgagcctatcgtctccactgacagccgcctctgggttgaattccgcagcagcagcaattgggttggaaagggcttctttgcagtctacgaagccatctgcgggggtgatgtgaaaaaggactatggccacattcaatcgcccaactacccagacgattaccggcccagcaaagtctgcatctggcggatccaggtgtctgagggcttccacgtgggcctcacattccagtcctttgagattgagcgccacgacagctgtgcctacgactatctggaggtgcgcgacgggcacagtgagagcagcaccctcatcgggcgctactgtggctatgagaagcctgatgacatcaagagcacgtccagccgcctctggctcaagttcgtctctgacgggtccattaacaaagcgggctttgccgtcaactttttcaaagaggtggacgagtgctctcggcccaaccgcgggggctgtgagcagcggtgcctcaacaccctgggcagctacaagtgcagctgtgaccccgggtacgagctggccccagacaagcgccgctgtgaggctgcttgtggcggattcctcaccaagctcaacggctccatcaccagcccgggctggcccaaggagtacccccccaacaagaactgcatctggcagctggtggcccccacccagtaccgcatctccctgcagtttgacttctttgagacagagggcaatgatgtgtgcaagtacgacttcgtggaggtgcgcagtggactcacagctgactccaagctgcatggcaagttctgtggttctgagaagcccgaggtcatcacctcccagtacaacaacatgcgcgtggagttcaagtccgacaacaccgtgtccaaaaagggcttcaaggcccacttcttctcagaaaagaggccagctctgcagccccctcggggacgcccccaccagctcaaattccgagtgcagaaaagaaaccggaccccccagtgaggcctgccaggcctcccggaccccttgttactcaggaacctcaccttggacggaatgggatgggggcttcggtgcccaccaaccccccacctccactctgccattccggcccacctccctctggccggacagaactggtgctctcttctccccactgtgcccgtccgcggaccggggacccttccccgtgccctaccccctcccattttgatggtgtctgtgacatttcctgttgtgaagtaaaagagggacccctgcgtcctgc

SEQ ID NO: 13426 - DNA, 2853 bp, Homo sapiens
gccgcttccctcgccgccgccccgccagcatgcccggcgtggcccgcctgccgctgctgctcgggctgctgctgctcccgcgtcccggccggccgctggacttggccgactacacctatgacctggcggaggaggacgactcggagcccctcaactacaaagacccctgcaaggcggctgcctttcttggggacattgccctggacgaagaggacctgagggccttccaggtacagcaggctgtggatctcagacggcacacagctcgtaagtcctccatcaaagctgcagttccaggaaacacttctacccccagctgccagagcaccaacgggcagcctcagaggggagcctgtgggagatggagaggtagatcccgtagccggcgggcggcgacgtcccgaccagagcgtgtgtggcccgatggggtcatcccctttgtcattgggggaaacttcactggtagccagagggcagtcttccggcaggccatgaggcactgggagaagcacacctgtgtcaccttcctggagcgcactgacgaggacagctatattgtgttcacctatcgaccttgcgggtgctgctcctacgtgggtcgccgcggcgggggcccccaggccatctccatcggcaagaactgtgacaagttcggcattgtggtccacgagctgggccacgtcgtcggcttctggcacgaacacactcggccagaccgggaccgccacgtttccatcgttcgtgagaacatccagccagggcaggagtataacttcctgaagatggagcctcaggaggtggagtccctgggggagacctatgacttcgacagcatcatgcattacgctcggaacacattctccaggggcatcttcctggataccattgtccccaagtatgaggtgaacggggtgaaacctcccattggccaaaggacacggctcagcaagggggacattgcccaagcccgcaagctttacaagtgcccagcctgtggagagaccctgcaagacagcacaggcaacttctcctcccctgaataccccaatggctactctgctcacatgcactgcgtgtggcgcatctctgtcacacccggggagaagatcatcctgaacttcacgtccctggacctgtaccgcagccgcctgtgctggtacgactatgtggaggtccgagatggcttctggaggaaggcgcccctccgaggccgcttctgcgggtccaaactccctgagcctatcgtctccactgacagccgcctctgggttgaattccgcagcagcagcaattgggttggaaagggcttctttgcagtctacgaagccatctgcgggggtgatgtgaaaaaggactatggccacattcaatcgcccaactacccagacgattaccggcccagcaaagtctgcatctggcggatccaggtgtctgagggcttccacgtgggcctcacattccagtcctttgagattgagcgccacgacagctgtgcctacgactatctggaggtgcgcgacgggcacagtgagagcagcaccctcatcgggcgctactgtggctatgagaagcctgatgacatcaagagcacgtccagccgcctctggctcaagttcgtctctgacgggtccattaacaaagcgggctttgccgtcaactttttcaaagaggtggacgagtgctctcggcccaaccgcgggggctgtgagcagcggtgcctcaacaccctgggcagctacaagtgcagctgtgaccccgggtacgagctggccccagacaagcgccgctgtgaggctgcttgtggcggattcctcaccaagctcaacggctccatcaccagcccgggctggcccaaggagtacccccccaacaagaactgcatctggcagctggtggcccccacccagtaccgcatctccctgcagtttgacttctttgagacagagggcaatgatgtgtgcaagtacgacttcgtggaggtgcgcagtggactcacagctgactccaagctgcatggcaagttctgtggttctgagaagcccgaggtcatcacctcccagtacaacaacatgcgcgtggagttcaagtccgacaacaccgtgtccaaaaagggcttcaaggcccacttcttctcagtcttggagggggcaggggaccgacactcacatctatcaggcctggagttactgctctgcccccatgccctggtcgacactgtgcccgccccaccctcagccctgcacggagacacacacgcccacacgcacacacatgtgcacacacattgccccatcgcacaagaaacctgcagaggacccccactgggggcatcgaggctcagccctcagggcccggggcatctgactctggccccccaggaggggagctatttggacttttgggacacccaccgaggagaccctaagccaagaaggagaagaaagagcctgaagaccttcagtctgacccctgccaccttccggggcatttgggcactgtaggaaaagaggccagctctgcagccccctcggggacgcccccaccagctcaaattccgagtgcagaaaagaaaccggaccccccagtgaggcctgccaggcctcccggaccccttgttactcaggaacctcaccttggacggaatgggatgggggcttcggtgcccaccaaccccccacctccactctgccattccggcccacctccctctggccggacagaactggtgctctcttctccccactgtgcccgtccgcggaccggggacccttccccgtgccctaccccctcccattttgatggtgtctgtgacatttcctgttgtgaagtaaaagagggacccctgcgtcctgc

SEQ ID NO: 13427 - DNA, 9645 bp, Homo sapiens
atgcccaagcgcgcgcactggggggccctctccgtggtgctgatcctgctttggggccatccgcgagtggcgctggcctgcccgcatccttgtgcctgctacgtccccagcgaggtccactgcacgttccgatccctggcttccgtgcccgctggcattgctagacacgtggaaagaatcaatttggggtttaatagcatacaggccctgtcagaaacctcatttgcaggactgaccaagttggagctacttatgattcacggcaatgagatcccaagcatccccgatggagctttaagagacctcagctctcttcaggttttcaagttcagctacaacaagctgagagtgatcacaggacagaccctccagggtctctctaacttaatgaggctgcacattgaccacaacaagatcgagtttatccaccctcaagctttcaacggcttaacgtctctgaggctactccatttggaaggaaatctcctccaccagctgcaccccagcaccttctccacgttcacatttttggattatttcagactctccaccataaggcacctctacttagcagagaacatggttagaactcttcctgccagcatgcttcggaacatgccgcttctggagaatctttacttgcagggaaatccgtggacctgcgattgtgagatgagatggtttttggaatgggatgcaaaatccagaggaattctgaagtgtaaaaaggacaaagcttatgaaggcggtcagttgtgtgcaatgtgcttcagtccaaagaagttgtacaaacatgagatacacaagctgaaggacatgacttgtctgaagccttcaatagagtcccctctgagacagaacaggagcaggagtattgaggaggagcaagaacaggaagaggatggtggcagccagctcatcctggagaaattccaactgccccagtggagcatctctttgaatatgaccgacgagcacgggaacatggtgaacttggtctgtgacatcaagaaaccaatggatgtgtacaagattcacttgaaccaaacggatcctccagatattgacataaatgcaacagttgccttggactttgagtgtccaatgacccgagaaaactatgaaaagctatggaaattgatagcatactacagtgaagttcccgtgaagctacacagagagctcatgctcagcaaagaccccagagtcagctaccagtacaggcaggatgctgatgaggaagctctttactacacaggtgtgagagcccagattcttgcagaaccagaatgggtcatgcagccatccatagatatccagctgaaccgacgtcagagtacggccaagaaggtgctactttcctactacacccagtattctcaaacaatatccaccaaagatacaaggcaggctcggggcagaagctgggtaatgattgagcctagtggagctgtgcaaagagatcagactgtcctggaagggggtccatgccagttgagctgcaacgtgaaagcttctgagagtccatctatcttctgggtgcttccagatggctccatcctgaaagcgcccatggatgacccagacagcaagttctccattctcagcagtggctggctgaggatcaagtccatggagccatctgactcaggcttgtaccagtgcattgctcaagtgagggatgaaatggaccgcatggtatatagggtacttgtgcagtctccctccactcagccagccgagaaagacacagtgacaattggcaagaacccaggggagtcggtgacattgccttgcaatgctttagcaatacccgaagcccaccttagctggattcttccaaacagaaggataattaatgatttggctaacacatcacatgtatacatgttgccaaatggaactctttccatcccaaaggtccaagtcagtgatagtggttactacagatgtgtggctgtcaaccagcaaggggcagaccattttacggtgggaatcacagtgaccaagaaagggtctggcttgccatccaaaagaggcagacgcccaggtgcaaaggctctttccagagtcagagaagacatcgtggaggatgaagggggctcgggcatgggagatgaagagaacacttcaaggagacttctgcatccaaaggaccaagaggtgttcctcaaaacaaaggatgatgccatcaatggagacaagaaagccaagaaagggagaagaaagctgaaactctggaagcattcggaaaaagaaccagagaccaatgttgcagaaggtcgcagagtgtttgaatctagacgaaggataaacatggcaaacaaacagattaatccggagcgctgggctgatattttagccaaagtccgtgggaaaaatctccctaagggcacagaagtacccccgttgattaaaaccacaagtcctccatccttgagcctagaagtcacaccaccttttcctgctgtttctcccccctcagcatctcctgtgcagacagtaaccagtgctgaagaatcctcagcagatgtacctctacttggtgaagaagagcacgttttgggtaccatttcctcagccagcatggggctagaacacaaccacaatggagttattcttgttgaacctgaagtaacaagcacacctctggaggaagttgttgatgacctttctgagaagactgaggagataacttccactgaaggagacctgaaggggacagcagcccctacacttatatctgagccttatgaaccatctcctactctgcacacattagacacagtctatgaaaagcccacccatgaagagacggcaacagagggttggtctgcagcagatgttggatcgtcaccagagcccacatccagtgagtatgagcctccattggatgctgtctccttggctgagtctgagcccatgcaatactttgacccagatttggagactaagtcacaaccagatgaggataagatgaaagaagacacctttgcacaccttactccaacccccaccatctgggttaatgactccagtacatcacagttatttgaggattctactataggggaaccaggtgtcccaggccaatcacatctacaaggactgacagacaacatccaccttgtgaaaagtagtctaagcactcaagacaccttactgattaaaaagggtatgaaagagatgtctcagacactacagggaggaaatatgctagagggagaccccacacactccagaagttctgagagtgagggccaagagagcaaatccatcactttgcctgactccacactgggtataatgagcagtatgtctccagttaagaagcctgcggaaaccacagttggtaccctcctagacaaagacaccacaacagtaacaacaacaccaaggcaaaaagttgctccgtcatccaccatgagcactcacccttctcgaaggagacccaacgggagaaggagattacgccccaacaaattccgccaccggcacaagcaaaccccacccacaacttttgccccatcagagactttttctactcaaccaactcaagcacctgacattaagatttcaagtcaagtggagagttctctggttcctacagcttgggtggataacacagttaatacccccaaacagttggaaatggagaagaatgcagaacccacatccaagggaacaccacggagaaaacacgggaagaggccaaacaaacatcgatataccccttctacagtgagctcaagagcgtccggatccaagcccagcccttctccagaaaataaacatagaaacattgttactcccagttcagaaactatacttttgcctagaactgtttctctgaaaactgagggcccttatgattccttagattacatgacaaccaccagaaaaatatattcatcttaccctaaagtccaagagacacttccagtcacatataaacccacatcagatggaaaagaaattaaggatgatgttgccacaaatgttgacaaacataaaagtgacattttagtcactggtgaatcaattactaatgccataccaacttctcgctccttggtctccactatgggagaatttaaggaagaatcctctcctgtaggctttccaggaactccaacctggaatccctcaaggacggcccagcctgggaggctacagacagacatacctgttaccacttctggggaaaatcttacagaccctccccttcttaaagagcttgaggatgtggatttcacttccgagtttttgtcctctttgacagtctccacaccatttcaccaggaagaagctggttcttccacaactctctcaagcataaaagtggaggtggcttcaagtcaggcagaaaccaccacccttgatcaagatcatcttgaaaccactgtggctattctcctttctgaaactagaccacagaatcacacccctactgctgcccggatgaaggagccagcatcctcgtccccatccacaattctcatgtctttgggacaaaccaccaccactaagccagcacttcccagtccaagaatatctcaagcatctagagattccaaggaaaatgttttcttgaattatgtggggaatccagaaacagaagcaaccccagtcaacaatgaaggaacacagcatatgtcagggccaaatgaattatcaacaccctcttccgaccgggatgcatttaacttgtctacaaagctggaattggaaaagcaagtatttggtagtaggagtctaccacgtggcccagatagccaacgccaggatggaagagttcatgcttctcatcaactaaccagagtccctgccaaacccatcctaccaacagcaacagtgaggctacctgaaatgtccacacaaagcgcttccagatactttgtaacttcccagtcacctcgtcactggaccaacaaaccggaaataactacatatccttctggggctttgccagagaacaaacagtttacaactccaagattatcaagtacaacaattcctctcccattgcacatgtccaaacccagcattcctagtaagtttactgaccgaagaactgaccaattcaatggttactccaaagtgtttggaaataacaacatccctgaggcaagaaacccagttggaaagcctcccagtccaagaattcctcattattccaatggaagactccctttctttaccaacaagactctttcttttccacagttgggagtcacccggagaccccagatacccacttctcctgccccagtaatgagagagagaaaagttattccaggttcctacaacaggatacattcccatagcaccttccatctggactttggccctccggcacctccgttgttgcacactccgcagaccacgggatcaccctcaactaacttacagaatatccctatggtctcttccacccagagttctatctcctttataacatcttctgtccagtcctcaggaagcttccaccagagcagctcaaagttctttgcaggaggacctcctgcatccaaattctggtctcttggggaaaagccccaaatcctcaccaagtccccacagactgtgtccgtcaccgctgagacagacactgtgttcccctgtgaggcaacaggaaaaccaaagcctttcgttacttggacaaaggtttccacaggagctcttatgactccgaataccaggatacaacggtttgaggttctcaagaacggtaccttagtgatacggaaggttcaagtacaagatcgaggccagtatatgtgcaccgccagcaacctgcacggcctggacaggatggtggtcttgctttcggtcaccgtgcagcaacctcaaatcctagcctcccactaccaggacgtcactgtctacctgggagacaccattgcaatggagtgtctggccaaagggaccccagccccccaaatttcctggatcttccctgacaggagggtgtggcaaactgtgtcccccgtggagagccgcatcaccctgcacgaaaaccggaccctttccatcaaggaggcgtccttctcagacagaggcgtctataagtgcgtggccagcaatgcagccggggcggacagcctggccatccgcctgcacgtggcggcactgccccccgttatccaccaggagaagctggagaacatctcgctgcccccggggctcagcattcacattcactgcactgccaaggctgcgcccctgcccagcgtgcgctgggtgctcggggacggtacccagatccgcccctcgcagttcctccacgggaacttgtttgttttccccaacgggacgctctacatccgcaacctcgcgcccaaggacagcgggcgctatgagtgcgtggccgccaacctggtaggctccgcgcgcaggacggtgcagctgaacgtgcagcgtgcagcagccaacgcgcgcatcacgggcacctccccgcggaggacggacgtcaggtacggaggaaccctcaagctggactgcagcgcctcgggggacccctggccgcgcatcctctggaggctgccgtccaagaggatgatcgacgcgctcttcagttttgatagcagaatcaaggtgtttgccaatgggaccctggtggtgaaatcagtgacggacaaagatgccggagattacctgtgcgtagctcgaaataaggttggtgatgactacgtggtgctcaaagtggatgtggtgatgaaaccggccaagattgaacacaaggaggagaacgaccacaaagtcttctacgggggtgacctgaaagtggactgtgtggccaccgggcttcccaatcccgagatctcctggagcctcccagacgggagtctggtgaactccttcatgcagtcggatgacagcggtggacgcaccaagcgctatgtcgtcttcaacaatgggacactctactttaacgaagtggggatgagggaggaaggagactacacctgctttgctgaaaatcaggtcgggaaggacgagatgagagtcagagtcaaggtggtgacagcgcccgccaccatccggaacaagacttacttggcggttcaggtgccctatggagacgtggtcactgtagcctgtgaggccaaaggagaacccatgcccaaggtgacttggttgtccccaaccaacaaggtgatccccacctcctctgagaagtatcagatataccaagatggcactctccttattcagaaagcccagcgttctgacagcggcaactacacctgcctggtcaggaacagcgcgggagaggataggaagacggtgtggattcacgtcaacgtccagccacccaagatcaacggtaaccccaaccccatcaccaccgtgcgggagatagcagccgggggcagtcggaaactgattgactgcaaagctgaaggcatccccaccccgagggtgttatgggcttttcccgagggtgtggttctgccagctccatactatggaaaccggatcactgtccatggcaacggttccctggacatcaggagtttgaggaagagcgactccgtccagctggtatgcatggcacgcaacgagggaggggaggcgaggttgatcgtgcagctcactgtcctggagcccatggagaaacccatcttccacgacccgatcagcgagaagatcacggccatggcgggccacaccatcagcctcaactgctctgccgcggggaccccgacacccagcctggtgtgggtccttcccaatggcaccgatctgcagagtggacagcagctgcagcgcttctaccacaaggctgacggcatgctacacattagcggtctctcctcggtggacgctggggcctaccgctgcgtggcccgcaatgccgctggccacacggagaggctggtctccctgaaggtgggactgaagccagaagcaaacaagcagtatcataacctggtcagcatcatcaatggtgagaccctgaagctcccctgcacccctcccggggctgggcagggacgtttctcctggacgctccccaatggcatgcatctggagggcccccaaaccctgggacgcgtttctcttctggacaatggcaccctcacggttcgtgaggcctcggtgtttgacaggggtacctatgtatgcaggatggagacggagtacggcccttcggtcaccagcatccccgtgattgtgatcgcctatcctccccggatcaccagcgagcccaccccggtcatctacacccggcccgggaacaccgtgaaactgaactgcatggctatggggattcccaaagctgacatcacgtgggagttaccggataagtcgcatctgaaggcaggggttcaggctcgtctgtatggaaacagatttcttcacccccagggatcactgaccatccagcatgccacacagagagatgccggcttctacaagtgcatggcaaaaaacattctcggcagtgactccaaaacaacttacatccacgtcttctgaaatgtggattccagaatgattgcttaggaactgacaacaaagcggggtttgtaagggaagccaggttggggaataggagctcttaaataatgtgtcacagtgcatggtggcctctggtgggtttcaagttgaggttgatcttgatctacaattgttgggaaaaggaagcaatgcagacacgagaaggagggctcagccttgctgagacactttcttttgtgtttacatcatgccaggggcttcattcagggtgtctgtgctctgactgcaatttttcttcttttgcaaatgccactcgactgccttcataagcgtccataggatatctgaggaacattcatcaaaaataagccatagacatgaacaacacctcactaccccattgaagacgcatcacctagttaacctgctgcagtttttacatgatagactttgttccagattgacaagtcatctttcagttatttcctctgtcacttcaaaactccagcttgcccaataaggatttagaaccagagtgactgatatatatatatatattttaattcagagttacatacatacagctaccattttatatgaaaaaagaaaaacatttcttcctggaactcactttttatataatgttttatatatatattttttcctttcaaatcagacgatgagactagaaggagaaatactttctgtcttattaaaattaataaattattggtctttacaagacttggatacattacagcagacatggaaatataattttaaaaaatttctctccaacctccttcaaattcagtcaccactgttatattaccttctccaggaaccctccagtggggaaggctgcgatattagatttccttgtatgcaaagtttttgttgaaagctgtgctcagaggaggtgagaggagaggaaggagaaaactgcatcataactttacagaattgaatctagagtcttccccgaaaagcccagaaacttctctgcagtatctggcttgtccatctggtctaaggtggctgcttcttccccagccatgagtcagtttgtgcccatgaataatacacgacctgttatttccatgactgctttactgtatttttaaggtcaatatactgtacatttgataataaaataatattctcccaaaaaaaaaa

SEQ ID NO: 13428 - DNA, 3872 bp, Homo sapiens
gcggccgcgaattcggcacgagcagcaggacaaagtgctcgggacaaggacatagggctgagagtagccatgggctctggaggagacagcctcctggggggcaggggttccctgcctctgctgctcctgctcatcatgggaggcatggctcaggactccccgccccagatcctagtccacccccaggaccagctgttccagggccctggccctgccaggatgagctgccaagcctcaggccagccacctcccaccatccgctggttgctgaatgggcagcccctgagcatggtgcccccagacccacaccacctcctgcctgatgggacccttctgctgctacagccccctgcccggggacatgcccacgatggccaggccctgtccacagacctgggtgtctacacatgtgaggccagcaaccggcttggcacggcagtcagcagaggcgctcggctgtctgtggctgtcctccgggaggatttccagatccagcctcgggacatggtggctgtggtgggtgagcagtttactctggaatgtgggccgccctggggccacccagagcccacagtctcatggtggaaagatgggaaacccctggccctccagcccggaaggcacacagtgtccggggggtccctgctgatggcaagagcagagaagagtgacgaagggacctacatgtgtgtggccaccaacagcgcaggacatagggagagccgcgcagcccgggtttccatccaggagccccaggactacacggagcctgtggagcttctggctgtgcgaattcagctggaaaatgtgacactgctgaacccggatcctgcagagggccccaagcctagaccggcggtgtggctcagctggaaggtcagtggccctgctgcgcctgcccaatcttacacggccttgttcaggacccagactgccccgggaggccagggagctccgtgggcagaggagctgctggccggctggcagagcgcagagcttggaggcctccactggggccaagactacgagttcaaagtgagaccatcctctggccgggctcgaggccctgacagcaacgtgctgctcctgaggctgccggaaaaagtgcccagtgccccacctcaggaagtgactctaaagcctggcaatggcactgtctttgtgagctgggtcccaccacctgctgaaaaccacaatggcatcatccgtggctaccaggtctggagcctgggcaacacatcactgccaccagccaactggactgtagttggtgagcagacccagctggaaatcgccacccatatgccaggctcctactgcgtgcaagtggctgcagtcactggtgctggagctggggagcccagtagacctgtctgcctccttttagagcaggccatggagcgagccacccaagaacccagtgagcatggtccctggaccctggagcagctgagggctaccttgaagcggcctgaggtcattgccacctgcggtgttgcactctggctgctgcttctgggcaccgccgtgtgtatccaccgccggcgccgagctagggtgcacctgggcccaggtctgtacagatataccagtgaggatgccatcctaaaacacaggatggatcacagtgactcccagtggttggcagacacttggcgttccacctctggctctcgggacctgagcagcagcagcagcctcagcagtcggctgggggcggatgcccgggacccactagactgtcgtcgctccttgctctcctgggactcccgaagccccggcgtgcccctgcttccagacaccagcactttttatggctccctcatcgctgagctgccctccagtaccccagccaggccaagtccccaggtcccagctgtcaggcgcctcccaccccagctggcccagctctccagcccctgttccagctcagacagcctctgcagccgcaggggactctcttctccccgcttgtctctggcccctgcagaggcttggaaggccaaaaagaagcaggagctgcagcatgccaacagttccccactgctccggggcagccactccttggagctccgggcctgtgagttaggaaatagaggttccaagaacctttcccaaagcccaggagctgtgccccaagctctggttgcctggcgggccctgggaccgaaactcctcagctcctcaaatgagctggttactcgtcatctccctccagcacccctctttcctcatgaaactcccccaactcagagtcaacagacccagcctccggtggcaccacaggctccctcctccatcctgctgccagcagcccccatccccatccttagcccctgcagtccccctagcccccaggcctcttccctctctggccccagcccagcttccagtcgcctgtccagctcctcactgtcatccctgggggaggatcaagacagcgtgctgacccctgaggaggtagccctgtgcttggaactcagtgagggtgaggagactcccaggaacagcgtctctcccatgccaagggctccttcaccccccaccacctatgggtacatcagcgtcccaacagcctcagagttcacggacatgggcaggactggaggaggggtggggcccaaggggggagtcttgctgtgcccacctcggccctgcctcacccccacccccagcgagggctccttagccaatggttggggctcagcctctgaggacaatgccgccagcgccagagccagccttgtcagctcctccgatggctccttcctcgctgatgctcactttgcccgggccctggcagtggctgtggatagctttggtttcggtctagagcccagggaggcagactgcgtcttcatagatgcctcatcacctccctccccacgggatgagatcttcctgacccccaacctctccctgcccctgtgggagtggaggccagactggttggaagacatggaggtcagccacacccagcggctgggaagggggatgcctccctggccccctgactctcagatctcttcccagagaagtcagctccactgtcgtatgcccaaggctggtgcttctcctgtagattactcctgaaccgtgtccctgagacttcccagacgggaatcagaaccacttctcctgtccacccacaagacctgggctgtggtgtgtgggtcttggcctgtgtttctctgcagctggggtccaccttcccaagcctccagagagttctccctccacgattgtgaaaacaaatgaaaacaaaattagagcaaagctgacctggagccctcagggagcaaaacatcatctccacctgactcctagccactgctttctcctctgtgccatccactcccaccaccaggttgttttggcctgaggagcagccctgcctgctgctcttcccccaccatttggatcacaggaagtggaggagccagaggtgcctttgtggaggacagcagtggctgctgggagagggctgtggaggaaggagcttctcggagccccctctcagccttacctgggcccctcctctagagaagagctcaactctctcccaacctcaccatggaaagaaaataattatgaatgccactgaggcactgaggccctacctcatgccaaacaaagggttcaaggctgggtctagcgaggatgctgaaggaagggaggtatgagaccgtaggtcaaaagcaccatcctcgtactgttgtcactatgagcttaagaaatttgataccataaaatggtaaagacttgaaaaaaaaaaaaaaaaaaaaaaaaaaaaaaaaaaaaaaaaaaaaaaaaaaaaaaaaaaaaaaaaaaaaaaaaaaaaaaaaaaaaaaaaaaaaaaaaaaaaaaaaaaa

SEQ ID NO: 13429 - DNA, 3961 bp, Homo sapiens
gcctgcctctgttctgaaaggacaggaacttctcaatgatccgatgaaaagattgcatatttttggtcccaagattcacagtagcggaggtctctggcaacaaaaggtatcgtgggagtcacagctatgccagctgggccatttctcagacattcaatatgatctgccatttcaggatgcattttttaccaaaaaaataatttttttaaaacagactcaacttcctactgcaagcttagttcagttagattagagaggacagcaaagacgcggctgattataatttatggggtgatttcacctggaacagcatgtcaggccgcagtgtacggctgaggtcagtccccatccagagtctctcagagctggagagggcccggctgcaggaagtggctttttatcagttgcaacaggactgtgacctgagctgtcagatcaccattcccaaagatggacaaaagagaaagaaatctttaagaaagaaactggattcactaggaaaggagaaaaacaaagacaaagaattcatcccacaggcatttggaatgcccttatcccaagtcattgcgaatgacagggcctataaactcaagcaggacttgcagagggacgagcagaaagatgcatctgactttgtggcttccctcctcccatttggaaataaaagacaaaacaaagaactctcaagcagtaactcatctctcagctcaacctcagaaacaccgaatgagtcaacgtccccaaacaccccggaaccggctcctcgggctaggaggaggggtgccatgtcagtggattctatcaccgatcttgatgacaatcagtctcgactactagaagctttacaactttccttgcctgctgaggctcaaagtaaaaaggaaaaagccagagataagaaactcagtctgaatcctatttacagacaggtccctaggctggtggacagctgctgtcagcacctagaaaaacatggcctccagacagtggggatattccgagttggaagctcaaaaaagagagtgagacaattacgtgaggaatttgaccgtgggattgatgtctctctggaggaggagcacagtgttcatgatgtggcagccttgctgaaagagttcctgagggacatgccagacccccttctcaccagggagctgtacacagctttcatcaacactctcttgttggagccggaggaacagctgggcaccttgcagctcctcatataccttctacctccctgcaactgcgacaccctccaccgcctgctacagttcctctccatcgtggccaggcatgccgatgacaacatcagcaaagatgggcaagaggtcactgggaataaaatgacatctctaaacttagccaccatatttggacccaacctgctgcacaagcagaagtcatcagacaaagaattctcagttcagagttcagcccgggctgaggagagcacggccatcatcgctgttgtgcaaaagatgattgaaaattatgaagccctgttcatggttcccccagatctccagaacgaagtgctgatcagcctgttagagaccgatcctgatgtcgtggactatttactcagaagaaaggcttcccaatcatcaagccctgacatgctgcagtcggaagtttccttttccgtgggagggaggcattcatctacagactccaacaaggcctccagcggagacatctccccttatgacaacaactccccagtgctgtctgagcgctccctgctggctatgcaagaggacgcggccccggggggctcggagaagctttacagagtgccagggcagtttatgctggtgggccacttgtcgtcgtcaaagtcaagggaaagttctcctggaccaaggcttgggaaagatctgtcagaggagcctttcgatatctggggaacttggcattcaacattaaaaagcggatccaaagacccaggaatgacaggttcctctggagacatttttgaaagcagctccctaagagcggggccctgctccctttctcaagggaacctgtccccaaattggcctcggtggcaggggagccccgcagagctggacagcgacacgcagggggctcggaggactcaggccgcagcccccgcgacggagggcagggcccaccctgcggtgtcgcgcgcctgcagcacgccccacgtccaggtggcagggaaagccgagcggcccacggccaggtcggagcagtacttgaccctgagcggcgcccacgacctcagcgagagtgagctggatgtggccgggctgcagagccgggccacacctcagtgccaaagaccccatgggagtgggagggatgacaagcggcccccgcctccatacccgggcccagggaagcccgcggcagcggcagcctggatccaggggcccccggaaggcgtggagacacccacggaccagggaggccaagcagccgagcgagagcagcaggtcacgcagaaaaaactgagcagcgccaactccctgccagcgggcgagcaggacagtccgcgcctgggggacgctggctggctcgactggcagagagagcgctggcagatctgggagctcctgtcgaccgacaaccccgatgccctgcccgagacgctggtctgagcccgcacccagccgagccccccctgccccgagccccccgccctccagcccaggggggaccgtgggtggtggccactggcacacttagtgttcttctttcacacttctcaaaagtgacacaagagaaatccagttcacctacagaggtagagcactcacgcccccgccattgagaataaggttccattgcgtagccagccttaggaaaaacaaacagaacccaaaccagatggcaatgtccaatctaaaaacgtccctcttggctctataatataagatacaactcttgcttggtatagcctaaccgtatttatgtgtcttcggttttgactattgtgtattctgtaacagattatgtataatcatatatgatatattcacaaagagaaaacaaaaggaacttttaaaaaaaaaatcacttcacttatattaagcaatgagatatactaaacaatgagattctatagaatgttctagaatgtgcacaagcgggtttctgtgcttttgccatagctttataactggggataacccttccttcgataccaaacactaacaagaggaagcagaatatgagaagccatatttttacataggagtcagatacaaaaagaaaaatcactgaatgcttttagatattgaatacgttttcaggaaaatgctaaatctgatagattacgaaatatatttttagaacttgtttagaaaggattcagttaaccaaacaagaaaaaggcagtgcctcacaaagaaattaagaagttgtccgtcccacgttacatcaaattcagttttatataggccatatataatatatatttataatgtataatttttatgtatttttcaaaactacaaactggaatccaactataaagtgtttaagaatctacacagaatattcaaattatagaacatgttttttccctttgccccataatcagtatttgccaaattacatgcaattccttaaaaactaaatcacattggtaaaaggcctacagctttgtacttacattgtgccaaaggctgaggaaatgttttctttcgaatttttatgtgtattgtaaaatgttctaccgtactttagtagtttgaagttttcaagtgcataactatttttgaccagcagaaggcgatacgcttcagtattttatgcaattttttttcacttcgaagggaaagtgtattataaaaaaagattttttttttttaaaacatgctactcttaattttcatgttggtgatgaaattcccagtggtgtttcttaaggttctatcttgtgccatgatgaataaaaagttaagcaaaaaaaaaaaaaaaaaaaaaaaaa

SEQ ID NO: 13430 - DNA, 2267 bp, Homo sapiens
ttggagttgtatgatcttcagatcttaggcacaaaaccaccgatgaattccgatacacatcgtaactttgaccccaccgcaacccttagaaatcagggtgatttcacctggaacagcatgtcaggccgcagtgtgcggctgaggtcagtccccatccagagtctctcagagctggagagggcccggctgcaggaagtgcctttttatcagttgcaacaggactgtgacctgagctgtcagatcaccattcccaaagatggacaaaagagaaagaaatctttaagaaagaaactggattcactaggaaaggagaaaaacaaagacaaagaattcatcccacaggcatttggaatgcccttatcccaagtcattgcgaatgacagggcctataaactcaagcaggacttgcagagggacgagcagaaagatgcatctgactttgtggcttccctcctcccatttggaaataaaagacaaaacaaagaactctcaagcagtaactcatctctcagctcaacctcagaaacaccgaatgagtcaacgtccccaaacaccccggaaccggctcctcgggctaggaggaggggtgccatgtcagtggattctatcaccgatcttgatgacaatcagtctcgactactagaagctttacaactttccttgcctgctgaggctcaaagtaaaaaggaaaaagccagagataagaaactcagtctgaatcctatttacagacaggtccctaggctggtggacagctgctgtcagcacctagaaaaacatggcctccagacagtggggatattccgagttggaagctcaaaaaagagagtgagacaattacgtgaggaatttgaccgtgggattgatgtctctctggaggaggagcacagtgttcatgatgtggcagccttgctgaaagagttcctgagggacatgccagacccccttctcaccagggagctgtacacagctttcatcaacactctcttgttggagccggaggaacagctgggcaccttgcagctcctcatataccttctacctccctgcaactgcgacaccctccaccgcctgctacagttcctctccatcgtggccaggcatgccgatgacaacatcagcaaagatgggcaagaggtcactgggaataaaatgacatctctaaacttagccaccatatttggacccaacctgctgcacaagcagaagtcatcagacaaagaattctcagttcagagttcagcccgggctgaggagagcacggccatcatcgctgttgtgcaaaagatgattgaaaattatgaagccctgttcatggttcccccagatctccagaacgaagtgctgatcagcctgttagagaccgatcctgatgtcgtggactatttactcagaagaaaggcttcccaatcatcaagccctgacatgctgcagtcggaagtttccttttccgtgggagggaggcattcatctacagactccaacaaggcctccagcggagacatctccccttatgacaacaactccccagtgctgtctgagcgctccctgctggctatgcaagaggacgcggccccggggggctcggagaagctttacagagtgccagggcagtttatgctggtgggccacttgtcgtcgtcaaagtcaagggaaagttctcctggaccaaggcttgggaaaggtaactggagcctggccagcaggcgctggccaaaacaagcgaccctcctcttgttgcatgtggcatggtgtggggctcttcggaccttctcttcgtctctcccttatttgatgtttctgtaattcaacctgcatttaccgagtacctgctgaacgcctactctaggaagaggaaggtatggcgagcccagtcgttggctgggagggtccctgcaggccacactccaagtctcagatatctgggaaataaacgcatgcccagaggagccactcctattcccagctgattctttttccctccagcatcctaggaactttatgtatactggatttgggttgcatatttgctagtctgaggtgccacccaattactgctgttacatttctaaagaaaacaagctgaacctactatatgtatgaagacaaccttccagaaccaaatagtgttagtatccaatgacaagagagcactatactgggagtcacaaacctgctctgccactttcaacctgcaggatctccagtgagcgattgagcttcccagagtcccatttcctcctgctgtgaaaactcagaatgataac

SEQ ID NO: 13431 - DNA, 3633 bp, Homo sapiens
ggctgggctgcgaatagcgtgttcctctccggcggaacacacacacccggccttggggctgtctcctgaagctccctcctccacggagagcgctgagcgccgccgggaattccatcccaccgtgggcacgcagtctttggaggtcccgggcgcagcacgctcggtgtccccacactgcagcaagacagagaccccgcgggaaccttgagcttggaacaacccttgagcctctgcagtcggaagagtgggcgcagcagcccagcggaggccaggcgcgcaacctcgggcgccggggcaaggagagagtgcagggaggcgcagctcaggcgcccggctcaggagcgggaggaagttctcgcggcgccgggagcgcggtggacgcgccctgggcgcacgcccaggcagccttctccctggccctcgggactgtcctcgggcggcaaggaggagcttgctggagtcttagaggccatccagagccagcgagcaggagcgctgcgtctcccgcctcagctaggaagggggagtggcgctggcaggctggagctgggaacccagcgagcgcctgaccttcctcctcctcttcctgaccctcttcgcgtcttgggctccggaggaaggttctagcggctgcaggaggtccccagacccattttcctagaaggctggtgatggatctgctgctcctgccgccgccggggcacttggagcgcaccggcggcgcgtgagctgggctttgctctccaccgccctgggcaaaccccgggccagccccgcctggcacctttgcctgagtccctttcggttcccgacccaaagccaccagcgtccagggagggaggaggaggtggtcctcaggtgcagccccgccgagatgtccgcgcagagcctgctccacagcgtcttctcctgttcctcgcccgcttcaagtagcgcggcctcggccaagggcttctccaagaggaagctgcgccagacccgcagcctggacccggccctgatcggcggctgcgggagcgacgaggcgggcgcggagggcagtgcgcggggagccacggcgggccgcctctactccccatcactcccagccgagagtctcggccctcgcttggcgtcctcttcccggggtccgccccccagggccaccaggctaccgcctcctggacctctttgctcgtccttctccacacccagcaccccgcaggagaagtcaccatccggcagctttcactttgactatgaggttcccctgggtcgcggcggcctcaagaagagcatggcctgggacctgccttctgtcctggccgggccagccagtagccgaagcgcttccagcatcctctgttcatccgggggaggccccaatggcatcttcgcttctcctaggaggtggctccagcagaggaagttccagtccccacccgacagtcgcgggcacccctacgtcgtgtggaaatccgagggtgatttcacctggaacagcatgtcaggccgcagtgtgcggctgaggtcagtccccatccagagtctctcagagctggagagggcccggctgcaggaagtgcctttttatcagttgcaacaggactgtgacctgagctgtcagatcaccattcccaaagatggacaaaagagaaagaaatctttaagaaagaaactggattcactaggaaaggagaaaaacaaagacaaagaattcatcccacaggcatttggaatgcccttatcccaagtcattgcgaatgacagggcctataaactcaagcaggacttgcagagggacgagcagaaagatgcatctgactttgtggcttccctcctcccatttggaaataaaagacaaaacaaagaactctcaagcagtaactcatctctcagctcaacctcagaaacaccgaatgagtcaacgtccccaaacaccccggaaccggctcctcgggctaggaggaggggtgccatgtcagtggattctatcaccgatcttgatgacaatcagtctcgactactagaagctttacaactttccttgcctgctgaggctcaaagtaaaaaggaaaaagccagagataagaaactcagtctgaatcctatttacagacaggtccctaggctggtggacagctgctgtcagcacctagaaaaacatggcctccagacagtggggatattccgagttggaagctcaaaaaagagagtgagacaattacgtgaggaatttgaccgtgggattgatgtctctctggaggaggagcacagtgttcatgatgtggcagccttgctgaaagagttcctgagggacatgccagacccccttctcaccagggagctgtacacagctttcatcaacactctcttgttggagccggaggaacagctgggcaccttgcagctcctcatataccttctacctccctgcaactgcgacaccctccaccgcctgctacagttcctctccatcgtggccaggcatgccgatgacaacatcagcaaagatgggcaagaggtcactgggaataaaatgacatctctaaacttagccaccatatttggacccaacctgctgcacaagcagaagtcatcagacaaagaattctcagttcagagttcagcccgggctgaggagagcacggccatcatcgctgttgtgcaaaagatgattgaaaattatgaagccctgttcatggttcccccagatctccagaacgaagtgctgatcagcctgttagagaccgatcctgatgtcgtggactatttactcagaagaaaggcttcccaatcatcaagccctgacatgctgcagtcggaagtttccttttccgtgggagggaggcattcatctacagactccaacaaggcctccagcggagacatctccccttatgacaacaactccccagtgctgtctgagcgctccctgctggctatgcaagaggacgcggccccggggggctcggagaagctttacagagtgccagggcagtttatgctggtgggccacttgtcgtcgtcaaagtcaagggaaagttctcctggaccaaggcttgggaaaggtaactggagcctggccagcaggcgctggccaaaacaagcgaccctcctcttgttgcatgtggcatggtgtggggctcttcggaccttctcttcgtctctcccttatttgatgtttctgtaattcaacctgcatttaccgagtacctgctgaacgcctactctaggaagaggaaggtatggcgagcccagtcgttggctgggagggtccctgcaggccacactccaagtctcagatatctgggaaataaacgcatgcccagaggagccactcctattcccagctgattctttttccctccagcatcctaggaactttatgtatactggatttgggttgcatatttgctagtctgaggtgccacccaattactgctgttacatttctaaagaaaacaagctgaacctactatatgtatgaagacaaccttccagaaccaaatagtgttagtatccaatgacaagagagcactatactgggagtcacaaacctgctctgccactttcaacctgcaggatctccagtgagcgattgagcttcccagagtcccatttcctcctgctgtgaaaactcagaatgataac

SEQ ID NO: 13432 - DNA, 5133 bp, Homo sapiens
ggctgggctgcgaatagcgtgttcctctccggcggaacacacacacccggccttggggctgtctcctgaagctccctcctccacggagagcgctgagcgccgccgggaattccatcccaccgtgggcacgcagtctttggaggtcccgggcgcagcacgctcggtgtccccacactgcagcaagacagagaccccgcgggaaccttgagcttggaacaacccttgagcctctgcagtcggaagagtgggcgcagcagcccagcggaggccaggcgcgcaacctcgggcgccggggcaaggagagagtgcagggaggcgcagctcaggcgcccggctcaggagcgggaggaagttctcgcggcgccgggagcgcggtggacgcgccctgggcgcacgcccaggcagccttctccctggccctcgggactgtcctcgggcggcaaggaggagcttgctggagtcttagaggccatccagagccagcgagcaggagcgctgcgtctcccgcctcagctaggaagggggagtggcgctggcaggctggagctgggaacccagcgagcgcctgaccttcctcctcctcttcctgaccctcttcgcgtcttgggctccggaggaaggttctagcggctgcaggaggtccccagacccattttcctagaaggctggtgatggatctgctgctcctgccgccgccggggcacttggagcgcaccggcggcgcgtgagctgggctttgctctccaccgccctgggcaaaccccgggccagccccgcctggcacctttgcctgagtccctttcggttcccgacccaaagccaccagcgtccagggagggaggaggaggtggtcctcaggtgcagccccgccgagatgtccgcgcagagcctgctccacagcgtcttctcctgttcctcgcccgcttcaagtagcgcggcctcggccaagggcttctccaagaggaagctgcgccagacccgcagcctggacccggccctgatcggcggctgcgggagcgacgaggcgggcgcggagggcagtgcgcggggagccacggcgggccgcctctactccccatcactcccagccgagagtctcggccctcgcttggcgtcctcttcccggggtccgccccccagggccaccaggctaccgcctcctggacctctttgctcgtccttctccacacccagcaccccgcaggagaagtcaccatccggcagctttcactttgactatgaggttcccctgggtcgcggcggcctcaagaagagcatggcctgggacctgccttctgtcctggccgggccagccagtagccgaagcgcttccagcatcctctgttcatccgggggaggccccaatggcatcttcgcttctcctaggaggtggctccagcagaggaagttccagtccccacccgacagtcgcgggcacccctacgtcgtgtggaaatccgagggtgatttcacctggaacagcatgtcaggccgcagtgtgcggctgaggtcagtccccatccagagtctctcagagctggagagggcccggctgcaggaagtgcctttttatcagttgcaacaggactgtgacctgagctgtcagatcaccattcccaaagatggacaaaagagaaagaaatctttaagaaagaaactggattcactaggaaaggagaaaaacaaagacaaagaattcatcccacaggcatttggaatgcccttatcccaagtcattgcgaatgacagggcctataaactcaagcaggacttgcagagggacgagcagaaagatgcatctgactttgtggcttccctcctcccatttggaaataaaagacaaaacaaagaactctcaagcagtaactcatctctcagctcaacctcagaaacaccgaatgagtcaacgtccccaaacaccccggaaccggctcctcgggctaggaggaggggtgccatgtcagtggattctatcaccgatcttgatgacaatcagtctcgactactagaagctttacaactttccttgcctgctgaggctcaaagtaaaaaggaaaaagccagagataagaaactcagtctgaatcctatttacagacaggtccctaggctggtggacagctgctgtcagcacctagaaaaacatggcctccagacagtggggatattccgagttggaagctcaaaaaagagagtgagacaattacgtgaggaatttgaccgtgggattgatgtctctctggaggaggagcacagtgttcatgatgtggcagccttgctgaaagagttcctgagggacatgccagacccccttctcaccagggagctgtacacagctttcatcaacactctcttgttggagccggaggaacagctgggcaccttgcagctcctcatataccttctacctccctgcaactgcgacaccctccaccgcctgctacagttcctctccatcgtggccaggcatgccgatgacaacatcagcaaagatgggcaagaggtcactgggaataaaatgacatctctaaacttagccaccatatttggacccaacctgctgcacaagcagaagtcatcagacaaagaattctcagttcagagttcagcccgggctgaggagagcacggccatcatcgctgttgtgcaaaagatgattgaaaattatgaagccctgttcatggttcccccagatctccagaacgaagtgctgatcagcctgttagagaccgatcctgatgtcgtggactatttactcagaagaaaggcttcccaatcatcaagccctgacatgctgcagtcggaagtttccttttccgtgggagggaggcattcatctacagactccaacaaggcctccagcggagacatctccccttatgacaacaactccccagtgctgtctgagcgctccctgctggctatgcaagaggacgcggccccggggggctcggagaagctttacagagtgccagggcagtttatgctggtgggccacttgtcgtcgtcaaagtcaagggaaagttctcctggaccaaggcttgggaaagatctgtcagaggagcctttcgatatctggggaacttggcattcaacattaaaaagcggatccaaagacccaggaatgacaggttcctctggagacatttttgaaagcagctccctaagagcggggccctgctccctttctcaagggaacctgtccccaaattggcctcggtggcaggggagccccgcagagctggacagcgacacgcagggggctcggaggactcaggccgcagcccccgcgacggagggcagggcccaccctgcggtgtcgcgcgcctgcagcacgccccacgtccaggtggcagggaaagccgagcggcccacggccaggtcggagcagtacttgaccctgagcggcgcccacgacctcagcgagagtgagctggatgtggccgggctgcagagccgggccacacctcagtgccaaagaccccatgggagtgggagggatgacaagcggcccccgcctccatacccgggcccagggaagcccgcggcagcggcagcctggatccaggggcccccggaaggcgtggagacacccacggaccagggaggccaagcagccgagcgagagcagcaggtcacgcagaaaaaactgagcagcgccaactccctgccagcgggcgagcaggacagtccgcgcctgggggacgctggctggctcgactggcagagagagcgctggcagatctgggagctcctgtcgaccgacaaccccgatgccctgcccgagacgctggtctgagcccgcacccagccgagccccccctgccccgagccccccgccctccagcccaggggggaccgtgggtggtggccactggcacacttagtgttcttctttcacacttctcaaaagtgacacaagagaaatccagttcacctacagaggtagagcactcacgcccccgccattgagaataaggttccattgcgtagccagccttaggaaaaacaaacagaacccaaaccagatggcaatgtccaatctaaaaacgtccctcttggctctataatataagatacaactcttgcttggtatagcctaaccgtatttatgtgtcttcggttttgactattgtgtattctgtaacagattatgtataatcatatatgatatattcacaaagagaaaacaaaaggaacttttaaaaaaaaaatcacttcacttatattaagcaatgagatatactaaacaatgagattctatagaatgttctagaatgtgcacaagcgggtttctgtgcttttgccatagctttataactggggataacccttccttcgataccaaacactaacaagaggaagcagaatatgagaagccatatttttacataggagtcagatacaaaaagaaaaatcactgaatgcttttagatattgaatacgttttcaggaaaatgctaaatctgatagattacgaaatatatttttagaacttgtttagaaaggattcagttaaccaaacaagaaaaaggcagtgcctcacaaagaaattaagaagttgtccgtcccacgttacatcaaattcagttttatataggccatatataatatatatttataatgtataatttttatgtatttttcaaaactacaaactggaatccaactataaagtgtttaagaatctacacagaatattcaaattatagaacatgttttttccctttgccccataatcagtatttgccaaattacatgcaattccttaaaaactaaatcacattggtaaaaggcctacagctttgtacttacattgtgccaaaggctgaggaaatgttttctttcgaatttttatgtgtattgtaaaatgttctaccgtactttagtagtttgaagttttcaagtgcataactatttttgaccagcagaaggcgatacgcttcagtattttatgcaattttttttcacttcgaagggaaagtgtattataaaaaaagattttttttttttaaaacatgctactcttaattttcatgttggtgatgaaattcccagtggtgtttcttaaggttctatcttgtgccatgatgaataaaaagttaagcaaaaaaaaaaaaaaaaaaaaaaaaa

SEQ ID NO: 13433 - DNA, 3769 bp, Homo sapiens
ggggtcctgcagcctcccgagtgcggagaggcggggccgcccgctgccgcccggctgcctgcgccccctcccgcggccccggctctgggagcggggcgccccgcgcgcgggcacacggcggccagagcgccgaggcggtaccttcagcctgcaatgagaggaacccgggagagcccccgggagccagcgaagagcttggctgctgcgtccagggctgctgctgccgccgcggctgcttgaaactcctcaaagttgagagccggctagagggtgccgcccgccgggagccggagggaaaggaagtcgggaggtgcaagagtgacagacacggacagacggacgcgcagaccttcggaaggcactgcgtaggcagcctccccggagcccacgaggctccccagcaccgttcactggtgggaggctgagccggtggaaaagacaccgggaagagactcagaggcgaccataatgtcgttacgtgtacacactctgcccaccctgcttggagccgtcgtcagaccgggctgcagggagctgctgtgtttgctgatgatcacagtgactgtgggccctggtgcctctggggtgtgccccaccgcttgcatctgtgccactgacatcgtcagctgcaccaacaaaaacctgtccaaggtgcctgggaaccttttcagactgattaagagactggacctgagttataacagaattgggcttctggattctgagtggattccagtatcgtttgcaaagctgaacaccctaattcttcgtcataacaacatcaccagcatttccacgggcagtttttccacaactccaaatttgaagtgtcttgacttatcgtccaataagctgaagacggtgaaaaatgctgtattccaagagttgaaggttctggaagtgcttctgctttacaacaatcacatatcctatctcgatccttcagcgtttggagggctctcccagttgcagaaactctacttaagtggaaattttctcacacagtttccgatggatttgtatgttggaaggttcaagctggcagaactgatgtttttagatgtttcttataaccgaattccttccatgccaatgcaccacataaatttagtgccaggaaaacagctgagaggcatctaccttcatggaaacccatttgtctgtgactgttccctgtactccttgctggtcttttggtatcgtaggcactttagctcagtgatggattttaagaacgattacacctgtcgcctgtggtctgactccaggcactcgcgtcaggtacttctgctccaggatagctttatgaattgctctgacagcatcatcaatggttcctttcgtgcgcttggctttattcatgaggctcaggtcggggaaagactgatggtccactgtgacagcaagacaggtaatgcaaatacggatttcatctgggtgggtccagataacagactgctagagccggataaagagatggaaaacttttacgtgtttcacaatggaagtctggttatagaaagccctcgttttgaggatgctggagtgtattcttgtatcgcaatgaataagcaacgcctgttaaatgaaactgtggacgtcacaataaatgtgagcaatttcactgtaagcagatcccatgctcatgaggcatttaacacagcttttaccactcttgctgcttgcgtggccagtatcgttttggtacttttgtacctctatctgactccatgcccctgcaagtgtaaaaccaagagacagaaaaatatgctacaccaaagcaatgcccattcatcgattctcagtcctggccccgctagtgatgcctccgctgatgaacggaaggcaggtgcaggtaaaagagtggtgtttttggaacccctgaaggatactgcagcagggcagaacgggaaagtcaggctctttcccagcgaggcagtgatagctgagggcatcctaaagtccacgagggggaaatctgactcagattcagtcaattcagtgttttctgacacaccttttgtggcgtccacttaatttgtgcctatatttgtatgatgtcataatttaatctgttcatatttaactttgtgtgtggtctgcaaaataaacagcaggacagaaattgtgttgttttgttctttgaaatacaaccaaattctcttaaaatgattggtaggaaatgaggtaaagtacttcagttcctcaatgtgccagagaaagatggggttgttttccaaagtttaagttctagatcacaatatcttagcttttagcactattggtaatttcagagtaggcccaaaggtgatatgactcccattgtccctttatttaggatattgaaagaaaaaataaactttatgtattagtgtcctttaaaaatagactttgctaacttactagtaccagagttattttaaagaaaaacactagtgtccaatttcatttttaaaagatgtagaaagaagaatcaagcatcaattaattataaagcctaaagcaaagttagatttgggggttattcagccaaaattaccgttttagaccagaatgaatagactacactgataaaatgtactggataatgccacatcctatatggtgttatagaaatagtgcaaggaaagtacatttgtttgcctgtcttttcattttgtacattcttcccattctgtattcttgtacaaaagatctcattgaaaatttaaagtcatcataatttgttgccataaatatgtaagtgtcaataccaaaatgtctgagtaacttcttaaatccctgttctagcaaactaatattggttcatgtgcttgtgtatatgtaaatcttaaattatgtgaactattaaatagaccctactgtactgtgctttggacatttgaattaatgtaaatatatgtaatctgtgacttgatattttgttttatttggctatttaaaaacataaatctaaaatgtcttatgttatcagattatgctattttgtataaagcaccactgatagcaaatctctctccaaaattcttatagtaaagttgatttttttaaagggggaggggaaggctttaatgtgttctagatcaatttataccttccgtatgacgttttactctgatatcattgtgcactttagccagatccagaaaacactcaaatttattttgcaacaagtgagagcccaggagacctccttattatcctgtctctgctttgaggcaatcaagtaccctctctgaacctaggttccctcatctgtaaaacaaaggtttcagaccagatggtgtttaaggtttctccccatactggaatgaatgatttcttggtggtattagcatcatcacagacctatacttgctttctgaaactctaccacatactgaaggaatacaggaatgggattaagatgactagcatagcagtgtacagcttgaagagatgttccacatcatcactccagctccttctcttttctcagggacaaatgaggcccagagagaatacgacctgtgtaaggtcaaacagtggcagggaaagaaggagagctggggtttagcattctccctggtgaagattggaggtccaaagaaatgactcctttttaagggatgggcataaaaaagtgatcaaaacattgcaaaggagaatcaaagattgattgtcctggggctaagaaagaagataatttttaaagaatgggagtgggcaacagtgaaaaatattgcagataagtagataaggatagaagatcaaccactgactggtagta

SEQ ID NO: 13434 - DNA, 11426 bp, Homo sapiens
agacccgccgggctcccgccgcgcgcgctgtccctggagctcggggacgcggcccggagccgggaagatggcgaagcggctctgcgcggggagcgcactgtgtgttcgcggcccccggggccccgcgccgctgctgctggtcgggctggcgctgctgggcgcggcgcgggcgcgggaggaggcgggcggcggcttcagcctgcacccgccctacttcaacctggccgagggcgcccgcatcgccgcctccgcgacctgcggagaggaggccccggcgcgcggctccccgcgccccaccgaggacctttactgcaagctggtagggggccccgtggccggcggcgaccccaaccagaccatccggggccagtactgtgacatctgcacggctgccaacagcaacaaggcacaccccgcgagcaatgccatcgatggcacggagcgctggtggcagagtccaccgctgtcccgcggcctggagtacaacgaggtcaacgtcaccctggacctgggccaggtcttccacgtggcctacgtcctcatcaagtttgccaactcaccccggccggacctctgggtgctggagcggtccatggacttcggccgcacctaccagccctggcagttctttgcctcctccaagagggactgtctggagcggttcgggccacagacgctggagcgcatcacacgggacgacgcggccatctgcaccaccgagtactcacgcatcgtgcccctggagaacggagagatcgtggtgtccctggtgaacggacgtccgggcgccatgaatttctcctactcgccgctgctacgtgagttcaccaaggccaccaacgtccgcctgcgcttcctgcgtaccaacacgctgctgggccatctcatggggaaggcgctgcgggaccccacggtcacccgccggtattattacagcatcaaggatatcagcatcggaggccgctgtgtctgccacggccacgcggatgcctgcgatgccaaagaccccacggacccgttcaggctgcagtgcacctgccagcacaacacctgcgggggcacctgcgaccgctgctgccccggcttcaatcagcagccgtggaagcctgcgactgccaacagtgccaacgagtgccagtcctgtaactgctacggccatgccaccgactgttactacgaccctgaggtggaccggcgccgcgccagccagagcctggatggcacctatcagggtgggggtgtctgtatcgactgccagcaccacaccaccggcgtcaactgtgagcgctgcctgcccggcttctaccgctctcccaaccaccctctcgactcgccccacgtctgccgccgctgcaactgcgagtccgacttcacggatggcacctgcgaggacctgacgggtcgatgctactgccggcccaacttctctggggagcggtgtgacgtgtgtgccgagggcttcacgggcttcccaagctgctacccgacgccctcgtcctccaatgacaccagggagcaggtgctgccagccggccagattgtgaattgtgactgcagcgcggcagggacccagggcaacgcctgccggaaggacccaagggtgggacgctgtctgtgcaaacccaacttccaaggcacccattgtgagctctgcgcgccagggttctacggccccggctgccagccctgccagtgttccagccctggagtggccgatgaccgctgtgaccctgacacaggccagtgcaggtgccgagtgggcttcgagggggccacatgtgatcgctgtgcccccggctactttcacttccctctctgccagttgtgtggctgcagccctgcaggaaccttgcccgagggctgcgatgaggccggccgctgcctatgccagcctgagtttgctggacctcattgtgaccggtgccgccctggctaccatggtttccccaactgccaagcatgcacctgcgaccctcggggagccctggaccagctctgtggggcgggaggtttgtgccgctgccgccccggctacacaggcactgcctgccaggaatgcagccccggctttcacggcttccccagctgtgtcccctgccactgctctgctgaaggctccctgcacgcagcctgtgacccccggagtgggcagtgcagctgccggccccgtgtgacggggctgcggtgtgacacatgtgtgcccggtgcctacaacttcccctactgcgaagctggctcttgccaccctgccggtctggccccagtggatcctgcccttcctgaggcacaggttccctgtatgtgccgggctcacgtggaggggccgagctgtgaccgctgcaaacctgggttctggggactgagccccagcaaccccgagggctgtacccgctgcagctgcgacctcaggggcacactgggtggagttgctgagtgccagccgggcaccggccagtgcttctgcaagccccacgtgtgcggccaggcctgcgcgtcctgcaaggatggcttctttggactggatcaggctgactattttggctgccgcagctgccggtgtgacattggcggtgcactgggccagagctgtgaaccgaggacgggcgtctgccggtgccgccccaacacccagggccccacctgcagcgagcctgcgagggaccactacctcccggacctgcaccacctgcgcctggagctggaggaggctgccacacctgagggtcacgccgtgcgctttggcttcaaccccctcgagttcgagaacttcagctggaggggctacgcgcagatggcacctgtccagcccaggatcgtggccaggctgaacctgacctcccctgaccttttctggctcgtcttccgatacgtcaaccggggggccatgagtgtgagcgggcgggtctctgtgcgagaggagggcaggtcggccacctgcgccaactgcacagcacagagtcagcccgtggccttcccacccagcacggagcctgccttcatcaccgtgccccagaggggcttcggagagccctttgtgctgaaccctggcacctgggccctgcgtgtggaggccgaaggggtgctcctggactacgtggttctgctgcctagcgcatactacgaggcggcgctcctgcagctgcgggtgactgaggcctgcacataccgtccctctgcccagcagtctggcgacaactgcctcctctacacacacctccccctggatggcttcccctcggccgccgggctggaggccctgtgtcgccaggacaacagcctgccccggccctgccccacggagcagctcagcccgtcgcacccgccactgatcacctgcacgggcagtgatgtggacgtccagcttcaagtggcagtgccacagccaggccgctatgccctagtggtggagtacgccaatgaggatgcccgccaggaggtgggcgtggccgtgcacaccccacagcgggccccccagcaggggctgctctccctgcacccctgcctgtacagcaccctgtgccggggcactgcccgggatacccaggaccacctggctgtcttccacctggactcggaggccagcgtgaggctcacagccgaacaggcacgcttcttcctgcacggggtcactctggtgcccattgaggagttcagcccggagttcgtggagccccgggtcagctgcatcagcagccacggcgcctttggccccaacagtgccgcctgtctgccctcgcgcttcccaaagccgccccagcccatcatcctcagggactgccaggtgatcccgctgccgcccggcctcccgctgacccacgcgcaggatctcactccagccatgtccccagctggaccccgacctcggccccccaccgctgtggaccctgatgcagagcccaccctgctgcgtgagccccaggccaccgtggtcttcaccacccatgtgcccacgctgggccgctatgccttcctgctgcacggctaccagccagcccaccccaccttccccgtggaagtcctcatcaacgccggccgcgtgtggcagggccacgccaacgccagcttctgtccacatggctacggctgccgcaccctggtggtgtgtgagggccaggccctgctggacgtgacccacagcgagctcactgtgaccgtgcgtgtgcccaagggccggtggctctggctggattatgtactcgtggtccctgagaacgtctacagctttggctacctccgggaggagcccctggataaatcctatgacttcatcagccactgcgcagcccagggctaccacatcagccccagcagctcatccctgttctgccgaaacgctgctgcttccctctccctcttctataacaacggagcccgtccatgtggctgccacgaagtaggtgctacaggccccacgtgtgagcccttcgggggccagtgtccctgccatgcccatgtcattggccgtgactgctcccgctgtgccaccggatactggggcttccccaactgcaggccctgtgactgcggtgcccgcctctgtgacgagctcacgggccagtgcatctgcccgccacgcaccatcccgcccgactgcctgctgtgccagccccagacctttggctgccaccccctggtcggctgtgaggagtgtaactgctcagggcccggcatccaggagctcacagaccctacctgtgacacagacagcggccagtgcaagtgcagacccaacgtgactgggcgccgctgtgatacctgctctccgggcttccatggctacccccgctgccgcccctgtgactgtcacgaggcgggcactgcgcctggcgtgtgtgaccccctcacagggcagtgctactgtaaggagaacgtgcagggccccaaatgtgaccagtgcagccttgggaccttctcactggatgctgccaaccccaaaggttgcacccgctgcttctgctttggggccacggagcgctgccggagctcgtcctacacccgccaggagttcgtggatatggagggatgggtgctgctgagcactgaccggcaggtggtgccccacgagcggcagccagggacggagatgctccgtgcagacctgcggcacgtgcctgaggctgtgcccgaggctttccccgagctgtactggcaggccccaccctcctacctgggggaccgggtgtcatcctacggtgggaccctccgttatgaactgcactcagagacccagcggggagatgtctttgtccccatggagagcaggccggatgtggtgctgcagggcaaccagatgagcatcacattcctggagccggcataccccacgcctggccacgttcaccgtgggcagctgcagctggtggaggggaacttccggcatacggagacgcgcaacactgtgtcccgcgaggagctcatgatggtgctggccagcctggagcagctgcagatccgtgccctcttctcacagatctcctcggctgtcttcctgcgcagggtggcactggaggtggccagcccagcaggccagggggccctggccagcaatgtggagctgtgcctgtgccccgccagctaccggggggactcatgccaggaatgtgcccccggcttctatcgggacgtcaaaggtctcttcctgggccgatgtgtcccttgtcagtgccatggacactcagaccgctgcctccctggctctggcgtctgtgtggactgccagcacaacaccgaaggggcccactgtgagcgctgccaggctggcttcgtgagcagcagggacgaccccagcgccccctgtgtcagctgcccctgccccctctcagtgccttccaacaacttcgccgagggctgtgtcctgcgaggcggccgcacccagtgcctctgcaaacctggttatgcaggtgcctcctgcgagcggtgtgcgcccggattctttgggaacccactggtgctgggcagctcctgccagccatgcgactgcagcggcaacggtgaccccaacttgctcttcagcgactgcgaccccctgacgggcgcctgccgtggctgcctgcgccacaccactgggccccgctgcgagatctgtgcccccggcttctacggcaacgccctgctgcccggcaactgcacccggtgcgactgtaccccatgtgggacagaggcctgcgacccccacagcgggcactgcctgtgcaaggcgggcgtgactgggcggcgctgtgaccgctgccaggagggacattttggtttcgatggctgcgggggctgccgcccgtgtgcttgtggaccggccgccgagggctccgagtgccacccccagagcggacagtgccactgccgaccagggaccatgggaccccagtgccgcgagtgtgcccctggctactgggggctccctgagcagggctgcaggcgctgccagtgccctgggggccgctgtgaccctcacacgggccgctgcaactgccccccggggctcagcggggagcgctgcgacacctgcagccagcagcatcaggtgcctgttccaggcgggcctgtgggccacagcatccactgtgaagtgtgtgaccactgtgtggtcctgctcctggatgacctggaacgggccggcgccctcctccccgccattcacgagcaactgcgtggcatcaatgccagctccatggcctgggcccgtctgcacaggctgaacgcctccatcgctgacctgcagagccagctccggagccccctgggcccccgccatgagacggcacagcagctggaggtgctggagcagcagagcacaagcctcgggcaggacgcacggcggctaggcggccaggccgtggggacccgagaccaggcgagccaattgctggccggcaccgaggccacactgggccatgcgaagacgctgttggcggccatccgggctgtggaccgcaccctgagcgagctcatgtcccagacgggccacctggggctggccaatgcctcggctccatcaggtgagcagctgctccggacactggccgaggtggagcggctgctctgggagatgcgggcccgggacctgggggccccgcaggcagcagctgaggctgagttggctgcagcacagagattgctggcccgggtgcaggagcagctgagcagcctctgggaggagaaccaggcactggccacacaaacccgcgaccggctggcccagcacgaggccggcctcatggacctgcgagaggctttgaaccgggcagtggacgccacacgggaggcccaggagctcaacagccgcaaccaggagcgcctggaggaagccctgcaaaggaagcaggagctgtcccgggacaatgccaccctgcaggccactctgcatgcggctagggacaccctggccagcgtcttcagattgctgcacagcctggaccaggctaaggaggagctggagcgcctcgccgccagcctggatggggctcggaccccactgctgcagaggatgcagaccttctccccggcgggcagcaagctgcgtctagtggaggccgccgaggcccacgcacagcagctgggccagctggcactcaatctgtccagcatcatcctggacgtcaaccaggaccgcctcacccagagggccatcgaggcctccaacgcctacagccgcatcctgcaggccgtgcaggctgccgaggatgctgctggccaggccctgcagcaggcggaccacacgtgggcgacggtggtgcggcagggcctggtggaccgagcccagcagctcctggccaacagcactgcactagaagaggccatgctccaggaacagcagaggctgggccttgtgtgggctgccctccagggtgccaggacccagctccgagatgtccgggccaagaaggaccagctggaggcgcacatccaggcggcgcaggccatgcttgccatggacacagacgagacaagcaagaagatcgcacatgccaaggctgtggctgctgaagcccaggacaccgccacccgtgtgcagtcccagctgcaggccatgcaggagaatgtggagcggtggcagggccagtacgagggcctgcggggccaggacctgggccaggcagtgcttgacgcaggccactcagtgtccaccctggagaagacgctgccccagctgctggccaagctgagcatcctggagaaccgtggggtgcacaacgccagcctggccctgtccgccagcattggccgcgtgcgagagctcattgcccaggcccggggggctgccagtaaggtcaaggtgcccatgaagttcaacgggcgctcaggggtgcagctgcgcaccccacgggatcttgccgaccttgctgcctacactgccctcaagttctacctgcagggcccagagcctgagcctgggcagggtaccgaggatcgctttgtgatgtacatgggcagccgccaggccactggggactacatgggtgtgtctctgcgtgacaagaaggtgcactgggtgtatcagctgggtgaggcgggccctgcagtcctaagcatcgatgaggacattggggagcagttcgcagctgtcagcctggacaggactctccagtttggccacatgtccgtcacagtggagagacagatgatccaggaaaccaagggtgacacggtggcccctggggcagaggggctgctcaacctgcggccagacgacttcgtcttctacgtcggggggtaccccagtaccttcacgccccctcccctgcttcgcttccccggctaccggggctgcatcgagatggacacgctgaatgaggaggtggtcagcctctacaacttcgagaggaccttccagctggacacggctgtggacaggccttgtgcccgctccaagtcgaccggggacccgtggctcacggacggctcctacctggacggcaccggcttcgcccgcatcagcttcgacagtcagatcagcaccaccaagcgcttcgagcaggagctgcggctcgtgtcctacagcggggtgctcttcttcctgaagcagcagagccagttcctgtgcttggccgtgcaagaaggcagcctcgtgctgttgtatgactttggggctggcctgaaaaaggccgtcccactgcagcccccaccgcccctgacctcggccagcaaggcgatccaggtgttcctgctggggggcagccgcaagcgtgtgctggtgcgtgtggagcgggccacggtgtacagcgtggagcaggacaatgatctggagctggccgacgcctactacctggggggcgtgccgcccgaccagctgcccccgagcctgcgacggctcttccccaccggaggctcagtccgtggctgcgtcaaaggcatcaaggccctgggcaagtatgtggacctcaagcggctgaacacgacaggcgtgagcgccggctgcaccgccgacctgctggtggggcgcgccatgactttccatggccacggcttccttcgcctggcgctctcgaacgtggcaccgctcactggcaacgtctactccggcttcggcttccacagcgcccaggacagtgccctgctctactaccgggcgtccccggatgggctatgccaggtgtccctgcagcagggccgtgtgagcctacagctcctgaggactgaagtgaaaactcaagcgggcttcgccgatggtgccccccattacgtcgccttctacagcaatgccacgggagtctggctgtatgtcgatgaccagctccagcagatgaagccccaccggggaccaccccccgagctccagccgcagcctgaggggcccccgaggctcctcctgggaggcctgcctgagtctggcaccatttacaacttcagtggctgcatcagcaacgtcttcgtgcagcggctcctgggcccacagcgcgtatttgatctgcagcagaacctgggcagcgtcaatgtgagcacgggctgtgcacccgccctgcaagcccagaccccgggcctggggcctagaggactgcaggccaccgcccggaaggcctcccgccgcagccgtcagcccgcccggcatcctgcctgcatgctgcccccacacctcaggaccacccgagactcctaccagtttgggggttccctgtccagtcacctggagtttgtgggcatcctggcccgacataggaactggcccagtctctccatgcacgtcctcccgcgaagctcccgaggcctcctcctcttcactgcccgtctgaggcccggcagcccctccctggcgctcttcctgagcaatggccacttcgttgcacagatggaaggcctcgggactcggctccgcgcccagagccgccagcgctcccggcctggccgctggcacaaggtctccgtgcgctgggagaagaaccggatcctgctggtgacggacggggcccgggcctggagccaggaggggccgcaccggcagcaccagggggcagagcacccccagccccacaccctctttgtgggcggcctcccggccagcagccacagctccaaacttccggtgaccgtcgggttcagcggctgtgtgaagagactgaggctgcacgggaggcccctgggggcccccacacggatggcaggggtcacaccctgcatcttgggccccctggaggcgggcctgttcttcccaggcagcgggggagttatcactttagacctcccaggagctacactgcctgatgtgggcctggaactggaggtgcggcccctggcagtcaccggactgatcttccacttgggccaggcccggacgcccccctacttgcagttgcaggtgaccgagaagcaagtcctgctgcgggcggatgacggagcaggggagttctccacgtcagtgacccgcccctcagtgctgtgtgatggccagtggcaccggctagcggtgatgaaaagcgggaatgtgctccggctggaggtggacgcgcagagcaaccacaccgtgggccccttgctggcggctgcagctggtgccccagcccctctgtacctcgggggcctgcctgagcccatggccgtgcagccctggccccccgcctactgcggctgcatgaggaggctggcggtgaaccggtcccccgtcgccatgactcgctctgtggaggtccacggggcagtgggggccagtggctgcccagccgcctaggacacagccaaccccggcccctggtcaggcccctgcagctgcctcacaccgccccttgtgctcgcctcataggtgtctatttggactctaagctctacgggtgacagatcttgtttctgaagatggtttaagttatagcttcttaaacgaaagaataaaatactgcaaaatgtttttatatttggcccttccacccatttttaattgtgagagatttgtcaccaatcatcactggttcctccttaaaaattaaaaagtaacttctgtgtaa

SEQ ID NO: 13435 - DNA, 7021 bp, Homo sapiens
caacgtgctgagctaatagcgacagatagagggcagacagattcctgctagcagcttagtgttagttgcttgtggtaactaaggcaggtggcatacatctcagaacgtggagaatgatggtatgctttctgagttaacatgttgaactgttttgcttttctaaaaattttcctagtaacattttcttgatgatatgagagtggatatcaatgcctcacagaaacaagaggtggaacatgtgaatgaatcgtcttggaactagattatgagcactggttctttttaaagggatgtgcaagaggcagccttggcaagaaaacttgctgcataatcttacatggactaaagatgaaactttaaaccgcaaatcagctttgagtgaactttgacagaagatgtttcgacagttttatctctggacatgtttagcttcagggatcatcctgggctctctctttgaaatctgcttgggccagtatgatgatgattgcaaactagctaggggaggaccaccagctaccatagttgctattgatgaagaaagtcggaatggtacaattctggtggacaacatgctgatcaaagggactgctggaggaccagaccccaccatagaactttctttaaaggataatgtggattactgggtgttgatggatcctgttaagcaaatgcttttcctgaacagcaccggaagagttctggatagagatccaccgatgaacatacactccattgtggtgcaggtccagtgcatcaacaaaaaagtgggcactattatctaccatgaagtgcgaatagtggtgagagacaggaatgacaactcacccactttcaagcatgaaagctactatgccacagtgaatgagctcactccagttggtaccacaatattcacaggattttcaggagacaatggagctacagatatagatgatggaccaaatggacagatagagtatgttattcagtataatccagatgatccgacatccaatgacacctttgaaattcccctaatgttgactggaaatatagtgttaaggaagaggctcaactatgaagataagactcgctactttgtcataatccaagctaatgaccgtgcccaaaatctgaatgagaggcgaaccaccaccaccactctcacagtggatgttctggatggagatgacttgggtccaatgtttcttccttgtgtccttgtgccaaacactcgtgattgccgtccactcacttatcaagctgccatacctgagttgagaactccggaagaactgaaccccattattgttacgccaccaatccaagccattgatcaggaccggaatattcaaccgccatcagataggccaggaatcctctattccatccttgttgggactcctgaggattacccacgatttttccatatgcatcctaggacagcagaacttagtctcctggagccagtaaacagagactttcaccagaaatttgatttggttattaaggctgaacaagacaatggtcatcctcttcctgcctttgccggtctacacattgaaatactggatgaaaacaatcaaagtccatattttacaatgcccagttatcaaggctatatcctggaatctgccccagtgggagcaaccatttcggacagtctcaatttgacttcacctttaagaatagtagctctggacaaggacatagaagatacaaaagacccagagcttcacctttttctgaatgactacacctcagtcttcaccgtcacacagactggtattactcgctacctcaccttacttcaaccagtggacagggaagaacagcaaacttacaccttttcgataacagcatttgatggtgtacaagaaagtgagccagtcatcgtcaatattcaagtgatggatgcaaatgataacacgccaaccttccctgaaatatcctatgatgtgtatgtttatacagacatgagacctggggacagtgtcatacagctcactgcagtcgacgcagacgaagggtcaaatggggagatcacatatgaaatccttgttggggctcagggagacttcatcatcaataaaacaacagggcttatcaccatcgctccaggggtggaaatgatagtcgggcggacttacgcactcacggtccaagcagcggataatgctcctcctgcagagcgaaggaactccatctgcactgtgtatattgaagtgcttccaccaaataatcaaagccctcctcgcttcccacagctgatgtatagccttgaaattagtgaagccatgagggttggtgctgttttattaaatctacaggcaactgatcgagagggagactcaataacatatgccattgagaatggagatcctcagagagtttttaatctttcagaaaccacggggattctaaccttagggaaagcactggacagggaaagcactgatcgctacattctgatcatcacagcttcagatggcaggccagatgggacctcaactgccacagtaaacatagtggtgacagatgtcaatgacaatgctccagtgtttgatccttatctgccaagaaatttatctgtggtggaagaagaagccaatgcctttgtgggtcaagtaaaagcaacagaccctgatgctggaataaatggtcaagtgcactacagtttgggtaactttaataatctttttcgtatcacatccaatgggagcatttacacagcagtgaagcttaacagagaagtcagggactactatgaacttgttgttgtggcaacagatggagcagtacaccctcgtcattcaactctaaccttggccatcaaggttttggacattgatgataacagtcctgtgttcaccaattcaacatacactgtccttgttgaagagaatttgccagctgggactaccatccttcaaatagaggccaaagatgtcgaccttggagcaaatgtgtcttaccggataagaagcccagaagtgaagcacttttttgcactacatccatttacaggagaactatcgcttttaaggagtttagattatgaggcatttccagaccaagaagcaagtatcacttttctggtagaggcctttgatatttatggaacaatgccacctggtattgctactgtcacagtgattgtaaaggatatgaatgattatcctcctgtctttagtaaacgaatatacaaagggatggtggctccggatgcagtcaagggtacacctatcacaacagtttatgctgaagatgcagaccctcctggattacctgcaagtcgtgtgaggtatagagtagatgatgtacagtttccttaccctgccagtatttttgaagtggaagaagattctggaagagtaataacacgagtcaatcttaatgaagaacctacaacaatttttaagttggtggtggttgcttttgatgatggggagcctgtgatgtccagcagtgccacagtgaagattcttgtcttacatcctggtgagatcccacgcttcacacaggaggaatatagacctcctccagtaagtgaacttgccaccaaagggaccatggttggtgtaatttctgctgctgccattaatcaaagtattgtgtactccattgtttcaggaaatgaagaagatacatttggaattaataacatcacaggtgttatctatgtgaatggacctctggattatgagaccaggacaagctatgtacttcgagtccaagctgattccctggaagtggtccttgccaatctccgagttccttcaaaaagcaatacagctaaagtatacattgagattcaggatgaaaataatcatcccccagtgtttcagaaaaaattctacatcggaggtgtatctgaagatgcaagaatgtttacttctgtactcagagtgaaggctactgataaagatactggcaattatagtgtcatggcctacagactcataataccaccaattaaagagggaaaagaaggatttgtagtggaaacatatacagggcttatcaaaactgctatgctcttccataatatgaggagatcctacttcaagtttcaagttattgcaactgacgactatgggaagggactgagcggcaaagccgatgtactcgtctccgtggtcaatcagctggatatgcaagtcattgtttccaatgtgcctcctactctagtggaaaaaaagatagaagatcttacagagatcttggatcgctatgttcaggaacaaattcctggtgccaaggtcgtagtggagtccattggagctcgccggcatggagatgccttttccctagaagattacaccaaatgtgacttgactgtctatgcaattgacccccaaaccaacagagccatcgatagaaatgagctttttaaatttttggatggcaaactacttgatatcaataaagactttcagccgtattatggggaaggaggacgcattctggagatccggactccagaggcagtgaccagcattaaaaagagaggagaaagtctaggatacacagaaggggccttgttggctctggccttcatcatcatcctctgctgcattcctgccatcttggtggttttggtcagctacagacagtttaaagtacgtcaagctgagtgtacaaagactgcacgaattcaggccgcattacccgcggctaaaccagcagtgccggctcctgcaccagtggcagcgcccccgccgccgccgccgcctccgccaggtgcgcatctctatgaagaacttggagacagctcaagtcttttccttctctaccattttcaacaaagcaggggaaataactcagtctcagaagacaggaaacatcaacaagttgtgatgcccttttcttccaatactattgaggctcacaagtcagctcatgtagacggatcacttaagagcaacaaactgaagtctgcaagaaaattcacatttctatctgatgaggatgacttaagtgcccataatcccctttataaggaaaacataagtcaagtatcaacaaattcagacatttcacagagaacagattttgtagacccattttcacccaaaatacaagccaagagtaagtctctgaggggcccaagagaaaagattcagaggctgtggagtcagtcagtcagcttacccaggaggctgatgaggaaagttccaaatagaccagagatcatagatctgcagcagtggcaaggcaccaggcagaaagctgaaaatgaaaacactggaatctgtacaaacaaaagaggtagcagcaatccattgcttacaactgaagaggcaaatttgacagagaaagaggaaataaggcaaggtgaaacactgatgatagaaggaacagaacagttgaaatctctctcttcagactcttcattttgctttcccaggcctcacttctcattctccactttgccaactgtttcaagaactgtggaactcaaatcagaacctaatgtcatcagttctcctgctgagtgttccttggaactttctccttcaaggccttgtgttttacattcttcactctctaggagagagacacctatttgtatgttacctattgaaaccgaaagaaatatttttgaaaattttgcccatccaccaaacatctctccttctgcctgtccccttccccctcctcctcctatttctcctccttctcctcctcctgctcctgctcctcttgctcctcctcctgacatttctcctttttctcttttttgtcctcctccctctcctccttctatccctcttcctcttcctcctcctacattttttccactttccgtttcaacgtctggtcccccaacaccacctcttctacctccatttccaactcctcttcctccaccacctccttctattccttgccctccacctccttcagcttcatttctgtccacagagtgtgtctgtataacaggtgttaaatgcacgaccaacttgatgcctgccgagaaaattaagtcctctatgacacagctatcaacaacgacagtgtgtaaaacagaccctcagagagaaccaaaaggcatcctcagacacgttaaaaacttagcagaacttgaaaaatcagtagctaacatgtacagtcaaatagaaaaaaactatctacgcacaaatgtttcagaacttcaaactatgtgcccttcagaagtaacaaatatggaaatcacatctgaacaaaacaaggggagtttgaacaatattgtcgagggaactgaaaaacaatctcacagtcaatctacttcactgtaatgttgcttttcttattttagtcgggcaaacctcttgttgatcatagtcttcaagttgaacatcaaatttgaacgtcaaagaagactctattattttaccccaaattcaatgaaatgcagttttttttctcgtttttaatttaaaaagatattaacctcatcactactaactcactcatataatagatttaccttactttttaaaaactacaaagtagcataatttgttctacatttatttgaaaagtaagtaattttaatctcttttttagtgggaatatgtgggcatgaaaattagatacccaacttaaaccaaaggcatgtctatcatgtggatgcagtaacatttacatttagtttttgatcgtagttttatatgaatgttccaagaaaaaagcagactgttacaaataagttaaaactgatatgattgataggttctgttttttcttgaagcctatgtatttggtaagaagaaatactaccgaagtaaaatataatgtacctagattgtaggagatgacagacataaggtatttcaaaataaatctcaggtgctataacatgtagtcatctgttttctgataagaacatcttttactctgacttgcttttatcttagtagtatgcttatggatttagtagtatgcttatggatttgataaatcttatactttttcagttgctgtcttattctctttatttctcattgtgctttcccttcccttctttataatgaaaataaatcttgagtcgttg

SEQ ID NO: 13436 - DNA, 4246 bp, Homo sapiens
ggttccctccggatagccggagacttgggccggccggacgccccttctggcacactccctggggcaggcgctcacgcacgctacaaacacacactcctctttcctccctcgcgcgccctctctcatccttcttcacgaagcgctcactcgcaccctttctctctctctctctctctctaacacgcacgcacactcccagttgttcacactcgggtcctctccagcccgacgttctcctggcacccacctgctccgcggcgccctgcgcgcccccctcggtcgcgccccttgcgctctcggcccagaccgtcgcagctacagggggcctcgagccccggggtgagcgtccccgtcccgctcctgctccttcccatagggacgcgcctgatgcctgggaccggccgctgagcccaaggggaccgaggaggccatggtaggagcgctcgcctgctgcggtgcccgctgaggccatgccggggccccggcgccccgctggctcccgcctgcgcctgctcctgctcctgctgctgccgccgctgctgctgctgctccggggcagccacgcgggcaacctgacggtagccgtggtactgccgctggccaatacctcgtacccctggtcgtgggcgcgcgtgggacccgccgtggagctggccctggcccaggtgaaggcgcgccccgacttgctgccgggctggacggtccgcacggtgctgggcagcagcgaaaacgcgctgggcgtctgctccgacaccgcagcgcccctggccgcggtggacctcaagtgggagcacaaccccgctgtgttcctgggccccggctgcgtgtacgccgccgccccagtggggcgcttcaccgcgcactggcgggtcccgctgctgaccgccggcgccccggcgctgggcttcggtgtcaaggacgagtatgcgctgaccacccgcgcggggcccagctacgccaagctgggggacttcgtggcggcgctgcaccgacggctgggctgggagcgccaagcgctcatgctctacgcctaccggccgggtgacgaagagcactgcttcttcctcgtggaggggctgttcatgcgggtccgcgaccgcctcaatattacggtggaccacctggagttcgccgaggacgacctcagccactacaccaggctgctgcggaccatgccgcgcaaaggccgagttatctacatctgcagctcccctgatgccttcagaaccctcatgctcctggccctggaagctggcttgtgtggggaggactacgttttcttccacctggatatctttgggcaaagcctgcaaggtggacagggccctgctccccgcaggccctgggagagaggggatgggcaggatgtcagtgcccgccaggcctttcaggctgccaaaatcattacatataaagacccagataatcccgagtacttggaattcctgaagcagttaaaacacctggcctatgagcagttcaacttcaccatggaggatgtcctggtgaacaccatcccagcatccttccacgacgggctcctgctctatatccaggcagtgacggagactctggcacatgggggaactgttactgatggggagaacatcactcagcggatgtggaaccgaagctttcaaggtgtgacaggatacctgaaaattgatagcagtggcgatcgggaaacagacttctccctctgggatatggatcccgagaatggtgccttcagggttgtactgaactacaatgggacttcccaagagctggtggctgtgtcggggcgcaaactgaactggcccctggggtaccctcctcctgacatccccaaatgtggctttgacaacgaagacccagcatgcaaccaagatcacctttccaccctggaggtgctggctttggtgggcagcctctccttgctcggcattctgattgtctccttcttcatatacaggaagatgcagctggagaaggaactggcctcggagctgtggcgggtgcgctgggaggacgttgagcccagtagccttgagaggcacctgcggagtgcaggcagccggctgaccctgagcgggagaggctccaattacggctccctgctaaccacagagggccagttccaagtctttgccaagacagcatattataagggcaacctcgtggctgtgaaacgtgtgaaccgtaaacgcattgagctgacacgaaaagtcctgtttgaactgaagcatatgcgggatgtgcagaatgaacacctgaccaggtttgtgggagcctgcaccgacccccccaatatctgcatcctcacagagtactgtccccgtgggagcctgcaggacattctggagaatgagagcatcaccctggactggatgttccggtactcactcaccaatgacatcgtcaagggcatgctgtttctacacaatggggctatctgttcccatgggaacctcaagtcatccaactgcgtggtagatgggcgctttgtgctcaagatcaccgactatgggctggagagcttcagggacctggacccagagcaaggacacaccgtttatgccaaaaagctgtggacggcccctgagctcctgcgaatggcttcaccccctgtgcggggctcccaggctggtgacgtatacagctttgggatcatccttcaggagattgccctgaggagtggggtcttccacgtggaaggtttggacctgagccccaaagagatcatcgagcgggtgactcggggtgagcagccccccttccggccctccctggccctgcagagtcacctggaggagttggggctgctcatgcagcggtgctgggctgaggacccacaggagaggccaccattccagcagatccgcctgacgttgcgcaaatttaacagggagaacagcagcaacatcctggacaacctgctgtcccgcatggagcagtacgcgaacaatctggaggaactggtggaggagcggacccaggcatacctggaggagaagcgcaaggctgaggccctgctctaccagatcctgcctcactcagtggctgagcagctgaagcgtggggagacggtgcaggccgaagcctttgacagtgttaccatctacttcagtgacattgtgggtttcacagcgctgtcggcggagagcacgcccatgcaggtggtgaccctgctcaatgacctgtacacttgctttgatgctgtcatagacaactttgatgtgtacaaggtggagacaattggcgatgcctacatggtggtgtcagggctccctgtgcggaacgggcggctacacgcctgcgaggtagcccgcatggccctggcactgctggatgctgtgcgctccttccgaatccgccaccggccccaggagcagctgcgcttgcgcattggcatccacacaggacctgtgtgtgctggagtggtgggactgaagatgccccgttactgtctctttggggatacagtcaacacagcctcaagaatggagtctaatggggaagccctgaagatccacttgtcttctgagaccaaggctgtcctggaggagtttggtggtttcgagctggagcttcgaggggatgtagaaatgaagggcaaaggcaaggttcggacctactggctccttggggagagggggagtagcacccgaggctgacctgcctcctctcctatccctccacacctcccctaccctgtgccagaagcaacagaggtgccaggcctcagcctcacccacagcagccccatcgccaaaggatggaagtaatttgaatagctcaggtgtgcttaccccagtgaagacaccagataggacctctgagaggggactggcatggggggatctcagagcttacaggctgagccaagcccacggccatgcacagggacactcacacaggcacacgcacctgctctccacctggactcaggccgggctgggctgtggattcctgatcccctcccctccccatgctctcctccctcagccttgctaccctgtgacttactgggaggagaaagagtcacctgaaggggaacatgaaaagagactaggtgaagagagggcaggggagcccacatctggggctggcccacaatacctgctcccccgaccccctccacccagcagtagacacagtgcacaggggagaagaggggtggcgcagaagggttgggggcctgtatgccttgcttctaccatgagcagagacaattaaaatctttattccaaaaaaaaaaaaaaaa

SEQ ID NO: 13437 - DNA, 2134 bp, Homo sapiens
gaggtaggaactgcgccagtcctagacgccagacccgctcagaccctcctgccaggtgacagccgccaagatggggtcttgggccctgctgtggcctcccctgctgttcaccgggctgctcgtccgacccccggggaccatggcccaggcccagtactgctctgtgaacaaggacatctttgaagtagaggagaacacaaatgtcaccgagccgctggtggacatccacgtcccggagggccaggaggtgaccctcggagccttgtccaccccctttgcatttcggatccagggaaaccagctgtttctcaacgtgactcctgattacgaggagaagtcactgcttgaggctcagctgctgtgtcagagcggaggcacattggtgacccagctaagggtgttcgtgtcagtgctggacgtcaatgacaatgcccccgaattcccctttaagaccaaggagataagggtggaggaggacacgaaagtgaactccaccgtcatccccgagacgcaactgcaggctgaggaccgcgacaaggacgacattctgttctacaccctccaggaaatgacagcaggtgccagtgactacttctccctggtgagtgtaaaccgtcccgccctgaggctggaccggcccctggacttctacgagcggccgaacatgaccttctggctgctggtgcgggacactccgggggagaatgtggaacccagccacactgccaccgccacactagtgctgaacgtggtgcccgccgacctgcggcccccgtggttcctgccctgcaccttctcagatggctacgtctgcattcaagctcagtaccacggggctgtccccacggggcacatactgccatctcccctcgtcctgcgtcccggacccatctacgctgaggacggagaccgcggcatcaaccagcccatcatctacagcatctttaggggaaacgtgaatggtacattcatcatccacccagactcgggcaacctcaccgtggccaggagtgtccccagccccatgaccttccttctgctggtgaagggccaacaggccgaccttgcccgctactcagtgacccaggtcaccgtggaggctgtggctgcggccgggagcccgccccgcttcccccagagcctgtatcgtggcaccgtggcgcgtggcgctggagcgggcgttgtggtcaaggatgcagctgccccttctcagcctctgaggatccaggctcaggacccggagttctcggacctcaactcggccatcacatatcgaattaccaaccactcacacttccggatggagggagaggttgtgctgaccaccaccacactggcacaggcgggagccttctacgcagaggttgaggcccacaacacggtgacctctggcaccgcaaccacagtcattgagatacaagtttccgaacaggagcccccctccacaggtggcggcccctcggaggacaagcgcttctcggtggtggatatggcggccctgggcggggtgctgggtgcgctgctgctgctggctctccttggcctcgccgtccttgtccacaagcactatggcccccggctcaagtgctgctctggcaaagctccggagccccagccccaaggctttgacaaccaggcgttcctccctgaccacaaggccaactgggcgcccgtccccagccccacgcacgaccccaagcccgcggaggcaccgatgcccgcagagcccgcaccccccggccctgcctccccaggcggtgcccctgagccccccgcagcggcccgagctggcggaagccccacggcggtgaggtccatcctgaccaaggagcggcggccagagggcgggtacaaggctgtctggtttggcgaggacatcgggacggaggcagacgtggtcgttctcaacgcgcccaccctggacgtggatggcgccagtgactccggcagcggcgatgagggcgagggcgcggggaggggtgggggtccctacgatgcgcccggtggtgatgactcctacatctaagtggcccctccaccctctcccccagccgcacgggcactggaggtctcgctcccccagcctccgacccgaggcagaataaagcaaggctcccgaaaaaaaaaaaaaaaa

SEQ ID NO: 13438 - DNA, 2973 bp, Homo sapiens
attctggggctcgggggatcccggacaccctctcagctcctgcccgggggcccatgtagtcccttctgccctgtgcctcggtgcctgtgacctgagccccttggttgaccctgcactcgtccaacttgggccaaacgactgcccctccttctggcagtgggctggaccagccggccagcgggagcccccttggcagaagccggtcgtaaaggatcataaactggcggcgtctggctggggcgaaggtcgctgaggtaggaactgcgccagtcctagacgccagacccgctcagaccctcctgccaggtgacagccgccaagatggggtcttgggccctgctgtggcctcccctgctgttcaccgggctgctcgtccgacccccggggaccatggcccaggcccagtactgctctgtgaacaaggacatctttgaagtagaggagaacacaaatgtcaccgagccgctggtggacatccacgtcccggagggccaggaggtgaccctcggagccttgtccaccccctttgcatttcggatccagggaaaccagctgtttctcaacgtgactcctgattacgaggagaagtcactgcttgaggctcagctgctgtgtcagagcggaggcacattggtgacccagctaagggtgttcgtgtcagtgctggacgtcaatgacaatgcccccgaattcccctttaagaccaaggagataagggtggaggaggacacgaaagtgaactccaccgtcatccccgagacgcaactgcaggctgaggaccgcgacaaggacgacattctgttctacaccctccaggaaatgacagcaggtgccagtgactacttctccctggtgagtgtaaaccgtcccgccctgaggctggaccggcccctggacttctacgagcggccgaacatgaccttctggctgctggtgcgggacactccgggggagaatgtggaacccagccacactgccaccgccacactagtgctgaacgtggtgcccgccgacctgcggcccccgtggttcctgccctgcaccttctcagatggctacgtctgcattcaagctcagtaccacggggctgtccccacggggcacatactgccatctcccctcgtcctgcgtcccggacccatctacgctgaggacggagaccgcggcatcaaccagcccatcatctacagcatctttaggggaaacgtgaatggtacattcatcatccacccagactcgggcaacctcaccgtggccaggagtgtccccagccccatgaccttccttctgctggtgaagggccaacaggccgaccttgcccgctactcagtgacccaggtcaccgtggaggctgtggctgcggccgggagcccgccccgcttcccccagagcctgtatcgtggcaccgtggcgcgtggcgctggagcgggcgttgtggtcaaggatgcagctgccccttctcagcctctgaggatccaggctcaggacccggagttctcggacctcaactcggccatcacatatcgaattaccaaccactcacacttccggatggagggagaggttgtgctgaccaccaccacactggcacaggcgggagccttctacgcagaggttgaggcccacaacacggtgacctctggcaccgcaaccacagtcattgagatacaagtttccgaacaggagcccccctccacagatgtccccccatccccagaggctggaggaacaactgggccctggaccagcaccacttccgaggtccccagaccccctgagccctcccagggaccctccacgaccagctctgggggaggcacaggccctcatccaccctctggcacaactctgaggccaccaacctcgtccacacccggggggtccccgggtgcagaaaacagcacctcccaccaaccagccactcccggtggggacacagcacagaccccaaagccaggaacctctcagccgatgccccccggtgtgggaaccagcacctcccaccaaccagccacacccagtgggggcacagtacagaccccagagccaggaacctctcagccgatgccccccagtatgggaaccagcacctcccaccaaccagccacacccggtgggggcacagcacagaccccagaggcaggaacctctcagccgatgccccccggtatgggaaccagcacctcccaccaaccaaccacacccggtgggggcacagcacagaccccagagccaggaacctctcagccgatgcccctcagcaagagcaccccatcttcaggtggcggcccctcggaggacaagcgcttctcggtggtggatatggcggccctgggcggggtgctgggtgcgctgctgctgctggctctccttggcctcgccgtccttgtccacaagcactatggcccccggctcaagtgctgctctggcaaagctccggagccccagccccaaggctttgacaaccaggcgttcctccctgaccacaaggccaactgggcgcccgtccccagccccacgcacgaccccaagcccgcggaggcaccgatgcccgcagagcccgcaccccccggccctgcctccccaggcggtgcccctgagccccccgcagcggcccgagctggcggaagccccacggcggtgaggtccatcctgaccaaggagcggcggccagagggcgggtacaaggctgtctggtttggcgaggacatcgggacggaggcagacgtggtcgttctcaacgcgcccaccctggacgtggatggcgccagtgactccggcagcggcgatgagggcgagggcgcggggaggggtgggggtccctacgatgcgcccggtggtgatgactcctacatctaagtggcccctccaccctctcccccagccgcacgggcactggaggtctcgctcccccagcctccgacccgaggcagaataaagcaaggctcccgaaacccaaaaaaaaaaaaaaaa

SEQ ID NO: 13439 - DNA, 11344 bp, Homo sapiens
ctcttacctgccaacctgggaggttgatgatgaacatgtctttaccttttctttggagtttgcttaccttattaatatttgctgaagtaaatggcgaacgtggagaacttgagctgcagagacaaaaaagaagcatcaatctccaacagcctcgaatggctacagagagaggaaatttggtgtttcttacggggtctgctcaaaacattgagtttagaaccggatccctgggaaaaattaaattaaatgatgaagatctcagtgagtgtttacatcagatccagaaaaacaaagaagatattatagagttaaaagggagcgcaattggtctgcctcaaaatatatctagtcaaatctatcagcttaattccaagctggtggatcttgagagaaaattccaaggcttgcagcagactgttgacaaaaaggtttgcagcagcaatccttgccagaatggtgggaactgcctcaatctgcatgattcctttttttgtatctgtcccccacagtggaagggtcctctctgctcagctgatgttaacgaatgtgagatttactcaggaacacccttgagctgccagaatggaggcacatgtgttaatacaatgggaagttacagttgtcactgcccacctgagacgtacggaccccagtgtgcatccaaatatgacgactgtgaagggggttctgtggcacgctgtgtccatggcatctgtgaggatttaatgcgagagcaagctggagagcccaagtacagctgcgtctgtgatgctgggtggatgtcttcacccaacagccctgcctgcacgctggacagagacgagtgcagcttccagcccgggccttgctccacacttgtgcagtgtttcaacactcaaggctctttctactgtggggcctgtccaacaggctggcaaggcaatggatatatttgcgaagatatcaatgaatgtgagataaataatggcggctgttctgtggctccacccgttgagtgtgtgaatacacctgggtcttcccactgccaggcctgtccaccagggtaccagggtgacggaagagtgtgcacactcacagacatctgctcagtcagtaatggaggctgccacccagatgcctcatgctcctcaactctaggttccttacctctctgcacgtgtctcccgggttatactggaaatggttatgggccaaatggatgtgtgcagctcagtaatatttgcctaagtcacccctgtctaaatggacaatgcatcgacactgtctctggttatttttgtaagtgtgactcaggttggacaggtgtcaactgtacagaaaacatcaatgagtgtttgagcaacccctgtttgaatggaggaacttgtgttgatggcgttgattctttcagttgtgaatgcacacgtctctggactggagctctctgtcaggttcctcagcaagtttgtggagagtccctctcaggaataaatggaagcttcagctacaggagcccggatgttggttatgttcatgatgttaactgcttctgggttatcaaaactgaaatgggaaaggtcctgcgtatcactttcacttttttccggttagaatccatggacaactgtccacacgagtttcttcaggtttatgatggagattcctcttctgcttttcaacttggaagattttgtggctccagcctccctcatgaactcctcagcagtgacaatgctctctattttcatctctattctgaacatttaagaaatgggagaggctttacagtaagatgggaaacacagcaaccagagtgtggaggtatcctgactggtccttacggttctattaagtctccggggtatcctggaaactatcccccaggaagagattgtgtctggattgttgtaactagtcctgacctcctggtaacatttacttttgggaccttgagcctcgagcaccatgatgactgcaacaaagattaccttgagattcgagatggtcctttgtatcaggacccccttcttgggaagttctgcaccactttctctgtcccaccgctccagactactggcccctttgccagaattcacttccattcagactcccagattagtgaccaaggcttccatatcacctacttaacatcaccttcggatctgcgttgtggtgggaactacacggacccagagggtgaactcttcttgcctgagttgtctgggcctttcactcacaccaggcaatgcgtctatatgatgaagcagccccagggagaacaaatacaaatcaacttcacccacgtggagctgcaatgccagagtgacagttctcagaattacattgaggttcgagatggtgaaaccttacttggaaaagtctgtggcaacggaaccatctctcacattaaatccattactaatagtgtctggatcaggtttaaaatagatgcttctgttgaaaaagctagtttcagagctgtttatcaagtcgcttgcggggatgaattaactggagaaggggtcattcgctcgcctttttttcctaacgtgtatcctggagaaagaacctgtaggtggaccatccaccagccccaaagccaagtcattctcctcaacttcactgtctttgaaattggaagttctgcccactgtgaaacagattatgttgagattggtagcagttccattttgggttctcctgaaaataaaaagtattgcggtacagacataccttcatttataacatctgtgtacaattttctttatgtcacattcgtgaaaagttcttctactgaaaaccatggtttcatggctaagttcagtgctgaggatttggcatgtggagaaattcttacagaatcaacagggaccattcaaagtcctggccatccaaatgtctacccccacggtatcaactgtacttggcatatattagtccaacctaatcacctgattcatttaatgttcgaaacatttcatctggagtttcattacaattgcacaaacgactacttggaagtttatgacaccgactctgagacatcccttggaagatactgtggaaagtcgatcccgccatctctcacaagcagtggtaactcattgatgctggtgtttgtgactgactccgacctcgcttatgaaggcttcttaataaactatgaagcaatcagtgcagcaacagcatgtttgcaagactacacagatgatttggggacattcacttctccaaacttccccaataattatcccaacaactgggaatgcatttatcggatcacagtgagaactggccaactgattgcagtgcacttcacaaacttctccttggaggaagccattggaaactattatacagattttctggaaatcagagatggaggctatgaaaaatcaccattgctgggaatattctatggctcaaatctacccccaacaatcatctctcatagtaacaaactatggttaaaatttaagagtgaccaaatagacacaaggtctggattctcagcttactgggatgggtcatcaacaggttgcgggggtaatctcaccacttcaagcggtacgttcatatctcccaactacccgatgccctattaccacagctctgaatgctactggtggttgaaatctagccacggcagcgcatttgaactggaattcaaagactttcacttggagcatcatccaaactgcactttagattacctggctgtatatgatggcccaagtagcaactctcatctgctaactcagctttgtggggatgagaaaccccctcttattcgttctagtggagacagcatgtttataaaactgaggacagatgaaggtcagcaaggacgtggcttcaaggctgaataccggcagacatgtgagaatgtggtaatagtcaatcaaacctatggcatcttagagagtatagggtatccgaatccttattctgaaaatcagcattgcaactggaccatccgggcaacaacaggcaacactgtgaactacacatttttagcatttgacttggaacatcacataaactgctccacagattatttagagctctatgatggaccacggcagatgggacgctactgtggagtagacctgccccctccagggagtactacaagctccaagcttcaagtgctgctccttacagatggggttggccgccgtgagaaaggatttcagatgcagtggtttgtttacggttgtggtggagagctgtctggggccacaggctccttcagcagccccgggttccccaacaggtatccaccaaacaaggagtgtatctggtacattaggacggaccccgggagtagcattcagctcaccatccatgacttcgatgtggagtatcattcaaggtgcaactttgatgtcttggagatctatggaggccccgatttccactctcccagaatagcccaactgtgtacccagagatcacctgagaaccccatgcaggtctccagcactggaaatgagctagcaattcgattcaagaccgacttgtccataaatgggagaggcttcaatgcgtcatggcaagcagtcactggaggttgtggtgggattttccaggctcccagtggagagattcattctccaaattaccccagtccttataggagcaacacagactgttcttgggtcattcgggttgacagatatcatcgtgttctcttgaacttcactgactttgatcttgaaccacaagactcttgtattatggcatacgatggcttaagctccacaatgtcccgccttgccaggacgtgtggaagggagcagctggctaaccccatcgtctcctcaggaaacagcctcttcttgagatttcagtctggcccttccagacagaacagaggcttccgagctcaattcaggcaagcctgcggaggccacatcctcaccagctcatttgatactgtttcctctccacggttccctgccaattatccaaacaatcagaactgcagctggatcattcaagcgcaacctccattaaatcatatcaccctctcttttacccactttgaacttgaaagaagcacaacgtgtgcacgtgactttgtagaaattttggatggcggccacgaagacgcgcccctccgaggccgttactgtggcaccgacatgccccatcctatcacatccttcagcagcgccctgacgctgagattcgtctctgattctagcatcagtgctgggggtttccacaccacggtcaccgcatcagtgtcggcttgtggtggaacgttctacatggctgaaggcatcttcaacagccctggctacccagacatttatccccctaatgtggaatgtgtctggaacatcatcagttcccctggcaaccggctccagctgtcttttatatctttccagttggaagactctcaggactgcagcagagattttgtggagatccgtgaaggaaatgccacgggtcacttggtgggacgatactgtggaaactccttccctctcaattattcttccatcgttggacataccctgtgggtcagatttatctcagatggttctggcagcggcacgggcttccaggccacatttatgaagatatttggcaatgataatattgtgggaactcatgggaaagtcgcctctcctttctggcctgaaaactacccacataactccaattaccaatggacagtaaatgtgaatgcatctcacgttgtccatggtagaatcttggagatggacatagaagaaatacaaaactgctattatgacaaattaaggatctatgatgggcctagcattcacgcccgcctaattggagcttactgtggtacccagactgaatctttcagctccactggaaattctttgacatttcatttttactccgactcttcaatctcggggaagggattccttctggagtggtttgcagtggatgcacctgatggtgttttacctaccattgctccaggtgcttgtggtggcttcctgaggacgggagatgcacccgtgtttctcttctccccgggctggcctgacagttacagtaatagagtggactgtacgtggctcatccaggctcccgactctaccgtggaactcaacattctttccctggacattgaatctcaccgaacgtgtgcctatgatagccttgtgatacgagatggagataataacttggcccagcagctagcagttctctgtggcagagagatccctgggcccatccggtctactggagagtacatgttcatccgcttcacctcggactccagtgtaaccagggcaggcttcaatgcatcctttcacaagagctgcggtggatatttgcatgcagacagagggatcatcacgtcccccaagtatccagagacttacccatccaacctcaactgttcttggcacgtcctggtccaaagtggcctgaccattgctgtccattttgaacagcctttccagattccaaatggagattcttcttgcaaccagggggattacttggtgctaagaaatggtcctgatatctattctccacccttgggaccccctggaggaaatggtcatttttgtggcagtcatgcttcatcaactctgttcacctcggataatcaaatgtttgttcagtttatttctgatcacagtaatgaagggcaaggatttaaaatcaaatatgaggcaaagagtttagcctgtgggggcaacgtctacatccatgatgctgattctgctgggtatgtgacctcccccaaccaccctcataattatcccccgcacgctgattgcatttggatcttagcggctccaccggaaacacgcatacagctgcaatttgaagatcgattcgatattgaagtaacacccaactgtacttccaactaccttgagttgcgggatggagtggattcggatgcaccaatactttccaaattttgtgggacatctttgcccagcagtcagtggtcctcaggagaggttatgtatttgagatttcgatctgacaacagccccacacatgtgggattcaaggccaagtattctatagctcagtgtgggggaagagtaccagggcaaagtggtgttgttgaaagcattggacatccaacacttccatacagagacaacttattctgtgagtggcatctccaggggctctctggacactatctcaccatctcttttgaagactttaaccttcagaattcttctggctgtgaaaaagacttcgtggagatctgggacaatcatacctctggaaacatcttgggcagatactgtggaaacaccattcctgacagcatagacacttctagcaatactgctgtggtcaggtttgtcacagacggctctgtgactgcctcaggattcagactgcgatttgaatccagtatggaagagtgtggtggggatcttcagggctctattggaacatttacttctcccaactacccgaacccaaatcctcatggccggatctgcgagtggagaatcactgccccggagggaaggcggatcaccctaatgtttaacaacctgaggctggccacgcatccgtcctgcaacaatgagcatgtgatagtattcaatggcattagaagtaactcaccccagctagagaaactgtgtagtagtgtgaatgtaagcaatgagattaaatcttcaggaaacacaatgaaagtcatttttttcacggatggatccaggccatatggcggcttcactgcttcctatacctccagtgaagatgcagtgtgtggtgggtctcttccaaatactcctgaaggaaactttacttctcctggctatgacggagtcaggaattactcaagaaacctgaactgcgaatggactctcagcaatccaaatcagggaaattcatccatttccattcactttgaagatttttacctagaaagtcaccaagactgtcaatttgatgtcctcgagtttcgagtgggtgatgctgatgggcccctgatgtggagactttgtggtccttcaaagcctacattgccattggttataccttattctcaggtatggattcactttgtcaccaacgaacgtgtagaacacattggattccatgcaaagtattcctttacagattgtggcggaatacagataggtgacagtggagtgatcacaagccccaactatccaaatgcttatgacagcctgacccactgctcttggctgttggaggccccacaagggcacaccatcactctcacatttagtgactttgatattgaaccccatacaacttgtgcttgggactctgtcactgtcaggaatggtgggtcccctgaatcacccatcataggacaatactgtggaaattcaaaccccaggacaatacagtcaggttccaatcagctggtcgtgacttttaactcagaccattcattgcaaggtggtggattttatgctacgtggaacacacaaactttaggttgtggtggaatatttcattctgataatggtacaatcagatcccctcactggcctcagaattttcccgaaaacagcagatgttcctggacggccattactcacaaaagtaaacacttggagatcagctttgacaacaacttcctaatccccagcggtgatggacaatgtcagaatagcttcgtgaaggtgtgggcaggaactgaggaggtggacaaagccctgctagccactggctgtgggaacgtggctccgggtcccgttatcacaccaagtaacacattcactgccgtcttccagtctcaggaggcaccagctcagggcttctccgcgtcctttgttagccgatgtggaagtaatttcactggcccttcaggttacatcatttctccaaattacccaaaacaatatgacaacaacatgaattgcacctatgtcatagaggctaatcctctgtcagtggtcctcttgacttttgtgtccttccacttagaagctcgttccgctgtgacgggaagctgtgtcaacgatggcgtgcacattatcagaggttacagcgtcatgtccaccccatttgctactgtgtgtggggatgagatgccagctcccctcaccatcgctgggccggttctgcttaacttctactccaacgagcaaatcacagacttcggattcaagttttcctataggataatctcctgtggtggtgtgttcaatttctcttctggaatcatcacaagtcctgcctattcatacgcagactacccaaatgatatgcactgtctgtataccatcaccgttagtgacgacaaggtgatcgagctcaagttcagtgattttgatgtggttccctccacctcctgctcccatgactacctggcaatttacgatggtgccaataccagcgatccccttcttggcaaattctgcggttccaagcgcccaccaaatgtgaagagcagcaataatagtatgctcctggtgttcaagacagattcatttcagacagcaaaaggctggaagatgtctttccggcagacattggggcctcagcaaggatgtggtggttatctgacaggctcgaataatacctttgcctctcctgattctgattcgaatggaatgtatgacaagaatttaaactgtgtatggatcataattgcacctgtaaacaaagtaattcacctcaccttcaatacatttgctctggaggcagcaagtactaggcaaagatgcctttatgattatgtaaagttatatgatggggatagtgaaaatgcgaacttggctggaacgttttgtggttccacagtacctgctccttttatctcttctggtaacttccttacggttcaattcatcagtgacttaacattagagagggaaggatttaatgctacatacaccatcatggacatgccttgtggtggaacgtacaatgcaacttggaccccacaaaatatttcatcacccaattcatcagacccagatgtcccattttccatctgtacttgggtcattgattcccctccgcatcagcaggtcaagataactgtgtgggcattacagctgacctcgcaagactgcacgcagaattacttacagcttcaggactcaccgcagggtcacggaaattcaagatttcagttctgtggcagaaatgcttcggctgtgccagtgttttattcttctatgagtactgcaatggtcattttcaaatctggagttgtaaacagaaactctagaatgagtttcacctatcagattgcagattgcaacagagactatcacaaggcatttggcaacctgagaagccctggatggccagataactacgacaatgacaaggattgcaccgttactctcacagccccccagaaccacaccatttccctcttttttcattcacttggcatcgagaactcagttgaatgcagaaacgatttcttggaggtgagaaatggaagtaacagcaattcaccattactgggcaagtactgtggaactctgctgccaaaccctgtcttctctcaaaataatgaactatacctacgatttaagagtgatagtgtaacttctgatcgtggatatgaaatcatctggacttcatcaccctctggatgtggtggaactctttatggagacagaggctcattcaccagccccggctatccaggcacatacccaaacaacacgtactgcgagtgggtccttgttgctcctgctggaaggcttgtcaccatcaacttctacttcatcagcattgacgatccaggagactgtgtccagaactatctcacactctatgatgggcccaacgccagctctccatcctctggaccatactgcggaggcgacaccagcatagctcccttcgtggcttcctcaaatcaggtcttcataaaatttcatgctgattatgcacggcgtccatccgcattccgattaacttgggacagctaagtgggtaacaactcgtgttcactcagcactttccctctgcagcacgctggacagcactctgccatcctgatacatgacccctgctgatgccacagagaataagctgaacttgtatggtttttcaccaaaccatggatagaatcaatatttgtaggccaggcgtggtggctcacccccctgtattctcagcactttgggaggccgaggcaggttgatcacctgaggtcaggagtttgagactagcctggccagcatggtgaaacctcatccctctaacaatataataattagccaggcgtggtggtgggtgcctgtaattccagccactcgagaggctgaggcaggagaattgcttgaacccaggaggcagaggttgcagtgagctaagatcacaccactacactccagcctgggcgagacggcaagactccatctcaaaaaaaaaa

SEQ ID NO: 13440 - DNA, 2794 bp, Homo sapiens
cagaaagccatgtcggactcggcgcccagcgcccaagcgctaacccgctgaaagtttctcagcgaaatctcagggacgatctggaccccgctgagaggaactgcttttgagtgagatggtcccagaggcctggaggagcggactggtaagcaccgggagggtagtgggagttttgcttctgcttggtgccttgaacaaggcttccacggtcattcactatgagatcccggaggaaagagagaagggtttcgctgtgggcaacgtggtcgcgaaccttggtttggatctcggtagcctctcagcccgcaggttccgggtggtgtctggagctagccgaagattctttgaggtgaaccgggagaccggagagatgtttgtgaacgaccgtctggatcgagaggagctgtgtgggacactgccctcttgcactgtaactctggagttggtagtggagaacccgctggagctgttcagcgtggaagtggtgatccaggacatcaacgacaacaatcctgctttccctacccaggaaatgaaattggagattagcgaggccgtggctccggggacgcgctttccgctcgagagcgcgcacgatcccgatgtgggaagcaactctttacaaacctatgagctgagccgaaatgaatactttgcgcttcgcgtgcagacgcgggaggacagcaccaagtacgcggagctggtgttggagcgcgccctggaccgagaacgggagcctagtctccagttagtgctgacggcgttggacggagggaccccagctctctccgccagcctgcctattcacatcaaggtgctggacgcgaatgacaatgcgcctgtcttcaaccagtccttgtaccgggcgcgcgtcctggaggatgcaccctccggcacgcgcgtggtacaagtccttgcaacggatctggatgaaggccccaacggtgaaattatttactccttcggcagccacaaccgcgccggcgtgcggcaactattcgccttagaccttgtaaccgggatgctgacaatcaagggtcggctggacttcgaggacaccaaactccatgagatttacatccaggccaaagacaagggcgccaatcccgaaggagcacattgcaaagtgttggtggaggttgtggatgtgaatgacaacgccccggagatcacagtcacctccgtgtacagcccagtacccgaggatgcccctctggggactgtcatcgctttgctcagtgtgactgacctggatgctggcgagaacgggctggtgacctgcgaagttccaccgggtctccctttcagccttacttcttccctcaagaattacttcactttgaaaaccagtgcagacctggatcgggagactgtgccagaatacaacctcagcatcaccgcccgagacgccggaaccccttccctctcagcccttacaatagtgcgtgttcaagtgtccgacatcaatgacaaccctccacaatcttctcaatcttcctacgacgtttacattgaagaaaacaacctccccggggctccaatactaaacctaagtgtctgggaccccgacgccccgcagaatgctcggctttctttctttctcttggagcaaggagctgaaaccgggctagtgggtcgctatttcacaataaatcgtgacaatggcatagtgtcatccttagtgcccctagactatgaggatcggcgggaatttgaattaacagctcatatcagcgatgggggcaccccggtcctagccaccaacatcagcgtgaacatatttgtcactgatcgcaatgacaatgccccccaggtcctatatcctcggccaggtgggagctcggtggagatgctgcctcgaggtacctcagctggccacctagtgtcacgggtggtaggctgggacgcggatgcagggcacaatgcctggctctcctacagtctcttgggatcccctaaccagagcctttttgccatagggctgcacactggtcaaatcagtactgcccgtccagtccaagacacagattcacccaggcagactctcacggtcttgatcaaagacaatggggagccttcgctctccaccactgctaccctcactgtgtcagtaaccgaggactctcctgaagcccgagccgagttcccctctggctctgccccccgggagcagaaaaaaaatctcaccttttatctacttctttctctaatcctggtttctgtggggtttgtggtcacagtgttcggagtaatcatattcaaagtttacaagtggaagcagtctagagacctataccgagccccggtgagctcactgtaccgaacaccagggccctccttgcacgcggacgccgtgcggggaggcctgatgtcgccgcacctttaccatcaggtgtatctcaccacggactcccgccgcagcgacccgctgctgaagaaacctggtgcagccagtccactggccagccgccagaacacgctgcggagctgtgatccggtgttctataggcaggtgttgggtgcagagagcgcccctcccggacaggtaaggtttagcaagtcatgcttgaccctgttagtgcttttttattcctacatcatattgaggaaggaatggagctgtttttttagtgatgaagatgttttcctggtgatgcattcacactttcaactggcccttcctagatcaaagttagtgcctttgtgagatggtggcctgccagagtgtggtttgtggtcccatttcagggggaagatacttgactcatctgtggacctaattcacatcctcagc

SEQ ID NO: 13441 - DNA, 1990 bp, Homo sapiens
caaggagccatgccagctggacacacacttcttccagggcctctggcagccaggacagagttgagaccacagctgttgagaccctgagccctgagtctgtattgctcaagaagggccttccccagcaatgacctcctcattgcttctggcctttctcctcctggctccaaccacagtggccactcccagagctggcggtcagtgtccagcatgtggggggcccaccttggaactggagagccagcgggagctgcttcttgatctggccaagagaagcatcttggacaagctgcacctcacccagcgcccaacactgaaccgccctgtgtccagagctgctttgaggactgcactgcagcacctccacggggtcccacagggggcacttctagaggacaacagggaacaggaatgtgaaatcatcagctttgctgagacaggcctctccaccatcaaccagactcgtcttgattttcacttctcctctgatagaactgctggtgacagggaggtccagcaggccagtctcatgttctttgtgcagctcccttccaataccacttggaccttgaaagtgagagtccttgtgctgggtccacataataccaacctcaccttggctactcagtacctgctggaggtggatgccagtggctggcatcaactccccctagggcctgaagctcaagctgcctgcagccaggggcacctgaccctggagctggtacttgaaggccaggtagcccagagctcagtcatcctgggtggagctgcccataggccttttgtggcagcccgggtgagagttgggggcaaacaccagattcaccgacgaggcatcgactgccaaggagggtccaggatgtgctgtcgacaagagttttttgtggacttccgtgagattggctggcacgactggatcatccagcctgagggctacgccatgaacttctgcatagggcagtgcccactacacatagcaggcatgcctggtattgctgcctcctttcacactgcagtgctcaatcttctcaaggccaacacagctgcaggcaccactggagggggctcatgctgtgtacccacggcccggcgccccctgtctctgctctattatgacagggacagcaacattgtcaagactgacatacctgacatggtagtagaggcctgtgggtgcagttagtctatgtgtggtatgggcagcccaaggttgcatgggaaaacacgcccctacagaagtgcacttccttgagaggagggaatgacctcattctctgtccagaatgtggactccctcttcctgagcatcttatggaaattaccccacctttgacttgaagaaaccttcatctaaagcaagtcactgtgccatcttcctgaccactaccctctttcctagggcatagtccatcccgctagtccatcccgctagccccactccagggactcagacccatctccaaccatgagcaatgccatctggttcccaggcaaagacacccttagctcacctttaatagaccccataacccactatgccttcctgtcctttctactcaatggtccccactccaagatgagttgacacaaccccttcccccaatttttgtggatctccagagaggcccttctttggattcaccaaagtttagatcactgctgcccaaaatagaggcttacctacccccctctttgttgtgagcccctgtccttcttagttgtccaggtgaactactaaagctctctttgcataccttcatccattttttgtccttctctgcctttctctatgcccttaaggggtgacttgcctgagctctatcacctgagctcccctgccctctggcttcctgctgaggtcagggcatttcttatccctgttccctctctgtctaggtgtcatggttctgtgtaactgtggctattctgtgtccctacactacctggctacccccttccatggccccagctctgcctacattctgat

SEQ ID NO: 13442 - DNA, 3662 bp, Homo sapiens
gccaccacgtgtgtccctgcgcccggtggccaccgactcagtccctcgccgaccagtctgggcagcggaggagggtggttggcagtggctggaagcttcgctatgggaagttgttcctttgctctctcgcgcccagtcctcctccctggttctcctcagccgctgtcggaggagagcacccggagacgcgggctgcagtcgcggcggcttctccccgcctgggcggccgcgccgctgggcaggtgctgagcgcccctagagcctcccttgccgcctccctcctctgcccggccgcagcagtgcacatggggtgttggaggtagatgggctcccggcccgggaggcggcggtggatgcggcgctgggcagaagcagccgccgattccagctgccccgcgcgccccgggcgcccctgcgagtccccggttcagccatggggacctctccgagcagcagcaccgccctcgcctcctgcagccgcatcgcccgccgagccacagccacgatgatcgcgggctcccttctcctgcttggattccttagcaccaccacagctcagccagaacagaaggcctcgaatctcattggcacataccgccatgttgaccgtgccaccggccaggtgctaacctgtgacaagtgtccagcaggaacctatgtctctgagcattgtaccaacacaagcctgcgcgtctgcagcagttgccctgtggggacctttaccaggcatgagaatggcatagagaaatgccatgactgtagtcagccatgcccatggccaatgattgagaaattaccttgtgctgccttgactgaccgagaatgcacttgcccacctggcatgttccagtctaacgctacctgtgccccccatacggtgtgtcctgtgggttggggtgtgcggaagaaagggacagagactgaggatgtgcggtgtaagcagtgtgctcggggtaccttctcagatgtgccttctagtgtgatgaaatgcaaagcatacacagactgtctgagtcagaacctggtggtgatcaagccggggaccaaggagacagacaacgtctgtggcacactcccgtccttctccagctccacctcaccttcccctggcacagccatctttccacgccctgagcacatggaaacccatgaagtcccttcctccacttatgttcccaaaggcatgaactcaacagaatccaactcttctgcctctgttagaccaaaggtactgagtagcatccaggaagggacagtccctgacaacacaagctcagcaagggggaaggaagacgtgaacaagaccctcccaaaccttcaggtagtcaaccaccagcaaggcccccaccacagacacatcctgaagctgctgccgtccatggaggccactgggggcgagaagtccagcacgcccatcaagggccccaagaggggacatcctagacagaacctacacaagcattttgacatcaatgagcatttgccctggatgattgtgcttttcctgctgctggtgcttgtggtgattgtggtgtgcagtatccggaaaagctcgaggactctgaaaaaggggccccggcaggatcccagtgccattgtggaaaaggcagggctgaagaaatccatgactccaacccagaaccgggagaaatggatctactactgcaatggccatggtatcgatatcctgaagcttgtagcagcccaagtgggaagccagtggaaagatatctatcagtttctttgcaatgccagtgagagggaggttgctgctttctccaatgggtacacagccgaccacgagcgggcctacgcagctctgcagcactggaccatccggggccccgaggccagcctcgcccagctaattagcgccctgcgccagcaccggagaaacgatgttgtggagaagattcgtgggctgatggaagacaccacccagctggaaactgacaaactagctctcccgatgagccccagcccgcttagcccgagccccatccccagccccaacgcgaaacttgagaattccgctctcctgacggtggagccttccccacaggacaagaacaagggcttcttcgtggatgagtcggagccccttctccgctgtgactctacatccagcggctcctccgcgctgagcaggaacggttcctttattaccaaagaaaagaaggacacagtgttgcggcaggtacgcctggacccctgtgacttgcagcctatctttgatgacatgctccactttctaaatcctgaggagctgcgggtgattgaagagattccccaggctgaggacaaactagaccggctattcgaaattattggagtcaagagccaggaagccagccagaccctcctggactctgtttatagccatcttcctgacctgctgtagaacatagggatactgcattctggaaattactcaatttagtggcagggtggttttttaattttcttctgtttctgatttttgttgtttggggtgtgtgtgtgtgtttgtgtgtgtgtgtgtgtgtgtgtgtgtgtgtgtgtttaacagagaatatggccagtgcttgagttctttctccttctctctctctcttttttttttaaataactcttctgggaagttggtttataagcctttgccaggtgtaactgttgtgaaatacccaccactaaagttttttaagttccatattttctccattttgccttcttatgtattttcaagattattctgtgcactttaaatttacttaacttaccataaatgcagtgtgacttttcccacacactggattgtgaggctcttaacttcttaaaagtataatggcatcttgtgaatcctataagcagtctttatgtctcttaacattcacacctactttttaaaaacaaatattattactatttttattattgtttgtcctttataaattttcttaaagattaagaaaatttaagaccccattgagttactgtaatgcaattcaactttgagttatcttttaaatatgtcttgtatagttcatattcatggctgaaacttgaccacactattgctgattgtatggttttcacctggacaccgtgtagaatgcttgattacttgtactcttcttatgctaatatgctctgggctggagaaatgaaatcctcaagccatcaggatttgctatttaagtggcttgacaactgggccaccaaagaacttgaacttcaccttttaggatttgagctgttctggaacacattgctgcactttggaaagtcaaaatcaagtgccagtggcgccctttccatagagaatttgcccagctttgctttaaaagatgtcttgttttttatatacacataatcaataggtccaatctgctctcaaggccttggtcctggtgggattccttcaccaattactttaattaaaaatggctgcaactgtaagaacccttgtctgatatatttgcaactatgctcccatttacaaatgtaccttctaatgctcagttgccaggttccaatgcaaaggtggcgtggactccctttgtgtgggtggggtttgtgggtagtggtgaaggaccgatatcagaaaaatgccttcaagtgtactaatttattaataaacattaggtgtttgttaaaaaaaaaaaaaaaaaaaaaaaaaaaaa

SEQ ID NO: 13443 - DNA, 2463 bp, Homo sapiens
atgggagggagctgcgcgcagaggcgccgggccggcccgcggcaggtgctatttcctttgctgctgcctttgttctaccccaccctgagtgagccgatccgctactcgattccggaggagctggccaagggctcggtggtggggaacctcgctaaggatctagggctcagtgtcctggatgtgtcggctcgcaagctgcgagtgagcgcggagaagctgcacttcagcgtagacgcggagagcggggacttacttgtgaagaaccgaatagaccgtgagcaaatatgcaaagagagaagaagatgtgagttgcaattggaagctgtggtggaaaatcctttaaatatttttcatgtcattgtggtgattgaggatgttaatgaccacgcccctcaatttgataaaaaggaaatacatttagaaattttcgaatctgcatccgctggtacacgactatcgcttgaccctgccacggatcctgatataaacataaactcaattaaagattataagataaactctaatccttatttttcattaatggttagagttaattccgatggtggcaaatacccagagttatctctggagaaactcctagaccgggaagaacagagatctcatagcttgatattgactgccttggacggaggggacccaccaagaagtgccaccgctcacatagaaatttctgtcaaggataccaatgataaccccccggttttcagcagagacgaatatagaattagtcttagtgaaaatctgccccctgggtcccctgtgttgcaagtgacagccactgaccaggatgagggggtcaatgctgagataaactactacttccgaagcactgcccagagcacaaaacatatgttctcattggatgagaaaacaggtatgattaagaataaccagtcatttgattttgaagatgtagaaaggtacaccatggaagtggaagcgaaggacggaggtggtctctctacccagtgtaaagtaatcatagaaatccttgatgaaaacgacaacagcccagaaataatcatcacttctctctctgatcagattttggagaattcacctccaggaatggttgttgccctcttcaaaacacgggatctggatttcggaggaaatggagaagtcaggtgtaatatagaaacagacattccattcaagatttattcttcttccaataactactacaaactggtgacagatggagccctggaccgagagcagacaccagaatacaatgtcaccatcgtagccactgacaggggcaagccgcctctttcttccagtagaagcatcaccttgtatgtcgctgacatcaacgacaacgccccagttttcgaccagacgtcctacgtggtccacgtggccgagaacaacccgccaggagcctccattgcgcaagtgagcgcctctgacccggatttggggctcaatggccacatctcctactctatagtggcgagtgacctagagcccctggcggtgtcgtcatacgtgtcagtgagcgcgcagagcggggtggtgttcgcgcagcgcgcctttgatcacgagcagctgcgcgccttcgcgctcacgctgcaggcccgcgaccacggctcgcccacgctcagcgccaacgtgagcctgcgcgtgttggtgggagaccgcaatgacaacgcaccgcgggtgctgtacccagctctgggtcctgacggctccgcgttcttcgatatggtacctcgctctgcagagcccggctacctagtgactaaggtggtagcggtggacgccgactcgggacacaacgcctggctgtcctaccacgtgctgcaggccagtgagcccggactcttcagcctggggctgcgcactggggaggtgcgcacggctcgagccttaggcgacagggacgcagcccgccagcgcctgctggtcgctgtgcgtgacggtggacagccgccactctctgccaccgccacgcttcatctggtcttcgcagacaacttgcaagagatactgccagacctcagcgaccgccctgtactctctgacccccaggctgaactgcagttttacctggtggtggccttggccttaatctcagtgctcttcctcctcgccgtgattctggccattgccttgcgcctgcgacgctctctcagccctgctacttgggactgcttccatcctggtctctgtgtcaagtctggacctgtagttccccccaactacagtgaggggactttgccttattcttataatctgtgcattgcacatacgggtacaaaagagtttaatttcctaaaatgcagtgtgcccctacattccaatgaagacatggtttgcagtgtttctcctggagccttaattccacctcatggtggggaggatttgacttcacatcctgagactctgacttcggtgagtttctcttttttgtgtgtgatttatctaatagtctactag

SEQ ID NO: 13444 - DNA, 7475 bp, Homo sapiens
acttcagacgccgctgatccgggaggagctggggtgagccgcggcggccgtctctcccacccgcagcagcatcctctctgcccttctctgccaccccggggagagccgggagctgcctctttacagcttccacgagccaggggtgcaggcagctgcccccaggaagtttgggcttctgcgtagtttaggggtgcctgcgagcgccccagagggcgaggggccgagggcgatgttgggcgccgcgcggggctgggggcgcccagaagacgtgcgagtgtccgcggtcctgctgctgtctccagtaccctccgcatcccccaagtgatgggaacaagggcccgcccaggcagccgctgtcgccgcaccgccccctcgctcgctctctgcgcgcggagtcacccagtcacactcccggcaccccgagcccttcctccggagctgctgcttctactttggctgctatcgccgccgccgcgggtggcccgctgctgactgggctcgccgggagacggagaagcactttttggccctccctcagcagctctcacaccccaactttgccgccgccgccgcgcctgccctcgcagcggcgctcggccgcacattgtgggggcgcacgccgggaggctccgcaagaccgtggaggcaggaaacggcactactgcgcttctgcctcggctctttgttgttcgctttggatggttcttgaaagtgtctgagcctcctcggaaatcctggggccggagaagacaaaccttggaattcttcctctgcaaaagtctctgagatactgacaagcgtccggaaaggtcgacgagtaattgccctgaaaactcttggctaattgacccacgttgcttatattaagcctttgtgtgtggtgtgtggcttcatacatttggggaccctatttccactccctcctcttggcatgagactgtatacaggatccacccgaggacaatgattgcggagcccgctcacttttacctgtttggattaatatgtctctgttcaggctcccgtcttcgtcaggaagattttccacctcgcattgttgaacacccttcagacctgattgtctcaaaaggagaacctgcaactttgaactgcaaagctgaaggccgccccacacccactattgaatggtacaaagggggagagagagtggagacagacaaagatgaccctcgctcacaccgaatgttgctgccgagtggatctttatttttcttacgtatagtacatggacggaaaagtagacctgatgaaggagtctatgtctgtgtagcaaggaattaccttggagaggctgtgagccacaatgcatcgctggaagtagccatacttcgggatgacttcagacaaaacccttcggatgtcatggttgcagtaggagagcctgcagtaatggaatgccaacctccacgaggccatcctgagcccaccatttcatggaagaaagatggctctccactggatgataaagatgaaagaataactatacgaggaggaaagctcatgatcacttacacccgtaaaagtgacgctggcaaatatgtttgtgttggtaccaatatggttggggaacgtgagagtgaagtagccgagctgactgtcttagagagaccatcatttgtgaagagacccagtaacttggcagtaactgtggatgacagtgcagaatttaaatgtgaggcccgaggtgaccctgtacctacagtacgatggaggaaagatgatggagagctgcccaaatccagatatgaaatccgagatgatcataccttgaaaattaggaaggtgacagctggtgacatgggttcatacacttgtgttgcagaaaatatggtgggcaaagctgaagcatctgctactctgactgttcaagaacctccacattttgttgtgaaaccccgtgaccaggttgttgctttgggacggactgtaacttttcagtgtgaagcaaccggaaatcctcaaccagctattttctggaggagagaagggagtcagaatctacttttctcatatcaaccaccacagtcatccagccgattttcagtctcccagactggcgacctcacaattactaatgtccagcgatctgatgttggttattacatctgccagactttaaatgttgctggaagcatcatcacaaaggcatatttggaagttacagatgtgattgcagatcggcctcccccagttattcgacaaggtcctgtgaatcagactgtagccgtggatggcactttcgtcctcagctgtgtggccacaggcagtccagtgcccaccattctgtggagaaaggatggagtcctcgtttcaacccaagactctcgaatcaaacagttggagaatggagtactgcagatccgatatgctaagctgggtgatactggtcggtacacctgcattgcatcaacccccagtggtgaagcaacatggagtgcttacattgaagttcaagaatttggagttccagttcagcctccaagacctactgacccaaatttaatccctagtgccccatcaaaacctgaagtgacagatgtcagcagaaatacagtcacattatcgtggcaaccaaatttgaattcaggagcaactccaacatcttatattatagaagccttcagccatgcatctggtagcagctggcagaccgtagcagagaatgtgaaaacagaaacatctgccattaaaggactcaaacctaatgcaatttaccttttccttgtgagggcagctaatgcatatggaattagtgatccaagccaaatatcagatccagtgaaaacacaagatgtcctaccaacaagtcagggggtggaccacaagcaggtccagagagagctgggaaatgctgttctgcacctccacaaccccaccgtcctttcttcctcttccatcgaagtgcactggacagtagatcaacagtctcagtatatacaaggatataaaattctctatcggccatctggagccaaccacggagaatcagactggttagtttttgaagtgaggacgccagccaaaaacagtgtggtaatccctgatctcagaaagggagtcaactatgaaattaaggctcgccctttttttaatgaatttcaaggagcagatagtgaaatcaagtttgccaaaaccctggaagaagcacccagtgccccaccccaaggtgtaactgtatccaagaatgatggaaacggaactgcaattctagttagttggcagccacctccagaagacactcaaaatggaatggtccaagagtataaggtttggtgtctgggcaatgaaactcgataccacatcaacaaaacagtggatggttccaccttttccgtggtcattccctttcttgttcctggaatccgatacagtgtggaagtggcagccagcactggggctgggtctggggtaaagagtgagcctcagttcatccagctggatgcccatggaaaccctgtgtcacctgaggaccaagtcagcctcgctcagcagatttcagatgtggtgaagcagccggccttcatagcaggtattggagcagcctgttggatcatcctcatggtcttcagcatctggctttatcgacaccgcaagaagagaaacggacttactagtacctacgcgggtatcagaaaagtcccgtcttttaccttcacaccaacagtaacttaccagagaggaggcgaagctgtcagcagtggagggaggcctggacttctcaacatcagtgaacctgccgcgcagccatggctggcagacacgtggcctaatactggcaacaaccacaatgactgctccatcagctgctgcacggcaggcaatggaaacagcgacagcaacctcactacctacagtcgcccagctgattgtatagcaaattataacaaccaactggataacaaacaaacaaatctgatgctccctgagtcaactgtttatggtgatgtggaccttagtaacaaaatcaatgagatgaaaaccttcaatagcccaaatctgaaggatgggcgttttgtcaatccatcagggcagcctactccttacgccaccactcagctcatccagtcaaacctcagcaacaacatgaacaatggcagcggggactctggcgagaagcactggaaaccactgggacagcagaaacaagaagtggcaccagttcagtacaacatcgtggagcaaaacaagctgaacaaagattatcgagcaaatgacacagttcctccaactatcccatacaaccaatcatacgaccagaacacaggaggatcctacaacagctcagaccggggcagtagtacatctgggagtcaggggcacaagaaaggggcaagaacacccaaggtaccaaaacagggtggcatgaactgggcagacctgcttcctcctcccccagcacatcctcctccacacagcaatagcgaagagtacaacatttctgtagatgaaagctatgaccaagaaatgccatgtcccgtgccaccagcaaggatgtatttgcaacaagatgaattagaagaggaggaagatgaacgaggccccactccccctgttcggggagcagcttcttctccagctgccgtgtcctatagccatcagtccactgccactctgactccctccccacaggaagaactccagcccatgttacaggattgtccagaggagactggccacatgcagcaccagcccgacaggagacggcagcctgtgagtcctcctccaccaccacggccgatctcccctccacatacctatggctacatttcaggacccctggtctcagatatggatacggatgcgccagaagaggaagaagacgaagccgacatggaggtagccaagatgcaaaccagaaggcttttgttacgtgggcttgagcagacacctgcctccagtgttggggacctggagagctctgtcacggggtccatgatcaacggctggggctcagcctcagaggaggacaacatttccagcggacgctccagtgttagttcttcggacggctcctttttcactgatgctgactttgcccaggcagtcgcagcagcggcagagtatgctggtctgaaagtagcacgacggcaaatgcaggatgctgctggccgtcgacattttcatgcgtctcagtgccctaggcccacaagtcccgtgtctacagacagcaacatgagtgccgccgtaatgcagaaaaccagaccagccaagaaactgaaacaccagccaggacatctgcgcagagaaacctacacagatgatcttccaccacctcctgtgccgccacctgctataaagtcacctactgcccaatccaagacacagctggaagtacgacctgtagtggtgccaaaactcccttctatggatgcaagaacagacagatcatcagacagaaaaggaagcagttacaaggggagagaagtgttggatggaagacaggttgttgacatgcgaacaaatccaggtgatcccagagaagcacaggaacagcaaaatgacgggaaaggacgtggaaacaaggcagcaaaacgagaccttccaccagcaaagactcatctcatccaagaggatattctaccttattgtagacctacttttccaacatcaaataatcccagagatcccagttcctcaagctcaatgtcatcaagaggatcaggaagcagacaaagagaacaagcaaatgtaggtcgaagaaatattgcagaaatgcaggtacttggaggatatgaaagaggagaagataataatgaagaattagaggaaactgaaagctgaagacaaccaagaggcttatgagatctaatgtgaaaatcatcactcaagatgcctcctgtcagatgacacatgacgccagataaaatgttcagtgcaatcagagtgtacaaattgtcgtttttattcctcttattgggatatcattttaaaaactttattgggtttttattgttgttgtttgatccctaaccctacaaagagccttcctattcccctcgctgttggagcaaaccattataccttacttccagcaagcaaagtgctttgacttcttgcttcagtcatcagccagcaagagggaacaaaactgttcttttgcattttgccgctgagatatggcattgcactgcttatatgccaagctaatttatagcaagatattgatcaaatatagaaagttgatattcaacctcacaagggctctcaaagtataatctttctatagccaactgctaatgcaaattaaaacatatttcattttaacatgatttcaaaatcagtttttcatactaccctttgctggaagaaactaaaaatatagcaaatgcagaaccacaaacaattcgaatggggtagaaacattgtaaatatttactctttgcaaaccctggtggtattttattttggcttcatttcaatcattgaagtatattcttattggaaatgtacttttggataagtagggctaagccagttggatctctggttgtctagtcattgtcataagtaaacctagtaaaaccttgttctatttttcaatcatcaaaaagtaattataaatacgtattacaaacaagtggatgtttttaatgaccaattgagtaagaacatccctgtcttaactggcctaaatttcttctggtagtgtcagttcaactttcagaagtgccacttaaggaagtttgatttttgtttttgtaatgcactgtttttaatctctctctctttttttttttttttttggttttaaaagcacaatcactaaactttatttgtaaaccattgtaactattaaccttttttgtcttattgaaaaaaaaaatgttgagaagcgtttttaacctgttttgttaatgctctatgtttgtatttggaatatttgaataatgacagatggtgaagtaacatgcatactttattgtgggccatgaaccaaatggttcttacttttcctggacttaaagaaaaaaagaggtttaagtttgttgtggccaatgtcgaaacctacaagatttccttaaaatctctaatagaggcattacttgctttcaattgacaaatgatgccctctgactagtagatttctatgatccttttttgtcattttatgaatatcattgattttataattggtgctatttgaagaaaaaaatgtacatttattcatagatagataagtatcaggtctgaccccagtggaaaacaaagccaaacaaaactgaaccacaaaaaaaaaggctggtgttcaccaaaaccaaacttgttcatttagataatttgaaaaagttccatagaaaaggcgtgcagtactaagggaacaatccatgtgattaatgttttcattatgttcatgtaagaagccccttatttttagccataattttgcatactgaaaatccaataatcagaaaagtaattttgtcacattatttattaaaaatgttctcaaatac

SEQ ID NO: 13445 - DNA, 6629 bp, Homo sapiens
atgaaatggaaacatgttccttttttggtcatgatatcactcctcagcttatccccaaatcacctgtttctggcccagcttattccagaccctgaagatgtagagagggggaacgaccacgggacgccaatccccacctctgataacgatgacaattcgctgggctatacaggctcccgtcttcgtcaggaagattttccacctcgcattgttgaacacccttcagacctgattgtctcaaaaggagaacctgcaactttgaactgcaaagctgaaggccgccccacacccactattgaatggtacaaagggggagagagagtggagacagacaaagatgaccctcgctcacaccgaatgttgctgccgagtggatctttatttttcttacgtatagtacatggacggaaaagtagacctgatgaaggagtctatgtctgtgtagcaaggaattaccttggagaggctgtgagccacaatgcatcgctggaagtagccatacttcgggatgacttcagacaaaacccttcggatgtcatggttgcagtaggagagcctgcagtaatggaatgccaacctccacgaggccatcctgagcccaccatttcatggaagaaagatggctctccactggatgataaagatgaaagaataactatacgaggaggaaagctcatgatcacttacacccgtaaaagtgacgctggcaaatatgtttgtgttggtaccaatatggttggggaacgtgagagtgaagtagccgagctgactgtcttagagagaccatcatttgtgaagagacccagtaacttggcagtaactgtggatgacagtgcagaatttaaatgtgaggcccgaggtgaccctgtacctacagtacgatggaggaaagatgatggagagctgcccaaatccagatatgaaatccgagatgatcataccttgaaaattaggaaggtgacagctggtgacatgggttcatacacttgtgttgcagaaaatatggtgggcaaagctgaagcatctgctactctgactgttcaagaacctccacattttgttgtgaaaccccgtgaccaggttgttgctttgggacggactgtaacttttcagtgtgaagcaaccggaaatcctcaaccagctattttctggaggagagaagggagtcagaatctacttttctcatatcaaccaccacagtcatccagccgattttcagtctcccagactggcgacctcacaattactaatgtccagcgatctgatgttggttattacatctgccagactttaaatgttgctggaagcatcatcacaaaggcatatttggaagttacagatgtgattgcagatcggcctcccccagttattcgacaaggtcctgtgaatcagactgtagccgtggatggcactttcgtcctcagctgtgtggccacaggcagtccagtgcccaccattctgtggagaaaggatggagtcctcgtttcaacccaagactctcgaatcaaacagttggagaatggagtactgcagatccgatatgctaagctgggtgatactggtcggtacacctgcattgcatcaacccccagtggtgaagcaacatggagtgcttacattgaagttcaagaatttggagttccagttcagcctccaagacctactgacccaaatttaatccctagtgccccatcaaaacctgaagtgacagatgtcagcagaaatacagtcacattatcgtggcaaccaaatttgaattcaggagcaactccaacatcttatattatagaagccttcagccatgcatctggtagcagctggcagaccgtagcagagaatgtgaaaacagaaacatctgccattaaaggactcaaacctaatgcaatttaccttttccttgtgagggcagctaatgcatatggaattagtgatccaagccaaatatcagatccagtgaaaacacaagatgtcctaccaacaagtcagggggtggaccacaagcaggtccagagagagctgggaaatgctgttctgcacctccacaaccccaccgtcctttcttcctcttccatcgaagtgcactggacagtagatcaacagtctcagtatatacaaggatataaaattctctatcggccatctggagccaaccacggagaatcagactggttagtttttgaagtgaggacgccagccaaaaacagtgtggtaatccctgatctcagaaagggagtcaactatgaaattaaggctcgccctttttttaatgaatttcaaggagcagatagtgaaatcaagtttgccaaaaccctggaagaagcacccagtgccccaccccaaggtgtaactgtatccaagaatgatggaaacggaactgcaattctagttagttggcagccacctccagaagacactcaaaatggaatggtccaagagtataaggtttggtgtctgggcaatgaaactcgataccacatcaacaaaacagtggatggttccaccttttccgtggtcattccctttcttgttcctggaatccgatacagtgtggaagtggcagccagcactggggctgggtctggggtaaagagtgagcctcagttcatccagctggatgcccatggaaaccctgtgtcacctgaggaccaagtcagcctcgctcagcagatttcagatgtggtgaagcagccggccttcatagcaggtattggagcagcctgttggatcatcctcatggtcttcagcatctggctttatcgacaccgcaagaagagaaacggacttactagtacctacgcgggtatcagaaaagtcccgtcttttaccttcacaccaacagtaacttaccagagaggaggcgaagctgtcagcagtggagggaggcctggacttctcaacatcagtgaacctgccgcgcagccatggctggcagacacgtggcctaatactggcaacaaccacaatgactgctccatcagctgctgcacggcaggcaatggaaacagcgacagcaacctcactacctacagtcgcccagctgattgtatagcaaattataacaaccaactggataacaaacaaacaaatctgatgctccctgagtcaactgtttatggtgatgtggaccttagtaacaaaatcaatgagatgaaaaccttcaatagcccaaatctgaaggatgggcgttttgtcaatccatcagggcagcctactccttacgccaccactcagctcatccagtcaaacctcagcaacaacatgaacaatggcagcggggactctggcgagaagcactggaaaccactgggacagcagaaacaagaagtggcaccagttcagtacaacatcgtggagcaaaacaagctgaacaaagattatcgagcaaatgacacagttcctccaactatcccatacaaccaatcatacgaccagaacacaggaggatcctacaacagctcagaccggggcagtagtacatctgggagtcaggggcacaagaaaggggcaagaacacccaaggtaccaaaacagggtggcatgaactgggcagacctgcttcctcctcccccagcacatcctcctccacacagcaatagcgaagagtacaacatttctgtagatgaaagctatgaccaagaaatgccatgtcccgtgccaccagcaaggatgtatttgcaacaagatgaattagaagaggaggaagatgaacgaggccccactccccctgttcggggagcagcttcttctccagctgccgtgtcctatagccatcagtccactgccactctgactccctccccacaggaagaactccagcccatgttacaggattgtccagaggagactggccacatgcagcaccagcccgacaggagacggcagcctgtgagtcctcctccaccaccacggccgatctcccctccacatacctatggctacatttcaggacccctggtctcagatatggatacggatgcgccagaagaggaagaagacgaagccgacatggaggtagccaagatgcaaaccagaaggcttttgttacgtgggcttgagcagacacctgcctccagtgttggggacctggagagctctgtcacggggtccatgatcaacggctggggctcagcctcagaggaggacaacatttccagcggacgctccagtgttagttcttcggacggctcctttttcactgatgctgactttgcccaggcagtcgcagcagcggcagagtatgctggtctgaaagtagcacgacggcaaatgcaggatgctgctggccgtcgacattttcatgcgtctcagtgccctaggcccacaagtcccgtgtctacagacagcaacatgagtgccgccgtaatgcagaaaaccagaccagccaagaaactgaaacaccagccaggacatctgcgcagagaaacctacacagatgatcttccaccacctcctgtgccgccacctgctataaagtcacctactgcccaatccaagacacagctggaagtacgacctgtagtggtgccaaaactcccttctatggatgcaagaacagacagatcatcagacagaaaaggaagcagttacaaggggagagaagtgttggatggaagacaggttgttgacatgcgaacaaatccaggtgatcccagagaagcacaggaacagcaaaatgacgggaaaggacgtggaaacaaggcagcaaaacgagaccttccaccagcaaagactcatctcatccaagaggatattctaccttattgtagacctacttttccaacatcaaataatcccagagatcccagttcctcaagctcaatgtcatcaagaggatcaggaagcagacaaagagaacaagcaaatgtaggtcgaagaaatattgcagaaatgcaggtacttggaggatatgaaagaggagaagataataatgaagaattagaggaaactgaaagctgaagacaaccaagaggcttatgagatctaatgtgaaaatcatcactcaagatgcctcctgtcagatgacacatgacgccagataaaatgttcagtgcaatcagagtgtacaaattgtcgtttttattcctcttattgggatatcattttaaaaactttattgggtttttattgttgttgtttgatccctaaccctacaaagagccttcctattcccctcgctgttggagcaaaccattataccttacttccagcaagcaaagtgctttgacttcttgcttcagtcatcagccagcaagagggaacaaaactgttcttttgcattttgccgctgagatatggcattgcactgcttatatgccaagctaatttatagcaagatattgatcaaatatagaaagttgatattcaacctcacaagggctctcaaagtataatctttctatagccaactgctaatgcaaattaaaacatatttcattttaacatgatttcaaaatcagtttttcatactaccctttgctggaagaaactaaaaatatagcaaatgcagaaccacaaacaattcgaatggggtagaaacattgtaaatatttactctttgcaaaccctggtggtattttattttggcttcatttcaatcattgaagtatattcttattggaaatgtacttttggataagtagggctaagccagttggatctctggttgtctagtcattgtcataagtaaacctagtaaaaccttgttctatttttcaatcatcaaaaagtaattataaatacgtattacaaacaagtggatgtttttaatgaccaattgagtaagaacatccctgtcttaactggcctaaatttcttctggtagtgtcagttcaactttcagaagtgccacttaaggaagtttgatttttgtttttgtaatgcactgtttttaatctctctctctttttttttttttttttggttttaaaagcacaatcactaaactttatttgtaaaccattgtaactattaaccttttttgtcttattgaaaaaaaaaatgttgagaagcgtttttaacctgttttgttaatgctctatgtttgtatttggaatatttgaataatgacagatggtgaagtaacatgcatactttattgtgggccatgaaccaaatggttcttacttttcctggacttaaagaaaaaaagaggtttaagtttgttgtggccaatgtcgaaacctacaagatttccttaaaatctctaatagaggcattacttgctttcaattgacaaatgatgccctctgactagtagatttctatgatccttttttgtcattttatgaatatcattgattttataattggtgctatttgaagaaaaaaatgtacatttattcatagatagataagtatcaggtctgaccccagtggaaaacaaagccaaacaaaactgaaccacaaaaaaaaaggctggtgttcaccaaaaccaaacttgttcatttagataatttgaaaaagttccatagaaaaggcgtgcagtactaagggaacaatccatgtgattaatgttttcattatgttcatgtaagaagccccttatttttagccataattttgcatactgaaaatccaataatcagaaaagtaattttgtcacattatttattaaaaatgttctcaaatac

SEQ ID NO: 13446 - DNA, 2815 bp, Homo sapiens
tgaggcggtgccggcgttctggcccccaaagccggtctagcgcgccgggcgtcttccttacttccgctgccgccgccgccacatcccgggacccgacgggccgcggcgcggaggcctcggggcaaggtggggcgggcctcccgagctcccaggaccccgcgcgcttcgcccacaggcccggcgaagcccgacccgcgcggcgcccccagggccaggggaggagcctaaggacccggacgagcgccgctccagtaggtgacaagaggaaccaagaacctcagttcaggggaaacacagcaaggaaatgtgagccccaggctgcagaaggaagagtcagtgaatggctgcggtgtgacaacatgcaccaccagtggcttctgctggccgcatgcttttgggtgattttcatgttcatggtggctagcaagttcatcacgttgacctttaaagacccagatgtgtacagtgccaaacaggagtttctgttcctgacaaccatgccggaagtgaggaagttgccagaagagaagcacattcctgaggaactgaagccaactgggaaggagcttccagacagccagctcgttcagcccctggtctacatggagcgcctggaactcatcagaaacgtctgcagggatgatgccctgaagaatctctcgcacactcctgtctccaagtttgtcctggaccgaatatttgtctgtgacaagcacaagattcttttctgccagactcccaaagtgggcaacacccagtggaagaaagtgctgattgttctaaatggagcattttcttccattgaggagatccccgaaaacgtggtgcacgaccacgagaagaacggccttcctcggctctcttccttcagtgatgcagaaattcagaagcgattgaaaacatacttcaagttttttattgtaagagatcccttcgaaagacttatttctgcatttaaggataaatttgttcacaatccccggtttgagccttggtacaggcatgagattgctcctggcatcatcagaaaatacaggaggaaccggacagagacccgggggatccagtttgaagatttcgtgcgctacctcggcgatccgaaccacagatggctagaccttcagtttggggaccacatcattcactgggtgacgtatgtagagctctgtgctccctgtgagataatgtacagtgtgattggacaccacgagaccctggaggacgatgccccatacatcttaaaagaggctggcattgaccacctggtgtcatacccgactatccctccgggcattaccgtgtataacagaaccaaggtggagcactatttcctgggcatcagcaaacgagacatccgacgcctgtatgcccgtttcgaaggggactttaagctctttgggtaccagaaaccagactttttgctaaactaatgcataagacctatgaattcaaatatctttattagacctggggctaaccaggtgaagatctgagcccagaaatgacccttcctccaccacacccctcctttgaggacgcccggggtctcccacaggcctgtgagttgcctcggcatatgacgcagaaccccaactgttacaacttagtttggatgtaagatgctctgaggaccctgcccacacccctgcgtgcattaggatgtcgctggcctttgctcacctcagaggggagaaaaggctaaagatttgcagtttgacagcccagcagggaggaagcatcacacagcgttaggagccgtttccttcaggtgttaaggaaggggatgcccctgaggttctcctggctagtcagggtggcttcacccatcactggtgggttgcaggaacagcacccaggactctgaggagggacagagaagcaagggggctgctgaaatcgcagagacttttgcagcatcagatctgaggagtaaaacggcacctctggccttcatcttggtgctgcgacaattgtggaggcaaagcattctttctgtgactattttgttcctgtagacagtcagcgatggccagagggtggtgtggtgtccaggggtccatctttccagaatccatgcctgtgtaatgctggtccatgcttctgaacctgtgtctgccaagcgcctatttcattcagcacaagacatacgattttagaaggtgaggggaggggaggctttttctacctgagaaggggagtgtctttgagggccttaaaaggaccatggcccaggaatgggggcgctggttgggcttggagctcaggctgctgtggatcccggcgcatcagttctgacttgccttacctgggtggacagcagtgaatctccacctgtcttctccagggagctcccatgttggggctgaagacgagcaggggcaacctgccagcatcacagaattcagtgtagtttatacatttcgattcctttcatctcagcaaaatgggcactgccagagccatttctgatcacaccaccatcctggaccatgtgactggaaggtgggtaaccaagttcaccagcaataaaacccagcgcccaggtagcctccagcagtgcggcttcctggcaacaaggtaggccctggtgcagggcaagccgcagcgaccatttcagataccgtccacagccaggaccgctgagaactgggacagtttcctgggatgagtgccagcctgagcctgcatggtgccgccgagcccggggtggaggagggagccaggcttcgcttcaaggcggcctctaccttttctcagaatggtttcctgattgtgtcaatgtgaaagttaaataaaatttatgtgccaaacctga

SEQ ID NO: 13447 - DNA, 9186 bp, Homo sapiens
gctagagatgctgcacgctgctaacaagggaaggaagccttcagctgaggcaggtcgtcccattccacctacatcctcgcctagtctcctcccatctgctcagctgcctagctcccataatcctccaccagttagctgccagatgccattgctagacagcaacacctcccatcaaatcatggacaccaaccctgatgaggaattctcccccaattcatacctgctcagagcatgctcagggccccagcaagcctccagcagtggccctccgaaccaccacagccagtcgactctgaggccccctctcccaccccctcacaaccacacgctgtcccatcaccactcgtccgccaactccctcaacaggaactcactgaccaatcggcggagtcagatccacgccccggccccagcgcccaatgacctggccaccacaccagagtccgttcagcttcaggacagctgggtgctaaacagcaacgtgccactggagacccggcacttcctcttcaagacctcctcggggagcacacccttgttcagcagctcttccccgggataccctttgacctcaggaacggtttacacgcccccgccccgcctgctgcccaggaatactttctccaggaaggctttcaagctgaagaagccctccaaatactgcagctggaaatgtgctgccctctccgccattgccgcggccctcctcttggctattttgctggcgtatttcatagcaatgcatctgctcggactcaattggcaactccagcctgcagatgggcacacctttaacaatgggataaggaccggcttaccaggaaacgatgatgtggcaacaatgccatctggaggcaaaggtgaggttggagctttccttcaagaaaacagcagcatagacagtggtgaagcagaagttggtcggcgggtaacacaagaagtcccaccaggggtgttttggaggtcacaaattcacatcagtcagccccagttcttaaagttcaacatctccctcgggaaggacgctctctttggtgtttacataagaagaggacttccaccatctcatgcccagtatgacttcatggaacgtctggacgggaaggagaagtggagtgtggttgagtctcccagggaacgccggagcatacagaccttggttcagaatgaagccgtgtttgtgcagtacctggatgtgggcctgtggcatctggccttctacaatgatggaaaagacaaagagatggtttccttcaatactgttgtcctagattcagtgcaggactgtccacgtaactgccatgggaatggtgaatgtgtgtccggggtgtgtcactgtttcccaggatttctaggagcagactgtgctaaagctgcctgccctgtcctgtgcagtgggaatggacaatattctaaagggacgtgccagtgctacagcggctggaaaggtgcagagtgcgacgtgcccatgaatcagtgcatcgatccttcctgcgggggccacggctcctgcattgatgggaactgtgtctgctctgctggctacaaaggcgagcactgtgaggaagttgattgcttggatcccacctgctccagccacggagtctgtgtgaatggagaatgcctgtgcagccctggctggggtggtctgaactgtgagctggcgagggtccagtgcccagaccagtgcagtgggcatggcacgtacctgcctgacacgggcctctgcagctgcgatcccaactggatgggtcccgactgctctgttgaagtgtgctcagtagactgtggcactcacggcgtctgcatcgggggagcctgccgctgtgaagagggctggacaggcgcagcgtgtgaccagcgcgtgtgccacccccgctgcattgagcacgggacctgtaaagatggcaaatgtgaatgccgagagggctggaatggtgaacactgcaccattgatggctgccctgacttgtgcaacggtaacgggagatgcacactgggtcagaacagctggcagtgtgtctgccagaccggctggagagggcccggatgcaacgttgccatggaaacttcctgtgctgataacaaggataatgagggagatggcctggtggattgtttggaccctgactgctgcctgcagtcagcctgtcagaacagcctgctctgccgggggtcccgggacccactggacatcattcagcagggccagacggattggcccgcagtgaagtccttctatgaccgtatcaagctcttggcaggcaaggatagcacccacatcattcctggagagaaccctttcaacagcagcttggtttctctcatccgaggccaagtagtaactacagatggaactcccctggtcggtgtgaacgtgtcttttgtcaagtacccaaaatacggctacaccatcacccgccaggatggcacgttcgacctgatcgcaaatggaggtgcttccttgactctacactttgagcgagccccgttcatgagccaggagcgcactgtgtggctgccgtggaacagcttttacgccatggacaccctggtgatgaagaccgaggagaactccatccccagctgtgacctcagtggctttgtccggcctgatccaatcatcatctcctccccactgtccaccttctttagtgctgcccctgggcagaatcccatcgtgcctgagacccaggttcttcatgaagaaatcgagctccctggttccaatgtgaaacttcgctatctgagctctagaactgcagggtacaagtcactgctgaagatcaccatgacccagtccacagtgcccctgaacctcattagggttcacctgatggtggctgtcgaggggcatctcttccagaagtcattccaggcttctcccaacctggcctacaccttcatctgggacaagacagatgcgtatggccaaagggtgtatggactctcagatgctgttgtgtctgtcgggtttgaatatgagacctgtcccagtctaattctctgggagaaaaggacagccctccttcagggattcgagctggacccctccaacctcggtggctggtccctagacaaacaccacatcctcaatgttaaaagtggaatcctacacaaaggcactggggaaaaccagttcctgacccagcagcctgccatcatcaccagcatcatgggcaatggtcgccgccggagcatttcctgtcccagctgcaacggccttgctgaaggcaacaagctgctggccccagtggctctggctgttggaatcgatgggagcctctatgtgggtgacttcaattacatccgacgcatctttccctctcgaaatgtgaccagcatcttggagttacgcaacaacccagcacacaagtactacttggcagtggaccccgtgtccggctcgctctacgtgtccgacaccaacagcaggagaatctaccgcgtcaagtctctgagtggaaccaaagacctggctgggaattcggaagttgtggcagggacgggagagcagtgtctaccctttgatgaagcccgctgcggggatggagggaaggccatagatgcaaccctgatgagcccgagaggtattgcagtagacaagaatgggctcatgtactttgtcgatgccaccatgatccggaaggttgaccagaatggaatcatctccaccctgctgggctccaatgacctcactgccgtccggccgctgagctgtgattccagcatggatgtagcccaggttcgtctggagtggccaacagaccttgctgtcaatcccatggataactccttgtatgttctagagaacaatgtcatccttcgaatcaccgagaaccaccaagtcagcatcattgcgggacgccccatgcactgccaagttcctggcattgactactcactcagcaaactagccattcactctgccctggagtcagccagtgccattgccatttctcacactggggtcctctacatcactgagacagatgagaagaagattaaccgtctacgccaggtaacaaccaacggggagatctgccttttagctggggcagcctcggactgcgactgcaaaaacgatgtcaattgcaactgctattcaggagatgatgcctacgcgactgatgccatcttgaattccccatcatccttagctgtagctccagatggtaccatttacattgcagaccttggaaatattcggatcagggcggtcagcaagaacaagcctgttcttaatgccttcaaccagtatgaggctgcatcccccggagagcaggagttatatgttttcaacgctgatggcatccaccaatacactgtgagcctggtgacaggggagtacttgtacaatttcacatatagtactgacaatgatgtcactgaattgattgacaataatgggaattccctgaagatccgtcgggacagcagtggcatgccccgtcacctgctcatgcctgacaaccagatcatcaccctcaccgtgggcaccaatggaggcctcaaagtcgtgtccacacagaacctggagcttggtctcatgacctatgatggcaacactgggctcctggccaccaagagcgatgaaacaggatggacgactttctatgactatgaccacgaaggccgcctgaccaacgtgacgcgccccacgggggtggtaaccagtctgcaccgggaaatggagaaatctattaccattgacattgagaactccaaccgtgatgatgacgtcactgtcatcaccaacctctcttcagtagaggcctcctacacagtggtacaagatcaagttcggaacagctaccagctctgtaataatggtaccctgagggtgatgtatgctaatgggatgggtatcagcttccacagcgagccccatgtcctagcgggcaccatcacccccaccattggacgctgcaacatctccctgcctatggagaatggcttaaactccattgagtggcgcctaagaaaggaacagattaaaggcaaagtcaccatctttggcaggaagctccgggtccatggaagaaatctcttgtccattgactatgatcgaaatattcggactgaaaagatctatgatgaccaccggaagttcaccctgaggatcatttatgaccaggtgggccgccccttcctctggctgcccagcagcgggctggcagctgtcaacgtgtcatacttcttcaatgggcgcctggctgggcttcagcgtggggccatgagcgagaggacagacatcgacaagcaaggccgcatcgtgtcccgcatgttcgctgacgggaaagtgtggagctactcctaccttgacaagtccatggtcctcctgcttcagagccaacgtcagtatatatttgagtatgactcctctgaccgcctccttgccgtcaccatgcccagcgtggcccggcacagcatgtccacacacacctccatcggctacatccgtaatatttacaacccgcctgaaagcaatgcttcggtcatctttgactacagtgatgacggccgcatcctgaagacctcctttttgggcaccggacgccaggtgttctacaagtatgggaaactctccaagttatcagagattgtctacgacagtaccgccgtcaccttcgggtatgacgagaccactggtgtcttgaagatggtcaacctccaaagtgggggcttctcctgcaccatcaggtaccggaagattggccccctggtggacaagcagatctacaggttctccgaggaaggcatggtcaatgccaggtttgactacacctatcatgacaacagcttccgcatcgcaagcatcaagcccgtcataagtgagactcccctccccgttgacctctaccgctatgatgagatttctggcaaggtggaacactttggtaagtttggagtcatctattatgacatcaaccagatcatcaccactgccgtgatgaccctcagcaaacacttcgacacccatgggcggatcaaggaggtccagtatgagatgttccggtccctcatgtactggatgacggtgcaatatgacagcatgggcagggtgatcaagagggagctaaaactggggccctatgccaataccacgaagtacacctatgactacgatggggacgggcagctccagagcgtggccgtcaatgaccgcccgacctggcgctacagctatgaccttaatgggaatctccacttactgaacccaggcaacagtgtgcgcctcatgcccttgcgctatgacctccgggatcggataaccagactcggggatgtgcagtacaaaattgacgacgatggctatctgtgccagagagggtctgacatcttcgaatacaattccaagggcctcctaacaagagcctacaacaaggccagcgggtggagtgtccagtaccgctatgatggcgtaggacggcgggcttcctacaagaccaacctgggccaccacctgcagtacttctactctgacctccacaacccgacgcgcatcacccatgtctacaatcactccaactcggagattacctcactgtactacgacctccagggccacctctttgccatggagagcagcagtggggaggagtactatgttgcctctgataacacagggactcctctggctgtgttcagcatcaacggcctcatgatcaaacagctgcagtacacggcctatggggagatttattatgactccaaccccgacttccagatggtcattggcttccatgggggactctatgaccccctgaccaagctggtccacttcactcagcgtgattatgatgtgctggcaggacgatggacctccccagactataccatgtggaaaaacgtgggcaaggagccggccccctttaacctgtatatgttcaagagcaacaatcctctcagcagtgagctagatttgaagaactacgtgacagatgtgaaaagctggcttgtgatgtttggatttcagcttagcaacatcattcctggcttcccgagagccaaaatgtatttcgtgcctcctccctatgaattgtcagagagtcaagcaagtgagaatggacagctcattacaggtgtccaacagacaacagagagacataaccaggccttcatggctctggaaggacaggtcattactaaaaagctccacgccagcatccgagagaaagcaggtcactggtttgccaccaccacgcccatcattggcaaaggcatcatgtttgccatcaaagaagggcgggtgaccacgggcgtgtccagcatcgccagcgaagatagccgcaaggtggcatctgtgctgaacaacgcctactacctggacaagatgcactacagcatcgagggcaaggacacccactactttgtgaagattggctcagccgatggcgacctggtcacactaggcaccaccatcggccgcaaggtgctagagagcggggtgaacgtgaccgtgtcccagcccacgctgctggtcaacggcaggactcgaaggttcacgaacattgagttccagtactccacgctgctgctcagcatccgctatggcctcacccccgacaccctggacgaagagaaggcccgcgtcctggaccaggcgagacagagggccctgggcacggcctgggccaaggagcagcagaaagccagggacgggagagaggggagccgcctgtggactgagggcgagaagcagcagcttctgagcaccgggcgcgtgcaagggtacgagggatattacgtgcttcccgtggagcaatacccagagcttgcagacagtagcagcaacatccagtttttaagacagaatgagatgggaaagaggtaacaaaataatctgctgccattccttgtctgaatggctcagcaggagtaactgttatctcctctcctaaggagatgaagacctaacaggggcactgcggctgggctgctttaggagaccaagtggcaagaaagctcacattttttgagttcaaatgctactgtccaagcgagaagtccctcatcctgaagtagactaaagcccggctgaaaattccgaggaaaacaaaacaaacgaatgaatgaacagacacacacaatgttccaagttcccctaaaatatgacccacttgttctgggtctacgcagaaaagagacgcaaagtgtccaaaaggaacaaaagaacaaaaacgaataagcaaagaagaaaacaaacaaaaacaaaacaaaacaaacacacggaccaataaacaaagaagcgaagataagaaagaaggcctcatatccaattacctcactcattcacatgtgagcgacacgcagacatccgcgagggccagcgtcaccagaccagctgcgggacaaaccactcagactgcttgtaggacaaatacttctgacattttcgtttaagcaaatacaggtgcatttaaaacacgactttgggggtgatttgtgtgtagcgcctggggaggggggataaaagaggaggagtgagcactggaaatactttttaaagaaaaaaaaacatgagggaataaaagaaattcctatcaaaaatcaaagtgaaataataccatccagcacttaactctcaggtcccaactaagtctggcctgagctaatttatttgagcgcagagtgtaaaatttaattcaaaatggtggctataatcactacagataaatttcatactcttttgtctttggagattccattgtggacagtaatacgcagttacagggtgtagtctgtttagattccgtagttcgtgggtatcagtttcggtagaggtgcagcatcgtgacacttttgctaacaggtaccacttctgatcaccctgtacatacatgagccgaaaggcacaatcactgtttcagatttaaaattattagtgtgtttgtttggtccagaaactgagacaatcacatgacagtcaccacgaggagagaaaatttaaaaaataaaaataaaaacaaaaaaaattttaaaaattaaaaaaacaaaaataaagtctaataagaactttggtacaggaacttttttgtaatatacatgtatgaattgttcatcgagtttttatattaattttaatttgctgctaagcaaagactagggacaggcaaagataatttatggcaaagtgtttaaattgtttatacataaataaagtctctaaaactcctgtggaca

SEQ ID NO: 13448 - DNA, 14392 bp, Homo sapiens
gcagacctaaaggagcgttcgctagcagaggcgctgccggtgcggtgtgctacgcgcgcccacctcccggggaaggaacggcgaggccggggaccgtcgcggagatggatcgcgggccggcagcagtggcgtgcacgctgctcctggctctcgtcgcctgcctagcgccggccagtggccaagaatgtgacagtgcgcattttcgctgtggaagtgggcattgcatccctgcagactggaggtgtgatgggaccaaagactgttcagatgacgcggatgaaattggctgcgctgttgtgacctgccagcagggctatttcaagtgccagagtgagggacaatgcatccccagctcctgggtgtgtgaccaagatcaagactgtgatgatggctcagatgaacgtcaagattgctcacaaagtacatgctcaagtcatcagataacatgctccaatggtcagtgtatcccaagtgaatacaggtgcgaccacgtcagagactgccccgatggagctgatgagaatgactgccagtacccaacatgtgagcagcttacttgtgacaatggggcctgctataacaccagtcagaagtgtgattggaaagttgattgcagggactcctcagatgaaatcaactgcactgagatatgcttgcacaatgagttttcatgtggcaatggagagtgtatccctcgtgcttatgtctgtgaccatgacaatgattgccaagacggcagtgatgaacatgcttgcaactatccgacctgcggtggttaccagttcacttgccccagtggccgatgcatttatcaaaactgggtttgtgatggagaagatgactgtaaagataatggagatgaagatggatgtgaaagcggtcctcatgatgttcataaatgttccccaagagaatggtcttgcccagagtcgggacgatgcatctccatttataaagtttgtgatgggattttagattgcccaggaagagaagatgaaaacaacactagtaccggaaaatactgtagtatgactctgtgctctgccttgaactgccagtaccagtgccatgagacgccgtatggaggagcgtgtttttgtcccccaggttatatcatcaaccacaatgacagccgtacctgtgttgagtttgatgattgccagatatggggaatttgtgaccagaagtgtgaaagccgacctggccgtcacctgtgccactgtgaagaagggtatatcttggagcgtggacagtattgcaaagctaatgattcctttggcgaggcctccattatcttctccaatggtcgggatttgttaattggtgatattcatggaaggagcttccggatcctagtggagtctcagaatcgtggagtggccgtgggtgtggctttccactatcacctgcaaagagttttttggacagacaccgtgcaaaataaggttttttcagttgacattaatggtttaaatatccaagaggttctcaatgtttctgttgaaaccccagagaacctggctgtggactgggttaataataaaatctatctagtggaaaccaaggtcaaccgcatagatatggtaaatttggatggaagctatcgggttacccttataactgaaaacttggggcatcctagaggaattgccgtggacccaactgttggttatttatttttctcagattgggagagcctttctggggaacctaagctggaaagggcattcatggatggcagcaaccgtaaagacttggtgaaaacaaagctgggatggcctgctggggtaactctggatatgatatcgaagcgtgtttactgggttgactctcggtttgattacattgaaactgtaacttatgatggaattcaaaggaagactgtagttcatggaggctccctcattcctcatccctttggagtaagcttatttgaaggtcaggtgttctttacagattggacaaagatggccgtgctgaaggcaaacaagttcacagagaccaacccacaagtgtactaccaggcttccctgaggccctatggagtgactgtttaccattccctcagacagccctatgctaccaatccgtgtaaagataacaatgggggctgtgagcaggtctgtgttctcagccacagaacagataatgatggtttgggtttccgttgcaagtgcacattcggcttccaactggatacagatgagcgccactgcattgctgttcagaatttcctcattttttcatcccaagttgctattcgtgggatcccgttcaccttgtctacccaggaagatgtcatggttccagtttcggggaatccttctttctttgtcgggattgattttgacgcccaggacagcactatctttttttcagatatgtcaaaacacatgatttttaagcaaaagattgatggcacaggaagagaaattctcgcagctaacagggtggaaaatgttgaaagtttggcttttgattggatttcaaagaatctctattggacagactctcattacaagagtatcagtgtcatgaggctagctgataaaacgagacgcacagtagttcagtatttaaataacccacggtcggtggtagttcatccttttgccgggtatctattcttcactgattggttccgtcctgctaaaattatgagagcatggagtgacggatctcacctcttgcctgtaataaacactactcttggatggcccaatggcttggccatcgattgggctgcttcacgattgtactgggtagatgcctattttgataaaattgagcacagcacctttgatggtttagacagaagaagactgggccatatagagcagatgacacatccgtttggacttgccatctttggagagcatttattttttactgactggagactgggtgccattattcgagtcaggaaagcagatggtggagaaatgacagttatccgaagtggcattgcttacatactgcatttgaaatcgtatgatgtcaacatccagactggttctaacgcctgtaatcaacccacgcatcctaacggtgactgcagccacttctgcttcccggtgccaaatttccagcgagtgtgtgggtgcccttatggaatgaggctggcttccaatcacttgacatgcgagggggacccaaccaatgaaccacccacggagcagtgtggcttattttccttcccctgtaaaaatggcagatgtgtgcccaattactatctctgtgatggagtcgatgattgtcatgataacagtgatgagcaactatgtggcacacttaataatacctgttcatcttcggcgttcacctgtggccatggggagtgcattcctgcacactggcgctgtgacaaacgcaacgactgtgtggatggcagtgatgagcacaactgccccacccacgcacctgcttcctgccttgacacccaatacacctgtgataatcaccagtgtatctcaaagaactgggtctgtgacacagacaatgattgtggggatggatctgatgaaaagaactgcaattcgacagagacatgccaacctagtcagtttaattgccccaatcatcgatgtattgacctatcgtttgtctgtgatggtgacaaggattgtgttgatggatctgatgaggttggttgtgtattaaactgtactgcttctcaattcaagtgtgccagtggggataaatgtattggcgtcacaaatcgttgtgatggtgtttttgattgcagtgacaactcggatgaagcgggctgtccaaccaggcctcctggtatgtgccactcagatgaatttcagtgccaagaagatggtatctgcatcccgaacttctgggaatgtgatgggcatccagactgcctctatggatctgatgagcacaatgcctgtgtccccaagacttgcccttcatcatatttccactgtgacaacggaaactgcatccacagggcatggctctgtgatcgggacaatgactgcggggatatgagtgatgagaaggactgccctactcagccctttcgctgtcctagttggcaatggcagtgtcttggccataacatctgtgtgaatctgagtgtagtgtgtgatggcatctttgactgccccaatgggacagatgagtccccactttgcaatgggaacagctgctcagatttcaatggtggttgtactcacgagtgtgttcaagagccctttggggctaaatgcctatgtccattgggattcttacttgccaatgattctaagacctgtgaagacatagatgaatgtgatattctaggctcttgtagccagcactgttacaatatgagaggttctttccggtgctcgtgtgatacaggctacatgttagaaagtgatgggaggacttgcaaagttacagcatctgagagtctgctgttacttgtggcaagtcagaacaaaattattgccgacagtgtcacctcccaggtccacaatatctattcattggtcgagaatggttcttacattgtagctgttgattttgattcaattagtggtcgtatcttttggtctgatgcaactcagggtaaaacctggagtgcgtttcaaaatggaacggacagaagagtggtatttgacagtagcatcatcttgactgaaactattgcaatagattgggtaggtcgtaatctttactggacagactatgctctggaaacaattgaagtctccaaaattgatgggagccacaggactgtgctgattagtaaaaacctaacaaatccaagaggactagcattagatcccagaatgaatgagcatctactgttctggtctgactggggccaccaccctcgcatcgagcgagccagcatggacggcagcatgcgcactgtcattgtccaggacaagatcttctggccctgcggcttaactattgactaccccaacagactgctctacttcatggactcctatcttgattacatggacttttgcgattataatggacaccatcggagacaggtgatagccagtgatttgattatacggcacccctatgccctaactctctttgaagactctgtgtactggactgaccgtgctactcgtcgggttatgcgagccaacaagtggcatggagggaaccagtcagttgtaatgtataatattcaatggccccttgggattgttgcggttcatccttcgaaacaaccaaattccgtgaatccatgtgccttttcccgctgcagccatctctgcctgctttcctcacaggggcctcatttttactcctgtgtttgtccttcaggatggagtctgtctcctgatctcctgaattgcttgagagatgatcaacctttcttaataactgtaaggcaacatataatttttggaatctcccttaatcctgaggtgaagagcaatgatgctatggtccccatagcagggatacagaatggtttagatgttgaatttgatgatgctgagcaatacatctattgggttgaaaatccaggtgaaattcacagagtgaagacagatggcaccaacaggacagtatttgcttctatatctatggtggggccttctatgaacctggccttagattggatttcaagaaacctttattctaccaatcctagaactcagtcaatcgaggttttgacactccacggagatatcagatacagaaaaacattgattgccaatgatgggacagctcttggagttggctttccaattggcataactgttgatcctgctcgtgggaagctgtactggtcagaccaaggaactgacagtggggttcctgccaagatcgccagtgctaacatggatggcacatctgtgaaaactctctttactgggaacctcgaacacctggagtgtgtcactcttgacatcgaagagcagaaactctactgggcagtcactggaagaggagtgattgaaagaggaaacgtggatggaacagatcggatgatcctggtacaccagctttcccacccctggggaattgcagtccatgattctttcctttattatactgatgaacagtatgaggtcattgaaagagttgataaggccactggggccaacaaaatagtcttgagagataatgttccaaatctgaggggtcttcaagtttatcacagacgcaatgccgccgaatcctcaaatggctgtagcaacaacatgaatgcctgtcagcagatttgcctgcctgtaccaggaggattgttttcctgcgcctgtgccactggatttaaactcaatcctgataatcggtcctgctctccatataactctttcattgttgtttcaatgctgtctgcaatcagaggctttagcttggaattgtcagatcattcagaaaccatggtgccggtggcaggccaaggacgaaacgcactgcatgtggatgtggatgtgtcctctggctttatttattggtgtgattttagcagctcagtggcatctgataatgcgatccgtagaattaaaccagatggatcttctctgatgaacattgtgacacatggaataggagaaaatggagtccggggtattgcagtggattgggtagcaggaaatctttatttcaccaatgcctttgtttctgaaacactgatagaagttctgcggatcaatactacttaccgccgtgttcttcttaaagtcacagtggacatgcctaggcatattgttgtagatcccaagaacagatacctcttctgggctgactatgggcagagaccaaagattgagcgttctttccttgactgtaccaatcgaacagtgcttgtgtcagagggcattgtcacaccacggggcttggcagtggaccgaagtgatggctacgtttattgggttgatgattctttagatataattgcaaggattcgtatcaatggagagaactctgaagtgattcgttatggcagtcgttacccaactccttatggcatcactgtttttgaaaattctatcatatgggtagataggaatttgaaaaagatcttccaagccagcaaggaaccagagaacacagagccacccacagtgataagagacaatatcaactggctaagagatgtgaccatctttgacaagcaagtccagccccggtcaccagcagaggtcaacaacaacccttgcttggaaaacaatggtgggtgctctcatctctgctttgctctgcctggattgcacaccccaaaatgtgactgtgcctttgggaccctgcaaagtgatggcaagaattgtgccatttcaacagaaaatttcctcatctttgccttgtctaattccttgagaagcttacacttggaccctgaaaaccatagcccacctttccaaacaataaatgtggaaagaactgtcatgtctctagactatgacagtgtaagtgatagaatctacttcacacaaaatttagcctctggagttggacagatttcctatgccaccctgtcttcagggatccatactccaactgtcattgcttcaggtatagggactgctgatggcattgcctttgactggattactagaagaatttattacagtgactacctcaaccagatgattaattccatggctgaagatgggtctaaccgcactgtgatagcccgcgttccaaaaccaagagcaattgtgttagatccctgccaagggtacctgtactgggctgactgggatacacatgccaaaatcgagagagccacattgggaggaaacttccgggtacccattgtgaacagcagtctggtcatgcccagtgggctgactctggactatgaagaggaccttctctactgggtggatgctagtctgcagaggattgaacgcagcactctgacgggcgtggatcgtgaagtcattgtcaatgcagccgttcatgcttttggcttgactctctatggccagtatatttactggactgacttgtacacacaaagaatttaccgagctaacaaatatgacgggtcaggtcagattgcaatgaccacaaatttgctctcccagcccaggggaatcaacactgttgtgaagaaccagaaacaacagtgtaacaatccttgtgaacagtttaatgggggctgcagccatatctgtgcaccaggtccaaatggtgccgagtgccagtgtccacatgagggcaactggtatttggccaacaacaggaagcactgcattgtggacaatggtgaacgatgtggtgcatcttccttcacctgctccaatgggcgctgcatctcggaagagtggaagtgtgataatgacaacgactgtggggatggcagtgatgagatggaaagtgtctgtgcacttcacacctgctcaccgacagccttcacctgtgccaatgggcgatgtgtccaatactcttaccgctgtgattactacaatgactgtggtgatggcagtgatgaggcagggtgcctgttcagggactgcaatgccaccacggagtttatgtgcaataacagaaggtgcatacctcgtgagtttatctgcaatggtgtagacaactgccatgataataacacttcagatgagaaaaattgccctgatcgcacttgccagtctggatacacaaaatgtcataattcaaatatttgtattcctcgcgtttatttgtgtgacggagacaatgactgtggagataacagtgatgaaaaccctacttattgcaccactcacacatgcagcagcagtgagttccaatgcgcatctgggcgctgtattcctcaacattggtattgtgatcaagaaacagattgttttgatgcctctgatgaacctgcctcttgtggtcactctgagcgaacatgcctagctgatgagttcaagtgtgatggtgggaggtgcatcccaagcgaatggatctgtgacggtgataatgactgtggggatatgagtgacgaggataaaaggcaccagtgtcagaatcaaaactgctcggattccgagtttctctgtgtaaatgacagacctccggacaggaggtgcattccccagtcttgggtctgtgatggcgatgtggattgtactgacggctacgatgagaatcagaattgcaccaggagaacttgctctgaaaatgaattcacctgtggttacggactgtgtatcccaaagatattcaggtgtgaccggcacaatgactgtggtgactatagcgacgagaggggctgcttataccagacttgccaacagaatcagtttacctgtcagaacgggcgctgcattagtaaaaccttcgtctgtgatgaggataatgactgtggagacggatctgatgagctgatgcacctgtgccacaccccagaacccacgtgtccacctcacgagttcaagtgtgacaatgggcgctgcatcgagatgatgaaactctgcaaccacctagatgactgtttggacaacagcgatgagaaaggctgtggcattaatgaatgccatgacccttcaatcagtggctgcgatcacaactgcacagacaccttaaccagtttctattgttcctgtcgtcctggttacaagctcatgtctgacaagcggacttgtgttgatattgatgaatgcacagagatgccttttgtctgtagccagaagtgtgagaatgtaataggctcctacatctgtaagtgtgccccaggctacctccgagaaccagatggaaagacctgccggcaaaacagtaacatcgaaccctatctcatttttagcaaccgttactatttgagaaatttaactatagatggctatttttactccctcatcttggaaggactggacaatgttgtggcattagattttgaccgagtagagaagagattgtattggattgatacacagaggcaagtcattgagagaatgtttctgaataagacaaacaaggagacaatcataaaccacagactaccagctgcagaaagtctggctgtagactgggtttccagaaagctctactggttggatgcccgcctggatggcctctttgtctctgacctcaatggtggacaccgccgcatgctggcccagcactgtgtggatgccaacaacaccttctgctttgataatcccagaggacttgcccttcaccctcaatatgggtacctctactgggcagactggggtcaccgcgcatacattgggagagtaggcatggatggaaccaacaagtctgtgataatctccaccaagttagagtggcctaatggcatcaccattgattacaccaatgatctactctactgggcagatgcccacctgggttacatagagtactctgatttggagggccaccatcgacacacggtgtatgatggggcactgcctcaccctttcgctattaccatttttgaagacactatttattggacagattggaatacaaggacagtggaaaagggaaacaaatatgatggatcaaatagacagacactggtgaacacaacacacagaccatttgacatccatgtgtaccatccatataggcagcccattgtgagcaatccctgtggtaccaacaatggtggctgttctcatctctgcctcatcaagccaggaggaaaagggttcacttgcgagtgtccagatgacttccgcacccttcaactgagtggcagcacctactgcatgcccatgtgctccagcacccagttcctgtgcgctaacaatgaaaagtgcattcctatctggtggaaatgtgatggacagaaagactgctcagatggctctgatgaactggccctttgcccgcagcgcttctgccgactgggacagttccagtgcagtgacggcaactgcaccagcccgcagactttatgcaatgctcaccaaaattgccctgatgggtctgatgaagaccgtcttctttgtgagaatcaccactgtgactccaatgaatggcagtgcgccaacaaacgttgcatcccagaatcctggcagtgtgacacatttaacgactgtgaggataactcagatgaagacagttcccactgtgccagcaggacctgccggccgggccagtttcggtgtgctaatggccgctgcatcccgcaggcctggaagtgtgatgtggataatgattgtggagaccactcggatgagcccattgaagaatgcatgagctctgcccatctctgtgacaacttcacagaattcagctgcaaaacaaattaccgctgcatcccaaagtgggccgtgtgcaatggtgtagatgactgcagggacaacagtgatgagcaaggctgtgaggagaggacatgccatcctgtgggggatttccgctgtaaaaatcaccactgcatccctcttcgttggcagtgtgatgggcaaaatgactgtggagataactcagatgaggaaaactgtgctccccgggagtgcacagagagcgagtttcgatgtgtcaatcagcagtgcattccctcgcgatggatctgtgaccattacaacgactgtggggacaactcagatgaacgggactgtgagatgaggacctgccatcctgaatattttcagtgtacaagtggacattgtgtacacagtgaactgaaatgcgatggatccgctgactgtttggatgcgtctgatgaagctgattgtcccacacgctttcctgatggtgcatactgccaggctactatgttcgaatgcaaaaaccatgtttgtatcccgccatattggaaatgtgatggcgatgatgactgtggcgatggttcagatgaagaacttcacctgtgcttggatgttccctgtaattcaccaaaccgtttccggtgtgacaacaatcgctgcatttatagtcatgaggtgtgcaatggtgtggatgactgtggagatggaactgatgagacagaggagcactgtagaaaaccgacccctaaaccttgtacagaatatgaatataagtgtggcaatgggcattgcattccacatgacaatgtgtgtgatgatgccgatgactgtggtgactggtccgatgaactgggttgcaataaaggaaaagaaagaacatgtgctgaaaatatatgcgagcaaaattgtacccaattaaatgaaggaggatttatctgctcctgtacagctgggttcgaaaccaatgtttttgacagaacctcctgtctagatatcaatgaatgtgaacaatttgggacttgtccccagcactgcagaaataccaaaggaagttatgagtgtgtctgtgctgatggcttcacgtctatgagtgaccgccctggaaaacgatgtgcagctgagggtagctctcctttgttgctactgcctgacaatgtccgaattcgaaaatataatctctcatctgagaggttctcagagtatcttcaagatgaggaatatatccaagctgttgattatgattgggatcccaaggacataggcctcagtgttgtgtattacactgtgcgaggggagggctctaggtttggtgctatcaaacgtgcctacatccccaactttgaatccggccgcaataatcttgtgcaggaagttgacctgaaactgaaatacgtaatgcagccagatggaatagcagtggactgggttggaaggcatatttactggtcagatgtcaagaataaacgcattgaggtggctaaacttgatggaaggtacagaaagtggctgatttccactgacctggaccaaccagctgctattgctgtgaatcccaaactagggcttatgttctggactgactggggaaaggaacctaaaatcgagtctgcctggatgaatggagaggaccgcaacatcctggttttcgaggaccttggttggccaactggcctttctatcgattatttgaacaatgaccgaatctactggagtgacttcaaggaggacgttattgaaaccataaaatatgatgggactgataggagagtcattgcaaaggaagcaatgaacccttacagcctggacatctttgaagaccagttatactggatatctaaggaaaagggagaagtatggaaacaaaataaatttgggcaaggaaagaaagagaaaacgctggtagtgaacccttggctcactcaagttcgaatctttcatcaactcagatacaataagtcagtgcccaacctttgcaaacagatctgcagccacctctgccttctgagacctggaggatacagctgtgcctgtccccaaggctccagctttatagaggggagcaccactgagtgtgatgcagccatcgaactgcctatcaacctgccccccccatgcaggtgcatgcacggaggaaattgctattttgatgagactgacctccccaaatgcaagtgtcctagcggctacaccggaaaatattgtgaaatggcgttttcaaaaggcatctctccaggaacaaccgcagtagctgtgctgttgacaatcctcttgatcgtcgtaattggagctctggcaattgcaggattcttccactatagaaggaccggctcccttttgcctgctctgcccaagctgccaagcttaagcagtctcgtcaagccctctgaaaatgggaatggggtgaccttcagatcaggggcagatcttaacatggatattggagtgtctggttttggacctgagactgctattgacaggtcaatggcaatgagtgaagactttgtcatggaaatggggaagcagcccataatatttgaaaacccaatgtactcagccagagacagtgctgtcaaagtggttcagccaatccaggtgactgtatctgaaaatgtggataataagaattatggaagtcccataaacccttctgagatagttccagagacaaacccaacttcaccagctgctgatggaactcaggtgacaaaatggaatctcttcaaacgaaaatctaaacaaactaccaactttgaaaatccaatctatgcacagatggagaacgagcaaaaggaaagtgttgctgcgacaccacctccatcaccttcgctccctgctaagcctaagcctccttcgagaagagacccaactccaacctattctgcaacagaagacacttttaaagacaccgcaaatcttgttaaagaagactctgaagtatagctataccagctatttagggaataattagaaacacacttttgcacatatattttttacaaacagatgaaaaaagttaacattcagtactttatgaaaaaaatatatttttccctgtttgcctataggtggaggtatcctgtgtgtctttttttacttatgccgtctcatatttttacaaataattatcacaatgtactatatgtatatctttgcactgaagttgtctgaaggtaatactataaatatattgtatatttgtaaattttggaaagattatcctgttactgaatttgctaataaagatgtctgctgaaaaaaaa

SEQ ID NO: 13449 - DNA, 2759 bp, Homo sapiens
tgcccctccaccccagccagctcatgggccacgtggcctggcccagcctcagcacccagggccagtgaacagagccctggctggagtccaaacatgtggggcctggtgaggctcctgctggcctggctgggtggctggggctgcatggggcgtctggcagccccagcccgggcctgggcagggtcccgggaacacccagggcctgctctgctgcggactcgaaggagctgggtctggaaccagttctttgtcattgaggaatatgctggtccagagcctgttctcattggcaagctgcactcggatgttgaccggggagagggccgcaccaagtacctgttgaccggggagggggcaggcaccgtatttgtgattgatgaggccacaggcaatattcatgttaccaagagccttgaccgggaggaaaaggcgcaatatgtgctactggcccaagccgtggaccgagcctccaaccggcccctggagcccccatcagagttcatcatcaaagtgcaagacatcaacgacaatccacccatttttccccttgggccctaccatgccaccgtgcccgagatgtccaatgtcgggacatcagtgatccaggtgactgctcacgatgctgatgaccccagctatgggaacagtgccaagctggtgtacactgttctggatggactgcctttcttctctgtggacccccagactggagtggtgcgtacagccatccccaacatggaccgggagacacaggaggagttcttggtggtgatccaggccaaggacatgggcggccacatgggggggctgtcaggcagcactacggtgactgtcacgctcagcgatgtcaacgacaacccccccaagttcccacagagcctataccagttctccgtggtggagacagctggacctggcacactggtgggccggctccgggcccaggacccagacctgggggacaacgccctgatggcatacagcatcctggatggggaggggtctgaggccttcagcatcagcacagacttgcagggtcgagacgggctcctcactgtccgcaagcccctagactttgagagccagcgctcctactccttccgtgtcgaggccaccaacacgctcattgacccagcctatctgcggcgagggcccttcaaggatgtggcctctgtgcgtgtggcagtgcaagatgccccagagccacctgccttcacccaggctgcctaccacctgacagtgcctgagaacaaggccccggggaccctggtaggccagatctccgcggctgacctggactcccctgccagcccaatcagatactccatcctcccccactcagatccggagcgttgcttctctatccagcccgaggaaggcaccatccatacagcagcacccctggatcgcgaggctcgcgcctggcacaacctcactgtgctggctacagagctcgacagttctgcacaggcctcgcgcgtgcaagtggccatccagaccctggatgagaatgacaatgctccccagctggctgagccctacgatacttttgtgtgtgactctgcagctcctggccagctgattcaggtcatccgggccctggacagggatgaagttggcaacagtagccatgtctcctttcaaggtcctctgggccctgatgccaactttactgtccaggacaaccgagatggctccgccagcctgctgctgccctcccgccctgctccaccccgccatgccccctacttggttcccatagaactgtgggactgggggcagccggcgctgagcagcactgccacagtgactgttagtgtgtgccgctgccagcctgacggctctgtggcatcctgctggcctgaggctcacctctcagctgctgggctcagcaccggcgccctgcttgccatcatcacctgtgtgggtgccctgcttgccctggtggtgctcttcgtggccctgcggcggcagaagcaagaagcactgatggtactggaggaggaggacgtccgagagaacatcatcacctacgacgacgagggcggcggcgaggaggacaccgaggccttcgacatcacggccttgcagaacccggacggggcggcccccccggcgcccggccctcccgcgcgccgagacgtgttgccccgggcccgggtgtcgcgccagcccagaccccccggccccgccgacgtggcgcagctcctggcgctgcggctccgcgaggcggacgaggaccccggcgtacccccgtacgactcggtgcaggtgtacggctacgagggccgcggctcctcttgcggctccctcagctccctgggctccggcagcgaagccggcggcgcccccggccccgcggagccgctggacgactggggtccgctcttccgcaccctggccgagctgtatggggccaaggagcccccggccccctgagcgcccgggctggcccggcccaccgcggggggggggcagcgggcacaggccctctgagtgagccccacggggtccaggcgggcggcagcagcccaggggccccaggcctcctccctgtccttgtgtccctccttgcttccccggggcaccctcgctctcacctccctcctcctgagtcggtgtgtgtgtctctctccaggaatctttgtctctatctgtgacacgctcctctgtccgggcctgggtttcctgccctggccctggccctgcgatctctcactgtgattcctctccttcctccgtggcgttttgtctctgca

SEQ ID NO: 13450 - DNA, 1446 bp, Homo sapiens
gcagtatctagagttaacagtaggggatttatttttcaatctaaagtttttcacctctctctagtaagacatctgaaactcataagccatctttaagaatttcttacaaaaacatgctggaagacagtggatcttgtttgtatcctgaagatttttttctcttcgttattttaaattaattgtcaacagatgtgcaactgttaggttggttcttaagtcactcggagaagagagagatgcatctactcaaggttggcacttggagaaacaacactgcctcttcctggcttatgaagttcagtgttctttggcttgttagtcagaactgttgcagagcaagtgttgtttggatggcttatatgaacatatcatttcatgttgggaatcatgtgttgtcagagttgggagagactggagtctttggaagaagctccactttgaagagagtggcaggagttatagtgccaccagagggaaaaatccaaaatgcatgtaatcccaataccattttcagccgatcaaagtactcagagacctggcttgcacttattgaacggggaggttgtaccttcacacagaaaattaaagtggcaactgagaagggagccagtggagtgatcatctataacgttccaggtactggcaaccaggtgttccccatgtttcatcaggcatttgaagatgtcgttgtggttatgattggtaacttaaaaggcacggaaattttccatttaattaagaagggagttctcattacagccgtggttgaggtggggagaaagcacatcatctggatgaatcactatttggtctcttttgtgattgtcacaactgctaccttagcatatttcatcttttatcacattcatagactttgtttagcaaggattcagaaccggagatggcagcgattaacaacagatcttcagaacacatttggacaactccaacttcgagtagtaaaagagggggatgaagaaataaatccaaatggggatagctgcgtaatttgctttgaacgctataagcctaatgacatagttcgtattctgacttgtaaacattttttccacaagaattgcattgacccctggattttaccccatgggacatgccccatttgcaaatgtgatattcttaaagttttggggattcaagtggttgttgaaaatggaacagaacctttgcaagttctaatgtcaaatgaactgcctgaaaccttatcacctagtgaagaggagacaaataatgaagtttctcctgcaggaacctcagataaagtaatccatgtggaggagaaccctacttctcagaataatgacatccagcctcattcagtagtggaagatgttcatccttcaccttgatggcatgacttttgaggaagtgtattaaacctgtatgtgaaatcaggtcctaatactgacaagcagtttgtctgttaaa

SEQ ID NO: 13451 - DNA, 587 bp, Homo sapiens
taaatcttttctgcttactgaaaaggaagagtctgatgattagttactgatcctctttgcatttgtaaagctttggagatattgaatcatgttaccatttctgtttttttccaccctgttttcttccatatttactgaagctcagaagcagtattgggtctgcaactcatccgatgcaagtatttcatacacctactgtgataaaatgcaatacccaatttcaattaatgttaacccctgtatagaattgaaaggatccaaaggattattgcacattttctacattccaaggagagatttaaagcaattatatttcaatctctatataactgtcaacaccatgaatcttccaaagcgcaaagaagttatttgccgaggatctgatgacgattactctttttgcagagctctgaagggagagactgtgaatacaacaatatcattctccttcaagggaataaaattttctaagggaaaatacaaatgtgttgttgaagctatttctgggagcccagaagaaatgctcttttgcttggagtttgtcatcctacaccaacctaattcaaattagaataaattgagtattt

SEQ ID NO: 13452 - DNA, 4894 bp, Homo sapiens
cgccgcgggaggcggacgagatgcgagcgcggccgcggccccggccgctctgggcgactgtgctggcgctgggggcgctggcgggcgttggcgtaggagggcccaacatctgtaccacgcgaggtgtgagctcctgccagcagtgcctggctgtgagccccatgtgtgcctggtgctctgatgaggccctgcctctgggctcacctcgctgtgacctgaaggagaatctgctgaaggataactgtgccccagaatccatcgagttcccagtgagtgaggcccgagtactagaggacaggcccctcagcgacaagggctctggagacagctcccaggtcactcaagtcagtccccagaggattgcactccggctccggccagatgattcgaagaatttctccatccaagtgcggcaggtggaggattaccctgtggacatctactacttgatggacctgtcttactccatgaaggatgatctgtggagcatccagaacctgggtaccaagctggccacccagatgcgaaagctcaccagtaacctgcggattggcttcggggcatttgtggacaagcctgtgtcaccatacatgtatatctccccaccagaggccctcgaaaacccctgctatgatatgaagaccacctgcttgcccatgtttggctacaaacacgtgctgacgctaactgaccaggtgacccgcttcaatgaggaagtgaagaagcagagtgtgtcacggaaccgagatgccccagagggtggctttgatgccatcatgcaggctacagtctgtgatgaaaagattggctggaggaatgatgcatcccacttgctggtgtttaccactgatgccaagactcatatagcattggacggaaggctggcaggcattgtccagcctaatgacgggcagtgtcatgttggtagtgacaatcattactctgcctccactaccatggattatccctctttggggctgatgactgagaagctatcccagaaaaacatcaatttgatctttgcagtgactgaaaatgtagtcaatctctatcagaactatagtgagctcatcccagggaccacagttggggttctgtccatggattccagcaatgtcctccagctcattgttgatgcttatgggaaaatccgttctaaagtagagctggaagtgcgtgacctccctgaagagttgtctctatccttcaatgccacctgcctcaacaatgaggtcatccctggcctcaagtcttgtatgggactcaagattggagacacggtgagcttcagcattgaggccaaggtgcgaggctgtccccaggagaaggagaagtcctttaccataaagcccgtgggcttcaaggacagcctgatcgtccaggtcacctttgattgtgactgtgcctgccaggcccaagctgaacctaatagccatcgctgcaacaatggcaatgggacctttgagtgtggggtatgccgttgtgggcctggctggctgggatcccagtgtgagtgctcagaggaggactatcgcccttcccagcaggacgaatgcagcccccgggagggtcagcccgtctgcagccagcggggcgagtgcctctgtggtcaatgtgtctgccacagcagtgactttggcaagatcacgggcaagtactgcgagtgtgacgacttctcctgtgtccgctacaagggggagatgtgctcaggccatggccagtgcagctgtggggactgcctgtgtgactccgactggaccggctactactgcaactgtaccacgcgtactgacacctgcatgtccagcaatgggctgctgtgcagcggccgcggcaagtgtgaatgtggcagctgtgtctgtatccagccgggctcctatggggacacctgtgagaagtgccccacctgcccagatgcctgcacctttaagaaagaatgtgtggagtgtaagaagtttgaccggggagccctacatgacgaaaatacctgcaaccgttactgccgtgacgagattgagtcagtgaaagagcttaaggacactggcaaggatgcagtgaattgtacctataagaatgaggatgactgtgtcgtcagattccagtactatgaagattctagtggaaagtccatcctgtatgtggtagaagagccagagtgtcccaagggccctgacatcctggtggtcctgctctcagtgatgggggccattctgctcattggccttgccgccctgctcatctggaaactcctcatcaccatccacgaccgaaaagaattcgctaaatttgaggaagaacgcgccagagcaaaatgggacacagccaacaacccactgtataaagaggccacgtctaccttcaccaatatcacgtaccggggcacttaatgataagcagtcatcctcagatcattatcagcctgtgccacgattgcaggagtccctgccatcatgtttacagaggacagtatttgtggggagggatttggggctcagagtggggtaggttgggagaatgtcagtatgtggaagtgtgggtctgtgtgtgtgtatgtgggggtctgtgtgtttatgtgtgtgtgttgtgtgtgggagtgtgtaatttaaaattgtgatgtgtcctgataagctgagctccttagcctttgtcccagaatgcctcctgcagggattcttcctgcttagcttgagggtgactatggagctgagcaggtgttcttcattacctcagtgagaagccagctttcctcatcaggccattgtccctgaagagaagggcagggctgaggcctctcattccagaggaagggacaccaagccttggctctaccctgagttcataaatttatggttctcaggcctgactctcagcagctatggtaggaactgctgggcttggcagcccgggtcatctgtacctctgcctcctttcccctccctcaggccgaaggaggagtcagggagagctgaactattagagctgcctgtgccttttgccatcccctcaacccagctatggttctctcgcaagggaagtccttgcaagctaattctttgacctgttgggagtgaggatgtctgggccactcaggggtcattcatggcctgggggatgtaccagcatctcccagttcataatcacaacccttcagatttgccttattggcagctctactctggaggtttgtttagaagaagtgtgtcacccttaggccagcaccatctctttacctcctaattccacaccctcactgctgtagacatttgctatgagctggggatgtctctcatgaccaaatgcttttcctcaaagggagagagtgctattgtagagccagaggtctggccctatgcttccggcctcctgtccctcatccatagcacctccacatacctggccctgtgccttggtgtgctgtatccatccatggggctgattgtatttaccttctacctcttggctgccttgtgaaggaattattcccatgagttggctgggaataagtgccaggatggaatgatgggtcagttgtatcagcacgtgtggcctgttcttctatgggttggacaacctcattttaactcagtctttaatctgagaggccacagtgcaattttattttatttttctcatgatgaggttttcttaacttaaaagaacatgtatataaacatgcttgcattatatttgtaaatttatgtgatggcaaagaaggagagcataggaaaccacacagacttgggcagggtacagacactcccacttggcatcattcacagcaagtcactggccagtggctggatctgtgaggggctctctcatgatagaaggctatggggatagatgtgtggacacattggacctttcctgaggaagagggactgttcttttgtcccagaaaagcagtggctccattggtgttgacatacatccaacattaaaagccacccccaaatgcccaagaaaaaaagaaagacttatcaacatttgttccatgagcagaaaactggagctctggcctcagtgttacagctaaataatctttaattaaggcaagtcactttcttcttcttaaagctgttttctagtttgagaaatgatgggattttagcagccagtcttgaaggtctctttcagtatcaacattctaagatgctgggacttactgtgtcatcaaatgtgcggttaagattctctgggatattgatactgtttgtgtttttagttgggagatctgagagacctggctttggcaagagcagatgtcattccatatcacctttctcaatgaaagtctcattctatcctctctccaaacccgttttccaacatttgttaatagttacgtctctcctgatgtagcacttaagcttcatttagttattatttctttcttcactttgcacacatttgcatccacatattagggaagaggaatccataagtagctgaaatatctattctgtattattgtgttaacattgagaataagccttggaattagatatggggcaatgactgagccctgtctcacccatggattactccttactgtagggaatggcagtatggtagagggataaatagggggcggggagggatagtcatggatccaagaagtccttagaaatagtggcagggaacaggtgtggaagctcatgcctgtaattataaccttcagctactaagacaggtgtggtggctcacgcctgtgattataatcttcagttactaagacagagtccatgagagtgttaatgggacattttctttagataagatgttttatatgaagaaactgtatcaaagggggaagaaaatgtatttaacaggtgaatcaaatcaggaatcttgtctgagctactggaatgaagttcacaggtcttgaagacca

SEQ ID NO: 13453 - DNA, 8187 bp, Homo sapiens
cccgagaagcggcggggcggcgggccggcgggcggggcgcagagccaggcagcgcaggtatagccaggctggagaaaagaagctgccaccatggttgcactttcactgaagatcagcattgggaatgtggtgaagacgatgcagtttgagccgtctaccatggtgtacgacgcctgccgcatcattcgtgagcggatcccagaggccccagctggtcctcccagcgactttgggctctttctgtcagatgatgaccccaaaaagggtatatggctggaggctgggaaagctttggactactacatgctccgaaatggggacactatggagtacaggaagaaacagagacccctgaagatccgtatgctggatggaactgtgaagacgatcatggtggatgactctaagactgtcactgacatgctcatgaccatctgtgcccgcattggcatcaccaatcatgatgaatattcattggttcgagagctgatggaagagaaaaaggaggaaataacagggaccttaagaaaggacaagacattgctgcgagatgaaaagaagatggagaaactaaagcagaaattgcacacagatgatgagttgaactggctggaccatggtcggacactgagggagcagggtgtagaggagcacgagacgctgctgctgcggaggaagttcttttactcagaccagaatgtggattcccgggaccctgtacagctgaacctcctgtatgtgcaggcacgagatgacatcctgaatggctcccaccctgtctcctttgacaaggcctgtgagtttgctggcttccaatgccagatccagtttgggccccacaatgagcagaagcacaaggctggcttccttgacctgaaggacttcctgcccaaggagtatgtgaagcagaagggagagcgtaagatcttccaggcacacaagaattgtgggcagatgagtgagattgaggccaaggtccgctacgtgaagctagcccgttctctcaagacttacggtgtctccttcttcctggtgaaggaaaaaatgaaagggaagaacaagctagtgcccaggcttctgggcatcaccaaggagtgtgtgatgcgagtggatgagaagaccaaggaagtgatccaggagtggaacctcaccaacatcaaacgctgggctgcgtctcccaaaagcttcaccctggattttggagattaccaagatggctattactcagtacagacaactgaaggggagcagattgcacagctcattgccggctacatcgatatcatcctgaagaagaaaaaaagcaaggatcactttgggctggaaggagatgaggagtctactatgctggaggactcagtgtcccccaaaaagtcaacagtcctgcagcagcaatacaaccgggtggggaaagtggagcatggctctgtggccctgcctgccatcatgcgctctggagcctctggtcctgagaatttccaggtgggcagcatgccccctgcccagcagcagattaccagcggccagatgcaccgaggacacatgcctcctctgacttcagcccagcaggcactcactggaaccattaactccagcatgcaggccgtgcaggctgcccaggccaccctggatgactttgacactctgccgcctcttggccaggatgctgcctctaaggcctggcgtaaaaacaagatggatgaatcaaagcatgagatccactctcaggtagatgccatcacagctggtactgcgtctgtggtgaacctgacagcaggggaccctgctgagacagactataccgcagtgggctgtgcagtcaccacaatctcctccaacctgacggagatgtcccgtggggtgaagctgctggctgccttgctggaggacgaaggcggcagtggtcggcccctgttgcaggcagcaaagggccttgcgggagcagtgtcagaactgctgcgcagtgcccaaccagccagtgctgagccccgtcagaacctgctgcaagcagctgggaacgtgggccaggccagtggggagctgttgcaacaaattggggaaagtgatactgacccccacttccaggatgcgctaatgcagctcgccaaagctgtggcaagtgctgcagctgccctggtcctcaaggccaagagtgtggcccagcggacagaggactcgggacttcagacccaagttattgctgcagcaacacagtgtgccctatccacttcccaactagtggcctgtactaaggtggtggcacctacaatcagctcacctgtctgccaagagcaactggtggaggctggacgactggtagccaaagccgtggagggctgtgtgtctgcctcccaggcagctacagaggatgggcaactgttgcgaggggtaggagcagcagccacagctgtcacccaggccctaaatgagctgctgcagcatgtgaaagcccatgccacaggggctgggcctgctggccgttatgaccaggctactgacaccatcctaaccgtcactgagaacatctttagctccatgggtgatgctggggagatggtgggacaggcccgcatcctggcccaagccacatctgacctggtcaatgccatcaaggctgatgctgagggggaaagtgatctggagaactcccgcaagctcttaagtgctgccaagatcctagctgatgccacagccaagatggtagaggctgccaagggagcagctgcccaccctgacagtgaggagcagcagcagcggctgcgggaggcagctgaggggctgcgcatggccaccaatgcagctgcgcagaatgccatcaagaaaaagctggtgcagcgcctggagcatgcagccaagcaggctgcagcctcagccacacagaccatcgctgcagctcagcacgcagcctctacccccaaagcctctgccggcccccagcccctgctggtgcagagctgcaaggcagtggcagagcagattccactgctggtgcagggcgtccgaggaagccaagcccagcctgacagccccagcgctcagcttgccctcattgctgccagccagagcttcctgcagccaggtgggaagatggtggcagctgcaaaggcctcagtgccaacgattcaggaccaggcttcagccatgcagctgagtcagtgtgccaagaacctgggcaccgcgctggctgaactccggacggctgcccagaaggctcaggaagcatgtggacctttggagatggattctgcactgagtgtggtacagaatctagagaaagatctacaggaagtgaaggcagcagctcgagatggcaagcttaaacccttacctggggagacaatggagaagtgtacccaggacctgggcaacagcaccaaagccgtgagctcagccatcgcccagctactgggagaggttgcccagggcaatgagaattatgcaggtattgcagctcgggatgtggcaggtgggctgcggtcactggcccaggccgctaggggagtcgctgcactgacgtcagatcctgcagtgcaggccattgtacttgatacggccagtgatgtgctggacaaggccagcagcctcattgaggaggcgaaaaaggcagctggccatccaggggaccctgagagccagcagcggcttgcccaggtggctaaagcagtgacccaggctctgaaccgctgtgtcagctgcctacctggccagcgcgatgtggataatgccctgagggcagttggagatgccagcaagcgactcctgagtgactcgcttcctcctagcactgggacatttcaagaagctcagagccggttgaatgaagctgctgctgggctgaatcaggcagccacagaactggtgcaggcctctcggggaacccctcaggacctggctcgagcctcaggccgatttggacaggacttcagcaccttcctggaagctggtgtggagatggcaggccaggctccgagccaggaggaccgagcccaagttgtgtccaacttgaagggcatctccatgtcttcaagcaaacttcttctggctgccaaggccctgtccacggaccctgctgcccctaacctcaagagtcagctggctgcagctgccagggcagtaactgacagcatcaatcagctcatcactatgtgcacccagcaggcacccggccagaaggagtgtgataacgccctgcgggaattggagacggtccgggaactcctggagaacccagtccagcccatcaatgacatgtcctactttggttgcctggacagtgtaatggagaactcaaaggtgctgggcgaggccatgactggcatctcccaaaatgccaagaacggaaacctgccagagtttggagatgccatttccacagcctcaaaggcactttgtggcttcaccgaggcagctgcacaggctgcatatctggttggtgtctctgaccccaatagccaagctggacagcaagggctagtggagcccacacagtttgcccgtgcaaaccaggcaattcagatggcctgccagagtttgggagagcctggctgtacccaggcccaggtgctctctgcagccaccattgtggctaaacacacctctgcactgtgtaacagctgtcgcctggcttctgcccgtaccaccaatcctactgccaagcgccagtttgtacagtcagccaaggaggtggccaacagcacagctaatcttgtcaagaccatcaaggcgctagatggggccttcacagaggagaaccgtgcccagtgccgagcagcaacagcccctctgctggaggctgtggacaatctgagtgcctttgcgtccaaccctgagttctccagcattcctgcccagatcagccctgagggtcgggctgccatggagcccattgtgatctctgccaagacaatgttagagagtgccgggggactcatccagacagcccgggccctcgcagtcaatccccgggaccccccgagctggtcggtgctggccggccactcccgtactgtctcagactccatcaagaagctaattacaagcatgagggacaaggctccagggcagctggagtgtgaaacggccattgcagctctgaacagttgtctacgggacctagaccaggcttccctcgctgcagtcagccagcagcttgctccccgtgagggaatctctcaagaggccttgcacactcagatgctcactgcagtccaagagatctcccatctcattgagccgctggccaatgctgcccgggctgaagcctcccagctgggacacaaggtgtcccagatggcgcagtactttgagccgctcaccctggctgcagtgggtgctgcctccaagaccctgagccacccgcagcagatggcactcctggaccagactaaaacattggcagagtctgccctgcagttgctatacactgccaaggaggctggtggtaacccaaagcaagcagctcacacccaggaagccctggaggaggctgtgcagatgatgaccgaggccgtagaggacctgacaacaaccctcaacgaggcagccagtgctgctggggtcgtgggtggcatggtggactccatcacccaggccatcaaccagctagatgaaggaccaatgggtgaaccagaaggttccttcgtggattaccaaacaactatggtgcggacagccaaggccattgcagtgaccgttcaggagatggttaccaagtcaaacaccagcccagaggagctgggccctcttgctaaccagctgaccagtgactatggccgtctggcctcggaggccaagcctgcagcggtggctgctgaaaatgaagagataggttcccatatcaaacaccgggtacaggagctgggccatggctgtgccgctctggtcaccaaggcaggcgccctgcagtgcagccccagtgatgcctacaccaagaaggagctcatagagtgtgcccggagagtctctgagaaggtctcccacgtcctggctgcgctccaggctgggaatcgtggcacccaggcctgcatcacagcagccagcgctgtgtctggtatcattgctgacctcgacaccaccatcatgttcgccactgctggcacgctcaatcgtgagggtactgaaactttcgctgaccaccgggagggcatcctgaagactgcgaaggtgctggtggaggacaccaaggtcctggtgcaaaacgcagctgggagccaggagaagttggcgcaggctgcccagtcctccgtggcgaccatcacccgcctcgctgatgtggtcaagctgggtgcagccagcctgggagctgaggaccctgagacccaggtggtactaatcaacgcagtgaaagatgtagccaaagccctgggagacctcatcagtgcaacgaaggctgcagctggcaaagttggagatgaccctgctgtgtggcagctaaagaactctgccaaggtgatggtgaccaatgtgacatcattgcttaagacagtaaaagccgtggaagatgaggccaccaaaggcactcgggccctggaggcaaccacagaacacatacggcaggagctggcggttttctgttccccagagccacctgccaagacctctaccccagaagacttcatccgaatgaccaagggtatcaccatggcaaccgccaaggccgttgctgctggcaattcctgtcgccaggaagatgtcattgccacagccaatctgagccgccgtgctattgcagatatgcttcgggcttgcaaggaagcagcttaccacccagaagtggcccctgatgtgcggcttcgagccctgcactatggccgggagtgtgccaatggctacctggaactgctggaccatgtactgctgaccctgcagaagccaagcccagaactgaagcagcagttgacaggacattcaaagcgtgtggctggttccgtcactgagctcatccaggctgctgaagccatgaagggaacagaatgggtagacccagaggaccccacagtcattgctgagaatgagctcctgggagctgcagccgccattgaggctgcagccaaaaagctagagcagctgaagccccgggccaaacccaaggaggcagatgagtccttgaactttgaggagcagatactagaagctgccaagtccattgcagcagccaccagtgcactggtaaaggctgcgtcggctgcccagagagaactagtggcccaagggaaggtgggtgccattccagccaatgcactggacgatgggcagtggtcccagggcctcatttctgctgcccggatggtggctgcggccaccaacaatctgtgtgaggcagccaatgcagctgtacaaggccatgccagccaggagaagctcatctcatcagccaagcaggtagctgcctccacagcccagctccttgtggcctgcaaggtcaaggctgaccaggactcggaggcaatgaaacgacttcaggctgctggcaacgcagtgaagcgagcctcagataatctggtgaaagcagcacagaaggctgcagcctttgaagagcaggagaatgagacagtggtggtgaaagagaagatggttggcggcattgcccagatcatcgcagcacaggaagaaatgcttcggaaggaacgagagctggaagaggcgcggaagaaactggcccagatccggcagcagcagtacaagtttctgccttcagagcttcgagatgagcactaaagaagcctcttctatttaatgcagacccggcccagagactgtgcgtgccactaccaaagccttctgggctgtcggggcccaacctgcccaaccccagcactccccaaagtgcctgccaaaccccagggcctggccccgcccagtcccgcagtacatcccctgtcccctccccaaccccaagtgccttcatgccctagggccccccaagtgcctgcccctccccagagtattaacgctccaagagtattattaacgctgctgtacctcgatctgaatctgccggggccccagcccactccaccctgccagcagcttccagccagtccccacagcctcatcagctctcttcaccgttttttgatactatcttcccccacccccagctacccataggggctgcagagttataagccccaaacaggtcatgctccaataaaaatgattctacctacaaaaaaaaaaaaaaaaaaa

SEQ ID NO: 13454 - DNA, 5284 bp, Homo sapiens
gattccagctctcgcgcccgacgaggtggatttggctgtccaccgagctccggcgcctgtcgttctaattgggtttggatttgcaccgttaaggaggggggaagagaaggaagaggcgggcgaggaaggcgagtccagctagcggctgttgcggggaccgtagccccagctgcagctccgaagaatcccccgccacggtttcggtggagcgtctgggcacgggatggagtgaaagagcgagtgcctctccaagcgggggtgggagggggtcaggctgtgcagaggagagagacagcgagaagaagccgcggctggctactgcgaatttgggattcgattgggagggaccgctcactcgggggaaatggattctttaccacggctgaccagcgttttgactttgctgttctctggcttgtggcatttaggattaacagcgacaaactacaactgtgatgatccactagcatccctgctctctccaatggctttttccagttcctcagacctcactggcactcacagcccagctcaactcaactggagagttggaactggcggttggtccccagcagattccaatgctcaacagtggctccagatggacctgggaaacagagtagagattacagcagtggccacgcagggaagatacggaagctctgactgggtgacgagttacagcctgatgttcagtgacacaggacgcaactggaaacagtacaaacaagaagacagcatctggacctttgcaggaaacatgaatgctgacagcgtggtgcaccacaagctattgcactcagtgagagcccgatttgttcgctttgtgcccctggaatggaatcccagtgggaagattggcatgagagtcgaggtctacggatgttcctataaatcagatgttgctgactttgatggccgaagctcacttctgtacaggttcaatcagaagttgatgagtactctcaaagatgtgatctccctgaagttcaagagcatgcaaggagatggggtcctgttccatggagaaggtcagcgtggagaccacatcaccttggaactccagaaggggaggctcgccctacacctcaatttgggtgacagcaaagcgcggctcagcagcagcttgccctctgccaccctgggcagcctcctggatgaccagcactggcactcggtcctcattgagcgggtgggcaagcaggtgaacttcacggtggacaagcacacacagcacttccgcaccaagggcgagacggatgccttagacattgactatgagcttagttttggaggaattccagtaccaggaaaacctgggacctttttaaagaaaaacttccatggatgcatcgaaaacctttactacaatggagtaaacataattgacctggctaagagacgaaagcatcagatctatactggcaatgtcactttttcctgctccgaaccacagattgtgcccatcacatttgtcaactccagcggcagctatttgctgctgcccggcaccccccaaattgatgggctctcagtgagtttccagtttcgaacatggaacaaggatggtctgcttctgtccacagagctgtctgagggctcgggaaccctgctgctgagcctggagggtggaatcctgagactcgtgattcagaaaatgacagaacgcgtagctgaaatcctcacaggcagcaacttgaatgatggcctgtggcactcggttagcatcaacgccaggaggaaccgcatcacgctcactctggatgatgaagcagcacccccggctccagacagcacttgggtgcagatttattctggaaatagctactattttggagggtgccccgacaatctcaccgattcccaatgtttaaatcccattaaggctttccaaggctgcatgaggctcatctttattgataaccagcccaaggacctcatttcagttcagcaaggttccctggggaattttagtgatttacacattgatctgtgtagcatcaaagacaggtgtttgccaaactactgtgaacatggaggaagctgctcccagtcctggactaccttctattgtaactgcagtgacacaagttacactggtgccacctgccacaactccatctacgagcaatcctgcgaggtgtacaggcaccaggggaatacagccggcttcttctacatcgactcagatggcagcggcccactgggacctctccaggtgtactgcaatatcactgaggacaagatctggacatcagtgcagcacaacaatacagagctgacccgagtgcggggcgctaaccctgagaagccctatgccatggccttggactacgggggcagcatggaacagctggaggccgtgatcgacggctctgagcactgtgagcaggaggtggcctaccactgcaggaggtcccgcctgctcaacacgccggatggaacaccatttacctggtggattgggcggtccaatgaaaggcacccttactggggaggttcccctcctggggtccagcagtgtgagtgtggcctagacgagagctgcctggacattcagcacttttgcaattgcgacgctgacaaggatgaatggacaaatgatactggctttctttccttcaaagaccacttgcctgtcactcagatagttatcactgataccgacagatcaaactcagaagccgcttggagaattggtcccttgcgttgctatggtgaccgacgcttctggaacgccgtctcattttatacagaagcctcttacctccactttcctaccttccatgcggaattcagtgccgatatttccttcttttttaaaaccacagcattatccggagttttcctagaaaatcttggcattaaagacttcattcgactcgaaataagctctccttcagagatcacctttgccatcgatgttgggaatggtcctgtggagcttgtagtccagtctccttctcttctgaatgacaaccaatggcactatgtccgggctgagaggaacctcaaggagacctccctgcaggtggacaaccttccaaggagcaccagggagacgtcggaggagggccattttcgactgcagctgaacagccagttgtttgtagggggaacgtcatccagacagaaaggcttcctaggatgcattcgctccttacacttgaatggacagaaaatggacctggaagagagggcaaaggtcacatctggagtcaggccaggctgccccggccactgcagcagctacggcagcatctgccacaacgggggcaagtgtgtggagaagcacaatggctacctgtgtgattgcaccaattcaccttatgaagggcccttttgcaaaaaagaggtttctgctgtttttgaggctggcacgtcggttacttacatgtttcaagaaccctatcctgtgaccaagaatataagcctctcatcctcagctatttacacagattcagctccatccaaggaaaacattgcacttagctttgtgacaacccaggcacccagtcttttgctctttatcaattcttcttctcaggacttcgtggttgttctgctctgcaagaatggaagcttacaggttcgctatcacctaaacaaggaagaaacccatgtattcaccattgatgcagataactttgctaacagaaggatgcaccacttgaagattaaccgagagggaagagagcttaccattcagatggaccagcaacttcgactcagttataacttctctccggaagtagagttcagggttataaggtcactcaccttgggcaaagtcacagagaatcttggtttggattctgaagttgctaaagcaaatgccatgggttttgctggatgcatgtcttccgtccagtacaaccacatagcaccactgaaggctgccctgcgccatgccactgtcgcgcctgtgactgtccatgggaccttgacggaatccagctgtggcttcatggtggactcagatgtgaatgcagtgaccacggtgcattcttcatcagatccttttgggaagacagatgagcgggaaccactcacaaatgctgttcgaagtgattcggcagtcatcggaggggtgatagcagtggtgatattcatcatcttctgtatcatcggcatcatgacccggttcctctaccagcacaagcagtcacatcgtacgagccagatgaaggagaaggaatatccagaaaatttggacagttccttcagaaatgaaattgacttgcaaaacacagtgagcgagtgtaaacgggaatatttcatctgagaaactgcagggttcctactactcttttttcttgttgttcaattatctcctccccctcttctctcctgtcttttgatttggtcattctctttattttctgcttgccatgtcttttctggaacatacttgcatccaccacagcatcaattcccttgatccagcccaagagaccaggcagccatggccactgccttcctctctgatgaacctatcgggtgaaaacgaccactcaagagactgacttcgccattcaagacaaggaagagacacatgtgtgcactcctgcatgttcagttctgtacttccagtttctaaaatgcactgttcagttttccaaccacttggtggttcaggcttgctttgaacctgagctcttaggcacatgacggtcattcctgacatcctccccagctcaagtctattcttaccatagaacccagggcagggagagaagaacctagaggcctggtttgctttggtggcattgtaaaaagagtaagagaggtttggtttgtggtggtttgctttctttaccataagcaatcccttgccttaactcatcaccctttttcactatgacccttagaccctgagtattttcaaatatatgattgctgatagtagtgaccaaaactactttgttcctttcttaccactctctcctggggccgacacgttgggacagcacaccatagcataaagctaggggatgcatggaaatagcagcttgaaactaggaggtaacaagaaagcttctaggaagtagatgttccatatcttcaaaatgcctcctccaattttgtaagaatgctagctaggtattcctgggattattatactgagatatatatatatacacacacacacacatatgtgtatatatgtatatatatatgtgagtatatatacacacacacacacacacacacatatatatatatacacacacgcacacatatatgttgctgcagcataaagaaattgaaataaaagtttaaa

SEQ ID NO: 13455 - DNA, 2071 bp, Homo sapiens
gtagaggctgaggcaccgcccagagctcgctgagacagagactgagaacgcccccggccagattccccccggagagacccgggtagggacagggacagagagacgcctctaggggcagaggccctgggaggcaaagacccccaggagagatttacccaccccagacggaaagcgcggctcagagtcggacgaggggagactgtcagaggacaacgccccctaggtctcctgggagaccccgaagcgaccccgggggcagcccgggccgtgtccgggcgagggtgacctatccttggttgagagcgatggggacacaagccctgcagggcttcctctttctcctcttcctcccgctgctgcagccgcgtggggcctcggctgggagcctgcacagtccaggcctgtccgaatgcttccaggtgaatggggctgactaccgcggccaccagaaccgcactggcccgcgcggggcgggccgcccgtgcctcttctgggaccagacgcagcaacacagctacagcagcgccagcgacccccacggccgctgggggctgggcgcgcacaacttctgccgtaacccagacggtgacgtgcagccgtggtgctacgtggctgagacagaggagggcatctactggcgctactgcgacatcccctcctgtcacatgccaggctacctgggatgctttgtggactcaggggcacccccagccctcagcggccccagcggcacctccacgaagctcacggtccaggtgtgcctacgcttctgccgcatgaaggggtaccagctggcgggcgtggaggccggttacgcctgcttctgtggctctgaaagcgacctggcccggggacgcctggcccccgccaccgactgtgaccagatctgtttcggccaccctggacagctgtgtggcggcgatgggcggctgggcgtctatgaagtgtcggtgggctcctgccaggggaactggacagcgcctcagggcgtcatctactccccggacttcccggacgagtacgggccggaccggaactgcagctgggccctgggcccgccaggcgccgcgctggagctcaccttccgcctcttcgagctggccgacccgcgcgaccggctggagctgcgcgacgcggcttcgggcagcctgctccgcgccttcgatggcgcccgcccaccgccgtccgggccgctgcgcctgggcactgccgcgctgctgctcaccttccgaagcgacgcgcgcggccacgcgcaaggcttcgcgctcacctaccgcgggctgcaggacgccgctgaggacccagaggcccccgagggctcggcccagacccccgcggcgcccctcgacggggccaacgtgagctgcagccccaggcctggggctccgccggccgcgattggggcccgggtcttctcgacggtgacggctgtctcggtgctgctgctgctgctcctggggctgctgcgtccgctgcgccgacggagctgtctgctggctccgggaaaagggcccccggcgctgggggcttccaggggccccaggagaagctgggctgtgtggtaccaacagccccgaggggtggccttgccctgctcccccggggacccccaggctgagggttctgccgcgggctaccggcctctgagtgcctccagccagagctccctgcgctcgctcatctccgctctctgactctgggccccgagggtccgctgggcccgccgccggcgagatggacacctgagatgctgtgctgcgccctgcctcggccttgcgcctgtgtaggggcagctcggcctctggtcgccttggggagaccaaaagtcggacaggaaacatctggtgctattatctgggacttggcctgaccgtgggggtccagatggtccaggccctctccatggacctgtatgtgggggtggtctctggtttcggaggtctttgaacccctctgggggtggtcctggactgccgtcctcagtgagaggtcacaggtcagcaaaaacagtcaaaaaacccccacagattttgaataaaggatctactttggtaaaaaaaaaaaaaaaaaa

SEQ ID NO: 13456 - DNA, 1992 bp, Homo sapiens
gtagaggctgaggcaccgcccagagctcgctgagacagagactgagaacgcccccggccagattccccccggagagacccgggtagggacagggacagagagacgcctctaggggcagaggccctgggaggcaaagacccccaggagagatttacccaccccagacggaaagcgcggctcagagtcggacgaggggagactgtcagaggacaacgccccctaggtctcctgggagaccccgaagcgaccccgggggcagcccgggccgtgtccgggcgagggtgacctatccttggttgagagcgatggggacacaagccctgcagggcttcctctttctcctcttcctcccgctgctgcagccgcgtggggcctcggctgggagcctgcacagtccaggcctgtccgaatgcttccaggtgaatggggctgactaccgcggccaccagaaccgcactggcccgcgcggggcgggccgcccgtgcctcttctgggaccagacgcagcaacacagctacagcagcgccagcgacccccacggccgctgggggctgggcgcgcacaacttctgccgtaacccagacggtgacgtgcagccgtggtgctacgtggctgagacagaggagggcatctactggcgctactgcgacatcccctcctgtcacatgccaggctacctgggatgctttgtggactcaggggcacccccagccctcagcggccccagcggcacctccacgaagctcacggtccaggtgtgcctacgcttctgccgcatgaaggggtaccagctggcgggcgtggaggccggttacgcctgcttctgtggctctgaaagcgacctggcccggggacgcctggcccccgccaccgactgtgaccagatctgtttcggccaccctggacagctgtgtggcggcgatgggcggctgggcgtctatgaagtgtcggtgggctcctgccaggggaactggacagcgcctcagggcgtcatctactccccggacttcccggacgagtacgggccggaccggaactgcagctgggccctgggcccgccaggcgccgcgctggagctcaccttccgcctcttcgagctggccgacccgcgcgaccggctggagctgcgcgacgcggcttcgggcagcctgctccgcgccttcgatggcgcccgcccaccgccgtccgggccgctgcgcctgggcactgccgcgctgctgctcaccttccgaagcgacgcgcgcggccacgcgcaaggcttcgcgctcacctaccgcgggctgcaggacgccgctgaggacccagaggcccccgagggctcggcccagacccccgcggcgcccctcgacggggccaacgtgagctgcagccccaggcctggggctccgccggccgcgattgggggagctgtctgctggctccgggaaaagggcccccggcgctgggggcttccaggggccccaggagaagctgggctgtgtggtaccaacagccccgaggggtggccttgccctgctcccccggggacccccaggctgagggttctgccgcgggctaccggcctctgagtgcctccagccagagctccctgcgctcgctcatctccgctctctgactctgggccccgagggtccgctgggcccgccgccggcgagatggacacctgagatgctgtgctgcgccctgcctcggccttgcgcctgtgtaggggcagctcggcctctggtcgccttggggagaccaaaagtcggacaggaaacatctggtgctattatctgggacttggcctgaccgtgggggtccagatggtccaggccctctccatggacctgtatgtgggggtggtctctggtttcggaggtctttgaacccctctgggggtggtcctggactgccgtcctcagtgagaggtcacaggtcagcaaaaacagtcaaaaaacccccacagattttgaataaaggatctactttggtaaaaaaaaaaaaaaaaaa

SEQ ID NO: 13457 - DNA, 2449 bp, Homo sapiens
cttgtccccagcgcctggactcccccttaactgcttgggaaatgtgacctttgctctggggggcctggccctgcaggccccaaccttccctcatctctggcggccctcttgggcctctgacccagcccctccccgggccaggctcacagaagctggcttctgggactgtcctgggcccaagtgggcacctgcgccagccccacctgtgcctgggctgtggccccttcctacagggcgctcaccatggccccgccgctcctgctgctgctgctggccagtggagcggccgcctgcccgctgccctgcgtctgccagaacctgtccgagtcgctcagcaccctctgtgcccaccgaggcctgctgtttgtgccgcccaacgtggaccggcgcacagtggagctgcggctggctgacaacttcatccaggccctggggccccctgacttccgcaacatgacgggactggtggacctgacactgtctcgcaatgccatcacccgcattggggcccgcgcctttggggacctcgagagcctgcgttccctccaccttgacggcaacaggctggtggagctgggcaccgggagcctccggggccccgtcaatctgcagcacctcatcctcagcggcaaccagctgggccgcatcgcgccgggagccttcgacgacttcctagagagcctggaggacctggacctgtcctacaacaacctccggcaggtgccctgggccggcatcggcgccatgcctgccctgcacaccctcaacctggaccataaccttattgacgcactgcccccaggcgccttcgcccagctcggtcagctctcccgcctggacctcacctccaaccgcctggccacgctggctccggacccgcttttctctcgtgggcgtgatgcagaggcctctcccgcccccctggtgctgagctttagcgggaaccccctgcactgcaactgtgagctgctgtggctgcggcggctggcgcggccggacgacctggaaacgtgcgcctccccgcccggcctggccggccgctacttctgggcagtgcccgagggcgagttctcctgtgagccgcccctcattgcccgccacacgcagcgcctctgggtgctggaaggccagcgggccacgctgcggtgccgggccctgggtgaccccgcgcctaccatgcactgggtcggtcctgacgaccggttggttggcaactcctcccgagcccgggctttccccaacgggaccttagagattggggtgaccggcgctggggacgctgggggctacacctgcatcgccaccaaccctgctggtgaggccacagcccgagtagaactgcgggtgctggccttgccccatggtgggaacagcagtgccgaggggggccgccccgggccctcggacatcgccgcctccgctcgcactgctgccgagggtgaggggacgctggagtctgagccagccgtgcaggtgacggaggtgaccgccacctcagggctggtgagctggggtcccgggcggccagccgacccagtgtggatgttccaaatccagtacaacagcagcgaagatgagaccctcatctaccggattgtcccagcctccagccaccacttcctgctgaagcacctcgtccccggcgctgactatgacctctgcctgctggccttgtcaccggccgctgggccctctgacctcacggccaccaggctgctgggctgtgcccatttctccacgctgccggcctcgcccctgtgccacgccctgcaggcccacgtgctgggcgggaccctgaccgtggccgtggggggtgtgctggtggctgccttactggtcttcactgtggccttgctggttcggggccggggggccggaaatggccgcctccccctcaagctcagccacgtccagtcccagaccaatggaggccccagccccacacccaaggcccacccgccgcggagccccccgccccggccgcagcgcagctgctctctggacctgggagatgccgggtgctacggttatgccaggcgcctgggaggagcttgggcccgacggagccactctgtgcatggggggctgctcggggcagggtgccggggggtaggaggcagcgccgagcggctggaagagagtgtggtgtgatggacgggcagcttcctgtgtgctccaagggatgagcctcgtggggcagagggcccggggccgccgcctggcctgggagtccctccctggtttttattctcagtacctcaggctcccctgtgtacttggaggggcagggagccctttcctcggttctggcctccagaccagggtaagggcaggcccctccaacaggtgctcacagccaccgaggcaggggctgcagccacccactgggagtcttgtttttatttataataaaattgttggggacacctcaaaaaaaaaaaaaaaaaaa

SEQ ID NO: 13458 - DNA, 12653 bp, Homo sapiens
cctcccgcctcagttcgcgccgcgcctcggcttggaacgcaggagcgccggctccgggagcccgagcggagccagccgcgcgcacagccagcggccgcgccggcgatgcggggccaccccgcgcccgccccagtcccggccccggcccccgcgggaaggggctgagctgcccgccgccgcccggatggcgagcctcgccgcgctcgccctcagcctgctcctgaggctgcagctgccgccactgcccggcgcccgggctcagagcgccccaggtggctgttcctttgatgagcactacagcaactgtggttatagtgtggctctagggaccaatgggttcacctgggagcagattaacacatgggagaaaccaatgctggaccaggcagtgcccacaggatctttcatgatggtgaacagctctgggagagcctctggccagaaggcccaccttctcctgccaaccctgaaggagaatgacacccactgcatcgacttccattactacttctccagccgtgacaggtccagcccaggggccttgaacgtctacgtgaaggtgaatggtggcccccaagggaaccctgtgtggaatgtgtccggggtcgtcactgagggctgggtgaaggcagagctcgccatcagcactttctggccacatttctatcaggtgatatttgaatccgtctcattgaagggtcatcctggctacatcgccgtggacgaggtccgggtccttgctcatccatgcagaaaagcacctcattttctgcgactccaaaacgtggaggtgaatgtggggcagaatgccacatttcagtgcattgctggtgggaagtggtctcagcatgacaagctttggctccagcaatggaatggcagggacacggccctgatggtcacccgtgtggtcaaccacaggcgcttctcagccacagtcagtgtggcagacactgcccagcggagcgtcagcaagtaccgctgtgtgatccgctctgatggtgggtctggtgtgtccaactacgcggagctgatcgtgaaagagcctcccacgcccattgctcccccagagctgctggctgtgggggccacatacctgtggatcaagccaaatgccaactccatcatcggggatggccccatcatcctgaaggaagtggaatatcgcaccaccacaggcacgtgggcagagacccacatagtcgactctcccaactataagctgtggcatctggaccccgatgttgagtatgagatccgagtgctcctcacacgaccaggtgaggggggtacgggaccgccagggcctcccctcaccaccaggaccaagtgtgcagatccggtacatggcccacagaacgtggaaatcgtagacatcagagcccggcagctgaccctgcagtgggagcccttcggctacgcggtgacccgctgccatagctacaacctcaccgtgcagtaccagtatgtgttcaaccagcagcagtacgaggccgaggaggtcatccagacctcctcccactacaccctgcgaggcctgcgccccttcatgaccatccggctgcgactcttgctgtctaaccccgagggccgaatggagagcgaggagctggtggtgcagactgaggaagacgttccaggagctgttcctctagaatccatccaaggggggccctttgaggagaagatctacatccagtggaaacctcccaatgagaccaatggggtcatcacgctctacgagatcaactacaaggctgtcggctcgctggacccaagtgctgacctctcgagccagagggggaaagtgttcaagctccggaatgaaacccaccacctctttgtgggtctgtacccagggaccacctattccttcaccatcaaggccagcacagcaaagggctttgggccccctgtcaccactcggattgccaccaaaatttcagctccatccatgcctgagtacgacacagacaccccattgaatgagacagacacgaccatcacagtgatgctgaaacccgctcagtcccggggagctcctgtcagtgtttatcagctggttgtcaaggaggagcgacttcagaagtcacggagggcagctgacattattgagtgcttttcggtgcccgtgagctatcggaatgcctccagcctcgattctctacactactttgctgctgagttgaagcctgccaacctgcctgtcacccagccatttacagtgggtgacaataagacatacaatggctactggaaccctcctctctctcccctgaaaagctacagcatctacttccaggcactcagcaaagccaatggagagaccaaaatcaactgtgttcgtctggctacaaaaggtgcctccacccagaattctaacactgtggagccagagaagcaggtggacaacaccgtgaagatggctggcgtgatcgctggcctcctcatgttcatcatcattctcctgggcgtgatgctcaccatcaaaaggagaagaaatgcttattcctactcctattacttgtcccaaaggaagctggccaagaagcagaaggagacccagagtggagcccagagggagatggggcctgtggcctctgccgacaaacccaccaccaagctcagcgccagccgcaatgatgaaggcttctcttctagttctcaggacgtcaacggattcacagatggcagccgcggggagctttcccagcccaccctcacgatccagactcatccctaccgcacctgtgaccctgtggagatgagctacccccgggaccagttccaacccgccatccgggtggctgacttgctgcagcacatcacgcagatgaagagaggccagggctacgggttcaaggaggaatacgaggccttaccagaggggcagacagcttcgtgggacacagccaaggaggatgaaaaccgcaataagaatcgatatgggaacatcatatcctacgaccattcccgggtgaggctgctggtgctggatggagacccgcactctgactacatcaatgccaactacattgacggataccatcgacctcggcactacattgcgactcaaggtccgatgcaggagactgtaaaggacttttggagaatgatctggcaggagaactccgccagcatcgtcatggtcacaaacctggtggaagtgggcagggtgaaatgtgtgcgatactggccagatgacacggaggtctacggagacattaaagtcaccctgattgaaacagagcccctggcagaatacgtcatacgcaccttcacagtccagaagaaaggctaccatgagatccgggagctccgcctcttccacttcaccagctggcctgaccacggcgttccctgctatgccactggccttctgggcttcgtccgccaggtcaagttcctcaaccccccggaagctgggcccatagtggtccactgcagtgctggggctgggcggactggctgcttcattgccattgacaccatgcttgacatggccgagaatgaaggggtggtggacatcttcaactgcgtgcgtgagctccgggcccaaagggtcaacctggtacagacagaggagcaatatgtgtttgtgcacgatgccatcctggaagcgtgcctctgtggcaacactgccatccctgtgtgtgagttccgttctctctactacaatatcagcaggctggacccccagacaaactccagccaaatcaaagatgaatttcagaccctcaacattgtgacaccccgtgtgcggcccgaggactgcagcattgggctcctgccccggaaccatgataagaatcgaagtatggacgtgctgcctctggaccgctgcctgcccttccttatctcagtggacggagaatccagcaattacatcaacgcagcactgatggatagccacaagcagcctgccgccttcgtggtcacccagcaccctctacccaacaccgtggcagacttctggaggctggtgttcgattacaactgctcctctgtggtgatgctgaatgagatggacactgcccagttctgtatgcagtactggcctgagaagacctccgggtgctatgggcccatccaggtggagttcgtctccgcagacatcgacgaggacatcatccacagaatattccgcatctgtaacatggcccggccacaggatggttatcgtatagtccagcacctccagtacattggctggcctgcctaccgggacacgcccccctccaagcgctctctgctcaaagtggtccgacgactggagaagtggcaggagcagtatgacgggagggagggacgtactgtggtccactgcctaaatgggggaggccgtagtggaaccttctgtgccatctgcagtgtgtgtgagatgatccagcagcaaaacatcattgacgtgttccacatcgtgaaaacactgcgtaacaacaaatccaacatggtggagaccctggaacagtataaatttgtatacgaggtggcactggaatatttaagctccttttagctcaatgggatggggaacctgccggagtccagaggctgctgtgaccaagcccccttttgtgtgaatggcagtaactgggctcaggagctctgaggtggcaccctgcctgactccaaggagaagactggtggccctgtgttccacggggggctctgcaccttctgaggggtctcctgttgccgtgggagatgctgctccaaaaggcccaggcttccttttcaacctaaccagccacagccaagggcccaagcagaagtacacccacaagcaaggccttggatttctggctcccagaccacctgcttttgttctgagtttgtggatctcttggcaagccaactgtgcaggtgctggggagtgggaggctcccctgccctccttctccttaggagtggaggagatgtgtgttctgctcctctacgtcatggaaaagattgaggctcttgggggtcactgctctgctgccccctgcaacctccttcaggggcctctggcaccagacatttgcagtctggaccagtgtgaccttacgatgttccctaggccacaagagaggccccccatcctcacacctaacctgcatggggcttcgcccacaaccattctgtaccccttccccagcctgggccttgaccgtccagcattcactggccggccagctgtgtccacagcagtttttgataaaggtgttctttgcttttttgtgtggtcagtgggagggggtggaactgcagggaacttctctgctcctccttgtctttgtaaaaagggaccacctccctggggcagggcttgggctgacctgtaggatgtaacccctgtgtttctttggtggtagctttctttggaagagacaaacaagataagatttgattattttccaaagtgtatgtgaaaagaaactttcttttggagggtgtaaaatcttagtctcttatgtcaaaaagaagggggcgggggagtttgagtatgtacctctaagacaaatctctcgggccttttattttttcctggcaatgtccttaaaagctcccaccctgggacagcatgccactgagcaaggagagatgggtgagcctgaagatggtccctttggtttctggggcaaatagagcaccagctttgtgcataatttggatgtccaaatttgaactccttcctaaagaaacccagcagccaccttgaaaaaggccattgtggagcccattatactttgatttaaaataggccaagagaatcaggcctggagatctagggtcttgtccaaagtgtgagtgagtcaatgagagggaaccaacatttgctaagtctctactgtatgccagggatcatgcttggcactttccataggacatttcacacagtccttagaacccccaggagagagctactgacttgttatcatctccatttgatcatctcctccaatgaggaaacccacgcaccttccttagtaatgaaatcctgggttccaaaggggcaggtaatggcaatgagacttctccgtgctgttttcttcatcttctctaagccaagcaattattttatggagggaaaataaggccagaaacttctgagcagataactccacaaatggaaatttagtactttcttcctgatgccagttcttctgggaagcgcagaatttcagatatattttagtaacacattcccagctccccaggaaagccagtctcatctaatttcttagtcagtaaaaacaattccctgttccttcaggctatgaatggaccagccagggaaactctcgaccttgatctctagccagtgcttaggcccaatatctgacagcctcaggtgggctgggacctaggaagctccatcttgaaggctggtctagccccagacagggcatgaggggcagagaattcaagaaggtacagctttggccctcaagagcccactgtatgctggggaaatggaaccatggtgcagtagtgtggagtggatgagtgttccatgagcctaggagcaagaaagtctcttcggcctcgggcttcctggagaaggggacgtccattcctgctgggtcttaacaagcataaaaaggaaaaaaaggaaactcaggcaaagggatccatatgtgcaatggcaaagaaatgtgaaaaggcattgggagaagcagtctgggggaggccagcccagtgcgggcacagcacaacacggggagcagcaagagatgagccagggtccaggagacagatgcccatcgcgagtacagactttgtcctattggcaacaaggagtccatggagctttagagagatgcactcagcttcgtgttggccaagactccttctgggccaatggggctgcctcttttcctttcatcagacactgtgaaaacattcccttaagcgtgcactttttaatatcacatctatttgtctgtctgctcattgttttgttgctggaactaaatatgcaatggatcatgagactcagattctatgagaaacccagggtctctgctttaccacggagcagggtcaccaacccagatctccaggcccatgaggatggaacatgaaaggagccgacaaaagttgcttccattggcatgggctctggagctgtccagaagtccagggacaccagacttgatcaaggaagggctgtcactttagaggttcaaaaggaagtgcctcaaagcaaaggcaagcaaaggaaccccacgatgaacttgctcttttcctttgatgagcctctccccaggtgtatttcagcagaccccggggacccacccccactgggcctgctggcctccctcggctccagcccaatgccccagctggccttccccagcctgcaaggagcctgtagcatggcaaatctgcctgctgtatgctattttcttagatcttggtacatccagacaggatgagggtggagggagagctatttaacacaaatcctaagatttttttctgctcaggaaggggtgaaatagctggcagatacaaaagacagtggcttttatcattttaaatggtaggaatttaaggtgtgacttcagggagaaacaaacttgcaaaaaaaaaaaatctcaggccatgttggggtaacccagcaagggccagtgatgatttcccccagctcatccccttattttcccacaacccaaccattctctaaagcaggacagtgaataggtcttaggccagtgcacacaggaagaaattgaggcttatggatggggatgacttccctaagatcccatgggacaaggatgtggcaaggcttggatgagatggggcaccagtgcccaggaatttgaacattttcctttacccaggaaatctccggagccaacaccaccacccccagggggtctccccaccccaccccatttacagggtgagctcagcctgtcatgagcagaggaaaatattattaatgctctctgagtctttacaacaggagctcttacctcatagatgtgggctctgtttggggaagatgcaaggaagtaatgagaagcccaggaaatttctccacctgtgtttatggcctaaatagcttcaggatgtatcttagctgcactccaacattgcatcctttctggggtgaagaatctgggccaaccaggggtccttgggcctctagaaggccacagtaggcctctctttgtgggaatggaaggggacagtttgcttttagtgctggccctctctgtgggtgtggcctgcaaaggaaccaacagaccctatgctggggactctaacatgtgagctcattaaattcttccagcattctaaaggagggtttgtgattgtcaccatttactgatgaggaaactaaggctcctaggggagaaatcacttgcccacagttccacagctagtgagtgaatgaaccaggatttaaaccggttttttctcactacagagacaatatttttccaccattgtatctcacatttttcccaggaggttacccataacagaagagactagagtggaacagatacgtcagtggataaagctcaaagcaaacaacagtaagcttaaaattccttcatagtctcatgttttacgttcacaattcatgcaaaatttgcattccactttctgatttagccttgttggttttaatatgactctatgaatatttcaaaaaaaaatgtgctctgttcctcatgttgttctgttctgttcaccccgctatgacggaccctaggtcagctggtcttcagcttgaccctagaattgactctaggagcagtgaccctgctgcctcccagagccagttataggctcaagatcaagaccaactgaccttctcctaggcagctcctttggtgtgtgggtgctctgacctcactgttcatgaggggacctcaactaaggcatcttccagttgggtgctggaaggaacccattaactcacactagaatgatgaggatttgctcatctggcgtggagaaggatgagcccacaaaaccctaaagggaaaagagaagctggacacagctgtactcagcagattcctgaatgctaggctggaaagtggtgcctgttgtccaagtggagtcacatggttgctaatgtgggcaagtctgaggacacacttcatgagcagctggggtctggaaggctcctcactttaccctagccacacataattactgggtgcctacagcacctagcaccttggagggggcactattaggaaatcgagattactatggcacaattaattcctgggtaaggcatggggttgtggtggacagagctcagtctttagtttgaacgaaaacatacatacatgaaaaacatacatgaaaaaaggaccctcatcaacattagaaggggtagatttggagcactttaggcaggaaaacaggaacgcaaggccaggaaactggaacccagtgaatactcagaaccgaggatgcagatgacttatttagcaaaatggtcacttctgtgacatagctggagaaaggatgggtaacagcttgccagagccacttggaacaagggcaaatctcagtgtctggggcaaaagatgatgcatttccctctgacccatcatgtttattcatcctccactccccattgccacactagctcttgctgtaagtcctcaccaggatctacatttcctcgtcgctggtgggaaccccttagagtacatagaggtatcagtccagtaagactgctctacacaacagaagtgaggcccagggagtagcagccaggcccttatcctgttacctctgcaggagtgactgcccaacccagatccagagacattgaaggaaatgataattccttggtacctcactgccttgggacaaaatgaagaaagccacccttccttaggctgcagcttgccactcctgggctgggtaaacaggtcatcagcaccaggctcaaccaggagtaacattctggaagacatgggtgagcccaagaggaagcatgaacaggacgctgttcctaagtcatgtcaacaggttgtgctgggccaggatccccagggaaaaaaatggtcaacccaactggagggtaggttagaagaaaaaaaacataaacgtggatagtcatgtcatctcaaatccctgacttggcttccccattacttgacagtctgagctccttcttagcctgtgaccagcttcaaatcacagccaagtaaaacaaggaaataggaaaagtaaatccaactagaagagacaagctgagattcagatttgtttactcctcccatgcaaagtttccctgttggaggttttccatgtatacatgtctagaagtgatagaatgcaaggccttggctttgtcttgcagggatctgcctttgaggtcatagactgaacagcagggagagaggttagtggtggagtgtggggggagctgttctagctccagtttcttctgacacatttttcaggatcatggatctgatcctccgaagcacagcagagatatctaagccatatttgtgcacatgagcagactcttctagttttttagtaaccagggatgggcttttgcatggcactgactatagagatgtcttgtagagatcaagccagtcttttgcatcccacctgcccacctccagaagagatgggaaaaggtcatcaaagggcattcaccaactgaaatccactcatgaatgttaggtctctaaaaggaggcatcaacactcacaatggtagcctccaaacctagcatcccacctatctaagagctcaggggtggtccactggggcagatacaagggaagtgcaagggctcaggatgaaagaaaatctattgggaagagttttaggggcttgatcattatggggcttccttctatatctgagaactgctctgggtggtgagatgtggactctgatccttaattggaatgttcggagaatgagtgtctggtggccttgaagtgttggacagaaaagtatcagtataaaagcctggagctcagggtaattaatgtagttcatggttccttagtgagcaggactcttggatgtggaggagaaagggtcataggaagtaaaccaccaaaattacaaaattgagtctctgtacaattacttcagtgcctttgggcttatgaatacaaatcagtgggccttctctatgatggtccaacaaactctcagtgtccaccctgtccctgtatctcccatggaagatgaataatgtcaggtgttctttgggtcaaaggccccagggcagtctggaggcttagagggcagagtggtgtcattccatgtaaagttaggcttctgaggggtcaggcagaatatggtgtccatatcttccatagctctgcagattcttggatgaagtcaagcacagtttgctagacccaggtcactcctctgagtataactaggacccatgagtgaaacttaatagctgtaaggaagaacctgctgtctgccagagaggataagctgcccatctcagcagctgtctaaaagaaggcaggtgtctctttaaagggaagagaagcattggtgaaatggatttcaggtcacttccattccagatgggtgagatcttgtggagctgggatcatgtttgaactcattcatacctgtagagcacgaatccaagtagattgtgtttggtctgtacaggctgaagccccctgctctcccacccaagtgcccccactgagcaggccaacatgctgttgtggccacatatactgggctgatccaggctggttatcaccaaacagcaaaccatagggaacagctgctttgccatagacccaatacccatgtagatctctcatgagagcagccataactcagacccactgaccaacagggccatgagtgacagccagaaccagtgaaggtccaagtaggacacagagcagggcttttcttaccatacacattatctccagaggttatttctaccccactccctattcaaggcctgttggagcacactgcaaaagcaaaagcacagtaactcaatttacacatgattataatcatttccagtgcacacatttcatcaccaggtggatcctgagctagcccatgtaaatccgggttaacccatattggtaatcatactcaaaagcacttttcaccctacattctactagccaatcaaagacaaagagttgtggcctctaccattgccttggcttctggacaccctcacaagctatcccaaggttcccgctcaactccagggaggctgacatcttcacatccactgggcatataatattgcatgagaccaaagtctccacactctttgcagcctcctccatgaatcccaatggcctgcacttgtacagtttgggtgtttgatagataaagcacgtatgagaagagaaaacaaaataaatcaactttttaaaaaagccagcactgtgctgtcaatgttttttttttcttttcaattctagctcagaaaagcagaaggtaaataatgtcaggtcaatgaatatcagatatattttttgactgtacattacagtgaagtgtaatctttttacacctgcaagtccatcttatttattcttgtaaatgttccctgacaatgtttgtaatatggctgtgttaaaaaatctatacaataaagctgtgaccctgagattcatgttttcctaagataaaaaaaa

SEQ ID NO: 13459 - DNA, 12710 bp, Homo sapiens
cctcccgcctcagttcgcgccgcgcctcggcttggaacgcaggagcgccggctccgggagcccgagcggagccagccgcgcgcacagccagcggccgcgccggcgatgcggggccaccccgcgcccgccccagtcccggccccggcccccgcgggaaggggctgagctgcccgccgccgcccggatggcgagcctcgccgcgctcgccctcagcctgctcctgaggctgcagctgccgccactgcccggcgcccgggctcagagcgccccaggtggctgttcctttgatgagcactacagcaactgtggttatagtgtggctctagggaccaatgggttcacctgggagcagattaacacatgggagaaaccaatgctggaccaggcagtgcccacaggatctttcatgatggtgaacagctctgggagagcctctggccagaaggcccaccttctcctgccaaccctgaaggagaatgacacccactgcatcgacttccattactacttctccagccgtgacaggtccagcccaggggccttgaacgtctacgtgaaggtgaatggtggcccccaagggaaccctgtgtggaatgtgtccggggtcgtcactgagggctgggtgaaggcagagctcgccatcagcactttctggccacatttctatcaggtgatatttgaatccgtctcattgaagggtcatcctggctacatcgccgtggacgaggtccgggtccttgctcatccatgcagaaaagcacctcattttctgcgactccaaaacgtggaggtgaatgtggggcagaatgccacatttcagtgcattgctggtgggaagtggtctcagcatgacaagctttggctccagcaatggaatggcagggacacggccctgatggtcacccgtgtggtcaaccacaggcgcttctcagccacagtcagtgtggcagacactgcccagcggagcgtcagcaagtaccgctgtgtgatccgctctgatggtgggtctggtgtgtccaactacgcggagctgatcgtgaaagagcctcccacgcccattgctcccccagagctgctggctgtgggggccacatacctgtggatcaagccaaatgccaactccatcatcggggatggccccatcatcctgaaggaagtggaatatcgcaccaccacaggcacgtgggcagagacccacatagtcgactctcccaactataagctgtggcatctggaccccgatgttgagtatgagatccgagtgctcctcacacgaccaggtgaggggggtacgggaccgccagggcctcccctcaccaccaggaccaagtgtgcagatccggtacatggcccacagaacgtggaaatcgtagacatcagagcccggcagctgaccctgcagtgggagcccttcggctacgcggtgacccgctgccatagctacaacctcaccgtgcagtaccagtatgtgttcaaccagcagcagtacgaggccgaggaggtcatccagacctcctcccactacaccctgcgaggcctgcgccccttcatgaccatccggctgcgactcttgctgtctaaccccgagggccgaatggagagcgaggagctggtggtgcagactgaggaagacgttccaggagctgttcctctagaatccatccaaggggggccctttgaggagaagatctacatccagtggaaacctcccaatgagaccaatggggtcatcacgctctacgagatcaactacaaggctgtcggctcgctggacccaagtgctgacctctcgagccagagggggaaagtgttcaagctccggaatgaaacccaccacctctttgtgggtctgtacccagggaccacctattccttcaccatcaaggccagcacagcaaagggctttgggccccctgtcaccactcggattgccaccaaaatttcagctccatccatgcctgagtacgacacagacaccccattgaatgagacagacacgaccatcacagtgatgctgaaacccgctcagtcccggggagctcctgtcagtgtttatcagctggttgtcaaggaggagcgacttcagaagtcacggagggcagctgacattattgagtgcttttcggtgcccgtgagctatcggaatgcctccagcctcgattctctacactactttgctgctgagttgaagcctgccaacctgcctgtcacccagccatttacagtgggtgacaataagacatacaatggctactggaaccctcctctctctcccctgaaaagctacagcatctacttccaggcactcagcaaagccaatggagagaccaaaatcaactgtgttcgtctggctacaaaagcaccaatgggcagcgcccaggtgaccccggggactccactctgcctcctcaccacaggtgcctccacccagaattctaacactgtggagccagagaagcaggtggacaacaccgtgaagatggctggcgtgatcgctggcctcctcatgttcatcatcattctcctgggcgtgatgctcaccatcaaaaggagaagaaatgcttattcctactcctattacttgtcccaaaggaagctggccaagaagcagaaggagacccagagtggagcccagagggagatggggcctgtggcctctgccgacaaacccaccaccaagctcagcgccagccgcaatgatgaaggcttctcttctagttctcaggacgtcaacggattcacagatggcagccgcggggagctttcccagcccaccctcacgatccagactcatccctaccgcacctgtgaccctgtggagatgagctacccccgggaccagttccaacccgccatccgggtggctgacttgctgcagcacatcacgcagatgaagagaggccagggctacgggttcaaggaggaatacgaggccttaccagaggggcagacagcttcgtgggacacagccaaggaggatgaaaaccgcaataagaatcgatatgggaacatcatatcctacgaccattcccgggtgaggctgctggtgctggatggagacccgcactctgactacatcaatgccaactacattgacggataccatcgacctcggcactacattgcgactcaaggtccgatgcaggagactgtaaaggacttttggagaatgatctggcaggagaactccgccagcatcgtcatggtcacaaacctggtggaagtgggcagggtgaaatgtgtgcgatactggccagatgacacggaggtctacggagacattaaagtcaccctgattgaaacagagcccctggcagaatacgtcatacgcaccttcacagtccagaagaaaggctaccatgagatccgggagctccgcctcttccacttcaccagctggcctgaccacggcgttccctgctatgccactggccttctgggcttcgtccgccaggtcaagttcctcaaccccccggaagctgggcccatagtggtccactgcagtgctggggctgggcggactggctgcttcattgccattgacaccatgcttgacatggccgagaatgaaggggtggtggacatcttcaactgcgtgcgtgagctccgggcccaaagggtcaacctggtacagacagaggagcaatatgtgtttgtgcacgatgccatcctggaagcgtgcctctgtggcaacactgccatccctgtgtgtgagttccgttctctctactacaatatcagcaggctggacccccagacaaactccagccaaatcaaagatgaatttcagaccctcaacattgtgacaccccgtgtgcggcccgaggactgcagcattgggctcctgccccggaaccatgataagaatcgaagtatggacgtgctgcctctggaccgctgcctgcccttccttatctcagtggacggagaatccagcaattacatcaacgcagcactgatggatagccacaagcagcctgccgccttcgtggtcacccagcaccctctacccaacaccgtggcagacttctggaggctggtgttcgattacaactgctcctctgtggtgatgctgaatgagatggacactgcccagttctgtatgcagtactggcctgagaagacctccgggtgctatgggcccatccaggtggagttcgtctccgcagacatcgacgaggacatcatccacagaatattccgcatctgtaacatggcccggccacaggatggttatcgtatagtccagcacctccagtacattggctggcctgcctaccgggacacgcccccctccaagcgctctctgctcaaagtggtccgacgactggagaagtggcaggagcagtatgacgggagggagggacgtactgtggtccactgcctaaatgggggaggccgtagtggaaccttctgtgccatctgcagtgtgtgtgagatgatccagcagcaaaacatcattgacgtgttccacatcgtgaaaacactgcgtaacaacaaatccaacatggtggagaccctggaacagtataaatttgtatacgaggtggcactggaatatttaagctccttttagctcaatgggatggggaacctgccggagtccagaggctgctgtgaccaagcccccttttgtgtgaatggcagtaactgggctcaggagctctgaggtggcaccctgcctgactccaaggagaagactggtggccctgtgttccacggggggctctgcaccttctgaggggtctcctgttgccgtgggagatgctgctccaaaaggcccaggcttccttttcaacctaaccagccacagccaagggcccaagcagaagtacacccacaagcaaggccttggatttctggctcccagaccacctgcttttgttctgagtttgtggatctcttggcaagccaactgtgcaggtgctggggagtgggaggctcccctgccctccttctccttaggagtggaggagatgtgtgttctgctcctctacgtcatggaaaagattgaggctcttgggggtcactgctctgctgccccctgcaacctccttcaggggcctctggcaccagacatttgcagtctggaccagtgtgaccttacgatgttccctaggccacaagagaggccccccatcctcacacctaacctgcatggggcttcgcccacaaccattctgtaccccttccccagcctgggccttgaccgtccagcattcactggccggccagctgtgtccacagcagtttttgataaaggtgttctttgcttttttgtgtggtcagtgggagggggtggaactgcagggaacttctctgctcctccttgtctttgtaaaaagggaccacctccctggggcagggcttgggctgacctgtaggatgtaacccctgtgtttctttggtggtagctttctttggaagagacaaacaagataagatttgattattttccaaagtgtatgtgaaaagaaactttcttttggagggtgtaaaatcttagtctcttatgtcaaaaagaagggggcgggggagtttgagtatgtacctctaagacaaatctctcgggccttttattttttcctggcaatgtccttaaaagctcccaccctgggacagcatgccactgagcaaggagagatgggtgagcctgaagatggtccctttggtttctggggcaaatagagcaccagctttgtgcataatttggatgtccaaatttgaactccttcctaaagaaacccagcagccaccttgaaaaaggccattgtggagcccattatactttgatttaaaataggccaagagaatcaggcctggagatctagggtcttgtccaaagtgtgagtgagtcaatgagagggaaccaacatttgctaagtctctactgtatgccagggatcatgcttggcactttccataggacatttcacacagtccttagaacccccaggagagagctactgacttgttatcatctccatttgatcatctcctccaatgaggaaacccacgcaccttccttagtaatgaaatcctgggttccaaaggggcaggtaatggcaatgagacttctccgtgctgttttcttcatcttctctaagccaagcaattattttatggagggaaaataaggccagaaacttctgagcagataactccacaaatggaaatttagtactttcttcctgatgccagttcttctgggaagcgcagaatttcagatatattttagtaacacattcccagctccccaggaaagccagtctcatctaatttcttagtcagtaaaaacaattccctgttccttcaggctatgaatggaccagccagggaaactctcgaccttgatctctagccagtgcttaggcccaatatctgacagcctcaggtgggctgggacctaggaagctccatcttgaaggctggtctagccccagacagggcatgaggggcagagaattcaagaaggtacagctttggccctcaagagcccactgtatgctggggaaatggaaccatggtgcagtagtgtggagtggatgagtgttccatgagcctaggagcaagaaagtctcttcggcctcgggcttcctggagaaggggacgtccattcctgctgggtcttaacaagcataaaaaggaaaaaaaggaaactcaggcaaagggatccatatgtgcaatggcaaagaaatgtgaaaaggcattgggagaagcagtctgggggaggccagcccagtgcgggcacagcacaacacggggagcagcaagagatgagccagggtccaggagacagatgcccatcgcgagtacagactttgtcctattggcaacaaggagtccatggagctttagagagatgcactcagcttcgtgttggccaagactccttctgggccaatggggctgcctcttttcctttcatcagacactgtgaaaacattcccttaagcgtgcactttttaatatcacatctatttgtctgtctgctcattgttttgttgctggaactaaatatgcaatggatcatgagactcagattctatgagaaacccagggtctctgctttaccacggagcagggtcaccaacccagatctccaggcccatgaggatggaacatgaaaggagccgacaaaagttgcttccattggcatgggctctggagctgtccagaagtccagggacaccagacttgatcaaggaagggctgtcactttagaggttcaaaaggaagtgcctcaaagcaaaggcaagcaaaggaaccccacgatgaacttgctcttttcctttgatgagcctctccccaggtgtatttcagcagaccccggggacccacccccactgggcctgctggcctccctcggctccagcccaatgccccagctggccttccccagcctgcaaggagcctgtagcatggcaaatctgcctgctgtatgctattttcttagatcttggtacatccagacaggatgagggtggagggagagctatttaacacaaatcctaagatttttttctgctcaggaaggggtgaaatagctggcagatacaaaagacagtggcttttatcattttaaatggtaggaatttaaggtgtgacttcagggagaaacaaacttgcaaaaaaaaaaaatctcaggccatgttggggtaacccagcaagggccagtgatgatttcccccagctcatccccttattttcccacaacccaaccattctctaaagcaggacagtgaataggtcttaggccagtgcacacaggaagaaattgaggcttatggatggggatgacttccctaagatcccatgggacaaggatgtggcaaggcttggatgagatggggcaccagtgcccaggaatttgaacattttcctttacccaggaaatctccggagccaacaccaccacccccagggggtctccccaccccaccccatttacagggtgagctcagcctgtcatgagcagaggaaaatattattaatgctctctgagtctttacaacaggagctcttacctcatagatgtgggctctgtttggggaagatgcaaggaagtaatgagaagcccaggaaatttctccacctgtgtttatggcctaaatagcttcaggatgtatcttagctgcactccaacattgcatcctttctggggtgaagaatctgggccaaccaggggtccttgggcctctagaaggccacagtaggcctctctttgtgggaatggaaggggacagtttgcttttagtgctggccctctctgtgggtgtggcctgcaaaggaaccaacagaccctatgctggggactctaacatgtgagctcattaaattcttccagcattctaaaggagggtttgtgattgtcaccatttactgatgaggaaactaaggctcctaggggagaaatcacttgcccacagttccacagctagtgagtgaatgaaccaggatttaaaccggttttttctcactacagagacaatatttttccaccattgtatctcacatttttcccaggaggttacccataacagaagagactagagtggaacagatacgtcagtggataaagctcaaagcaaacaacagtaagcttaaaattccttcatagtctcatgttttacgttcacaattcatgcaaaatttgcattccactttctgatttagccttgttggttttaatatgactctatgaatatttcaaaaaaaaatgtgctctgttcctcatgttgttctgttctgttcaccccgctatgacggaccctaggtcagctggtcttcagcttgaccctagaattgactctaggagcagtgaccctgctgcctcccagagccagttataggctcaagatcaagaccaactgaccttctcctaggcagctcctttggtgtgtgggtgctctgacctcactgttcatgaggggacctcaactaaggcatcttccagttgggtgctggaaggaacccattaactcacactagaatgatgaggatttgctcatctggcgtggagaaggatgagcccacaaaaccctaaagggaaaagagaagctggacacagctgtactcagcagattcctgaatgctaggctggaaagtggtgcctgttgtccaagtggagtcacatggttgctaatgtgggcaagtctgaggacacacttcatgagcagctggggtctggaaggctcctcactttaccctagccacacataattactgggtgcctacagcacctagcaccttggagggggcactattaggaaatcgagattactatggcacaattaattcctgggtaaggcatggggttgtggtggacagagctcagtctttagtttgaacgaaaacatacatacatgaaaaacatacatgaaaaaaggaccctcatcaacattagaaggggtagatttggagcactttaggcaggaaaacaggaacgcaaggccaggaaactggaacccagtgaatactcagaaccgaggatgcagatgacttatttagcaaaatggtcacttctgtgacatagctggagaaaggatgggtaacagcttgccagagccacttggaacaagggcaaatctcagtgtctggggcaaaagatgatgcatttccctctgacccatcatgtttattcatcctccactccccattgccacactagctcttgctgtaagtcctcaccaggatctacatttcctcgtcgctggtgggaaccccttagagtacatagaggtatcagtccagtaagactgctctacacaacagaagtgaggcccagggagtagcagccaggcccttatcctgttacctctgcaggagtgactgcccaacccagatccagagacattgaaggaaatgataattccttggtacctcactgccttgggacaaaatgaagaaagccacccttccttaggctgcagcttgccactcctgggctgggtaaacaggtcatcagcaccaggctcaaccaggagtaacattctggaagacatgggtgagcccaagaggaagcatgaacaggacgctgttcctaagtcatgtcaacaggttgtgctgggccaggatccccagggaaaaaaatggtcaacccaactggagggtaggttagaagaaaaaaaacataaacgtggatagtcatgtcatctcaaatccctgacttggcttccccattacttgacagtctgagctccttcttagcctgtgaccagcttcaaatcacagccaagtaaaacaaggaaataggaaaagtaaatccaactagaagagacaagctgagattcagatttgtttactcctcccatgcaaagtttccctgttggaggttttccatgtatacatgtctagaagtgatagaatgcaaggccttggctttgtcttgcagggatctgcctttgaggtcatagactgaacagcagggagagaggttagtggtggagtgtggggggagctgttctagctccagtttcttctgacacatttttcaggatcatggatctgatcctccgaagcacagcagagatatctaagccatatttgtgcacatgagcagactcttctagttttttagtaaccagggatgggcttttgcatggcactgactatagagatgtcttgtagagatcaagccagtcttttgcatcccacctgcccacctccagaagagatgggaaaaggtcatcaaagggcattcaccaactgaaatccactcatgaatgttaggtctctaaaaggaggcatcaacactcacaatggtagcctccaaacctagcatcccacctatctaagagctcaggggtggtccactggggcagatacaagggaagtgcaagggctcaggatgaaagaaaatctattgggaagagttttaggggcttgatcattatggggcttccttctatatctgagaactgctctgggtggtgagatgtggactctgatccttaattggaatgttcggagaatgagtgtctggtggccttgaagtgttggacagaaaagtatcagtataaaagcctggagctcagggtaattaatgtagttcatggttccttagtgagcaggactcttggatgtggaggagaaagggtcataggaagtaaaccaccaaaattacaaaattgagtctctgtacaattacttcagtgcctttgggcttatgaatacaaatcagtgggccttctctatgatggtccaacaaactctcagtgtccaccctgtccctgtatctcccatggaagatgaataatgtcaggtgttctttgggtcaaaggccccagggcagtctggaggcttagagggcagagtggtgtcattccatgtaaagttaggcttctgaggggtcaggcagaatatggtgtccatatcttccatagctctgcagattcttggatgaagtcaagcacagtttgctagacccaggtcactcctctgagtataactaggacccatgagtgaaacttaatagctgtaaggaagaacctgctgtctgccagagaggataagctgcccatctcagcagctgtctaaaagaaggcaggtgtctctttaaagggaagagaagcattggtgaaatggatttcaggtcacttccattccagatgggtgagatcttgtggagctgggatcatgtttgaactcattcatacctgtagagcacgaatccaagtagattgtgtttggtctgtacaggctgaagccccctgctctcccacccaagtgcccccactgagcaggccaacatgctgttgtggccacatatactgggctgatccaggctggttatcaccaaacagcaaaccatagggaacagctgctttgccatagacccaatacccatgtagatctctcatgagagcagccataactcagacccactgaccaacagggccatgagtgacagccagaaccagtgaaggtccaagtaggacacagagcagggcttttcttaccatacacattatctccagaggttatttctaccccactccctattcaaggcctgttggagcacactgcaaaagcaaaagcacagtaactcaatttacacatgattataatcatttccagtgcacacatttcatcaccaggtggatcctgagctagcccatgtaaatccgggttaacccatattggtaatcatactcaaaagcacttttcaccctacattctactagccaatcaaagacaaagagttgtggcctctaccattgccttggcttctggacaccctcacaagctatcccaaggttcccgctcaactccagggaggctgacatcttcacatccactgggcatataatattgcatgagaccaaagtctccacactctttgcagcctcctccatgaatcccaatggcctgcacttgtacagtttgggtgtttgatagataaagcacgtatgagaagagaaaacaaaataaatcaactttttaaaaaagccagcactgtgctgtcaatgttttttttttcttttcaattctagctcagaaaagcagaaggtaaataatgtcaggtcaatgaatatcagatatattttttgactgtacattacagtgaagtgtaatctttttacacctgcaagtccatcttatttattcttgtaaatgttccctgacaatgtttgtaatatggctgtgttaaaaaatctatacaataaagctgtgaccctgagattcatgttttcctaagataaaaaaaa

SEQ ID NO: 13460 - DNA, 1061 bp, Homo sapiens
ctctgttttctcaaagctgaagtcggctaggtttgcaaagctgtgggctgagcactcaggcaatcacactctcagaaactgcggcggctctggactgcagcctcccaaggctccatgccagacaaagcatgcgtgtcacacttgctacaatagcctggatggtttcttttgtctccaattattcacacacagcaaatattttgccagatatcgaaaatgaagatttcatcaaagactgcgttcgaatccataacaagttccgatcagaggtgaaaccaacagccagtgatatgctatacatgacttgggacccagcactagcccaaattgcaaaagcatgggccagcaattgccagttttcacataatacacggctgaagccaccccacaagctgcacccaaacttcacttcactgggagagaacatctggactgggtctgtgcccattttttctgtgtcttccgccatcacaaactggtatgacgaaatccaggactatgacttcaagactcggatatgcaaaaaagtctgtggccactacactcaggttgtttgggcagatagttacaaagttggctgcgcagttcaattttgccctaaagtttctggctttgacgctctttccaatggagcacattttatatgcaactacggaccaggagggaattacccaacttggccatataagagaggagccacctgcagtgcctgccccaataatgacaagtgtttggacaatctctgtgttaaccgacagcgagaccaagtgaaacgttactactctgttgtatatccaggctggcccatatatccacgtaacagatacacttctctctttctcattgttaattcagtaattctaatactgtctgttataattaccattttggtacagctcaagtaccctaatttagttcttttggactaatacaattcaggaaagaaaaaacccaaaaaccaacctcattcacatatggcttttttttaaccaataacaattaggtgtacttctattttaaaacatttcagaaaaaaatatatgttatagcaatactcttac

SEQ ID NO: 13461 - DNA, 2697 bp, Homo sapiens
gggctccggagcacatgctgagcggagcggctggggctgcgcggcgtggcggagcagcgctcgctccctcgctcactcgctcgctcgcagggacacacgcaggggctgacagctgtgctggtgctgataagggaagccacaaggagacgatcgaggagagagacaagcggcagcagaggcagcagcggcagaggcagcaccagggctgcggagctgctgggagtgggagtgactcccccacctcgggcccccaccctgtccctgtcctcttcccgcttgccctgagtttagaagagcagccgctgccaccactgccactcgggagggcaccagggctgctggctagggagggacagggcagggaggctctggccagtcccagcagccggggacagatgccgatcgagattgtgtgcaaaatcaaatttgctgaggaggatgcgaaacccaaggagaaggaggcaggggatgagcagagcctcctcggggctgttgcccctggagcagccccccgagacctggccacctttgccagcaccagcaccctgcatggactgggccgggcctgtggcccaggcccccacggactgcgcagaaccctgtgggcactggccctactcacctcgctggctgccttcctgtaccaggcggctggcctggcccggggctacctgacccggcctcacctggtggcaatggaccccgctgccccagccccagtggcgggcttcccggctgtcaccctctgcaatatcaaccgcttccggcattcggcactcagcgatgccgacatcttccacctggccaatctgacagggctgccccccaaagaccgggatgggcaccgtgcggctggcctgcgctacccagagcctgacatggtagacatcctcaaccgcactggccaccagctcgccgacatgcttaagagctgcaacttcagtgggcatcactgctccgccagcaacttctctgtggtctatactcgctatgggaagtgttacaccttcaacgcggacccgcggagctcgctgcccagccgggcagggggcatgggcagtggcctggagatcatgctggacatccagcaggaggagtacctgcccatctggagggagacaaatgagacgtcgtttgaggcaggtattcgggtgcagatccacagccaggaggagccgccctacatccaccagctggggttcggggtgtccccaggcttccagacctttgtgtcctgccaggaacagcggctgacctacctgccccagccctggggcaactgccgcgcagagagtgagctcagggagcctgagcttcagggctactcggcctacagtgtgtctgcctgccggctgcgctgtgaaaaggaggccgtgcttcagcgctgccactgccggatggtgcacatgccagactccctgggtgggggccctgagggcccgtgcttctgccccaccccctgcaacctgacacgctatgggaaagagatctccatggtcaggatccccaacaggggctcagcccggtacctggcgaggaagtacaaccgcaacgagacctacatacgggagaacttcctggtcctagatgtcttctttgaggccctgacctctgaagccatggagcagcgagcagcctatggcctgtcagccctgctgggagacctcgggggacagatgggcctgttcattggggccagcatcctcacgttgctggagatcctcgactacatctatgaggtgtcctgggatcgactgaagcgggtatggaggcgtcccaagacccccctgcggacctccactgggggcatctccactttggggcttcaggagctgaaggaacagagtccctgcccgagcctgggccgagcggagggtgggggggtcagcagtctgctccccaatcaccaccacccccacggtcccccaggaggtctctttgaagattttgcttgctaggacggtgctgtgactgaaaggacccaggagtctgggacccctcctgggatccccagcacattctcctgctcctgggagaggcctgggggcggtgctcactgggagggccaggactcagttcctgctctcatcctcccctgccctgatgtcagctgctttgcacaaaggtccttcttgtccacaccccttatccccaggctggtgccccgggagggctggagaccaggccatgggccctcacggagaggaagggaaggaaggagagggagggggaggatagagcccatcccagccggggagggggagccctctgtacatttgtaaatatttagggaaagccgggtggggggaggggatacagatgtagaaggtgggtagggctacaggggtgggtgatttagggacagccagggtcccagccccaatgtcagcaggatagggagagccccaggactcaggagtgctgggctggtcctacttcctgcccctctccaggcccagctcccctcttggcagggggagaggatggcccagcaggcctggcccagctcccagttccccctgcaccagccccacccctagagtcccttctatagggagggggcaggagaccttccagacttcggctgagcttggagggtgggaagggagccttctcagtcctctctccctccagtctgattttataaagtgctgacgagattgggaataaagaggcataaagaaaaaaaaaaaaaaa

SEQ ID NO: 13462 - DNA, 1920 bp, Homo sapiens
agctctgcagtcctcctatgtggtactgatcaggtggttgcagagcttcagctcacagcaacacaatgcagctgagcaggcaagcacagcccacagccagaaacagttccgactctacagaacaagacgacctttaagtttcccagagaaaatgagatgctgatgttgaagacgacaccacggctttgatggaatatcagatattgaaaatgtctctctgcctgttcatccttctgtttctcacacctggtattttatgcatttgtcctctccaatgtatatgcacagagaggcacaggcatgtggactgttcaggcagaaacttgtctacattaccatctggactgcaagagaatattatacatttaaacctgtcttataaccactttactgatctgcataaccagttaacccaatataccaatctgaggaccctggacatttcaaacaacaggcttgaaagcctgcctgctcacttacctcggtctctgtggaacatgtctgctgctaacaacaacattaaacttcttgacaaatctgatactgcttatcagtggaatcttaaatatctggatgtttctaagaacatgctggaaaaggttgtcctcattaaaaatacactaagaagtctcgaggttctcaacctcagtagtaacaaactttggacagttccaaccaacatgccctccaaactacatatcgtggacctgtctaataattctttgacacaaattcttccaggtacattaataaacctgacaaatctcacacatctttacctgcacaacaataagttcacattcattccagaccaatcttttgaccaactctttcagttgcaagagataaccctttacaataacaggtggtcatgtgaccacaaacaaaacattacttacttactgaagtggatgatggaaacaaaagcccatgtgatagggactccatgttctacccaaatatcatctttaaaggaacataacatgtatcccacaccttctggatttacctcaagcttattcactgtaagtgggatgcagacagtggacaccattaactctctgagtgtggtaactcaacccaaagtgaccaaaatacccaaacaatatcgaacaaaggaaacaacgtttggtgccactctaagcaaagacaccacctttactagcactgataaggcttttgtgccctatccagaagatacatccacagagactatcaattcacatgaagcagcagctgcaactctaactattcatctccaagatggaatggtcacaaacacaagcctcactagctcaacaaaatcatccccaacacccatgaccctaagtatcactagtggcatgccaaataatttctctgaaatgcctcaacaaagcacaacccttaacttatggagggaagagacaaccacaaatgtaaagactccattaccttctgtggcaaatgcttggaaagtaaatgcttcatttctcttattgctcaatgttgtggtcatgctggctgtctgagggtctgcattttctgaaactaatgaaagcactcctccctgatgtacagttgggaaaatatgtccatatctaaccagtgattcgagctatatttaagtattcaagaaagccagtcttaacatttctaactctgatgtaaatgaagtaacttgtcttaaataaaagaaatgcacaatgtcttggtacttgctgctattttactgtcttaattaagtaaactaatgagtttcttttataaaaaaaatgaaatgttttaaggcttcaatttattgcacaaaatataaagcatctaaactttaatatgtattttatgtatgtttacactgtcaaacatctggaaaataaaaggtctatgctcaaaaaaaaaaaaaaaaaaaaaaaaaaaaaaaaaaaaaaaaaaaaaaaaaaa

SEQ ID NO: 13463 - DNA, 3167 bp, Homo sapiens
aatatttactgcagctaagacttcagtaaaattgggggtggggggagggttgacattttccgactgcctgttacgtgccaagtgctttttgttaaggacataatgtttttgactggggatcatgtttggctgatgtaaatattaatgccaaaataggagctaggatgaaagtaacactgtaattagtagtagaatttatttcatattaaaatgtgtcatgacgtaatttttatggcttggctcaagcaacaattttcagagtgcaccctcattgatgctactcacagagacgtggatgtgctgttactgctttctaactctgcctactacgtggcctaatgatgatgaagttgataaagtaaaccagtatcaacgactaagtctagaaaacctggaaaaaattgaaataggccctgaacccactctttttggtaagccaaagttctcctgcatgcgactgcactacagatacaaagaagcgagtggctatttccacacattgcgagctgtaatgcgtaatcctgaagaggatggaaaagatacccttcagtgcattgcagagatgctgcagatcaccaagcaagccatgggatcggatttacccataattgagaagaaacttgagaggaagagcagtaaacctcacgaagacatcattggtatcaggtctcaaaaccaaggttctttggcccagggaaagaattttttaatgagcaaattttcatctctaaatcaaaaagtgaagcagaccaaatccaatgtaaatattggcaacctccgaaagctaggaaactttaccaaacctgaaatgaaagttaactttctaaaaccaaacttaaaagtaaatctttggaaatcagatagtagtcttgaaactatggaaaacacaggagtgatggataaggttcaggcagagtctgatggggacatgtcttcagataatgactcataccactctgatgaattccttacaaattctaagtctgatgaagacaggcagctagctaactcattagagagtgtagggccaatagattacgttcttcctagttgtggtattattgcctcagcgcctcgattgggcagtcggtcccagtctcttagcagcacagatagtagcgttcatgctccttcagagattactgttgctcatgggagtgggcttggaaaaggccaggagtctcctttgaagaaaagtccttctgctggcgacgtacacatattgactggctttgccaagcctatggatatttactgccacagatttgtgcaagatgcacagaacaaagtgacccacctatcagagaccagatctgtgtctcagcaggctagtcaggaaagaaatcaaatgaccaatcaagtttcaaatgaaacccaatcagaatcaacagaacagacaccttctcggccatcgcaattagatgtctctctttctgcaacaggcccacagtttttgtcagttgagccagcgcattcagttgcatctcaaaaaacccccacctccgcttccagcatgcttgaacttgagacagggcttcatgtaactccttctccttcagagagcagtagcagcagagcagtctctccctttgccaagattcgaagttccatggtccaggttgctagtattacccaagctggattaacccatgggataaactttgcagtgtcaaaagttcagaagagtcctccagaacctgaaatcattaatcaagtccagcaaaatgaacttaaaaagatgtttatacaatgccagacacggataattcagatttagcttttagccataagaatccttccatggcttttatttaaaaatatgaaattttcacctcttggggtattttaattgtactgtctgaacccagggatcacaaattctgttcattggaaagggttttaaacggagtcggaacctgagtagatttccaaattttacagccaggactacagaagtgcatcattctagaatgtgtagacctgagtagcttatacactacagagcactttgcttatttgaaagtaattcagcaacaggtcactttgggatataacctgaacctttttttggagtggggtgggtagactacagtagacacaagggctggacatgcagatgcttaggggattagcgtttttcataatttgttctgtttgtcagttcattcctgtgtgttcttacctctacaaagtaaattacacatttagtttttagtgactttaacatgttactgaagcatttgaatataaagctattttagttttgatggcttaactgttccctgaggagttgagggttattgacactagagaaatgaattctcatttgatcctaattttccccgtattctacttgaacacattaaaaatactctgctgcctatacaatgtaaacctaggagcattaagacttgtcacacagtaaacctgatacatcagaggtgaataccagcacctattaggtttcattttgctgttttcaggaatgtaagaacacccatattggctactggaaattctagaagtcagtcaggttttaatttattccaggaggggcatcctcgacatcttatgtagatgatccacaacttcaaaatttagtctgggcctagtgcagtggctcacacctataatcccaacactttgggaggccaggagttttgagaccagcctgggaaacatctgtctctacaaaaaaatacaaaaattagctgggcatagtggtgcatgcctgtgtttctagctacgcaggaggattgcttgagcccatgagattgaggctgcagtgagctgtgatcgtgccactgacctccagcctgggggacagagcaagaccgtgtctcaaaaacaatttagtctgaaacacaattgtgctgaatctgtctgactataactctgaccacacagaaccagggctgcccctgtaatccccacagtaagaaagttgtatggcatattccaacaagtattggttcgtctggtgtctttagagctttactctgttgaagtgactgattctcaactgaacattatgtcgttactttgataagcattccacttttgttatttattagtgctatcttttttttttacgtgttaaatcttgtgattattaaaataaagtaccattgtaatttaaagtgaaaaaaaaaaaaaaaaaaaaaaaa

SEQ ID NO: 13464 - DNA, 2297 bp, Homo sapiens
agccgtgctcagaaagtttctggatcccaggctcatctccacagaggagaacacgcaggcagcagagaccatggggcccatctcagccccttcctgcagatggcgcatcccctggcaggggctcctgctcacagcctcacttttcaccttctggaacccgcccaccactgctcagctcactattgaagctgtgccatccaatgctgcagaggggaaggaggttcttctacttgtccacaatctgccccaggaccctcgtggctacaactggtacaaaggggaaacagtggatgccaaccgtcgaattataggatatgtaatatcaaatcaacagattaccccagggcctgcatacagcaatcgagagacaatataccccaatgcatccctgctgatgcggaacgtcaccagaaatgacacaggatcctacaccctacaagtcataaagctaaatcttatgagtgaagaagtaactggccagttcagcgtacatccggagactcccaagccctccatctccagcaacaactccaaccccgtggaggacaaggatgctgtggccttcacctgtgaacctgagactcagaacacaacctacctgtggtgggtaaatggtcagagtctcccggtcagtcccaggctgcagctgtccaatggcaacaggaccctcactctactcagtgtcacaaggaatgacgtaggaccctatgaatgtgaaatacagaacccagcgagtgcaaacttcagtgacccagtcaccctgaatgtcctctatggcccagatgcccccaccatttccccttcagacacctattaccatgcaggggtaaatctcaacctctcctgccatgcggcctctaatccaccctcacagtattcttggtctgtcaatggcacattccagcaatacacacaaaagctctttatccccaacatcactacaaagaacagcggatcctatgcctgccacaccactaactcagccactggccgcaacaggaccacagtcaggatgatcacagtctctgatgctttagtacaaggaagttctcctggcctctcagctagagccactgtcagcatcatgattggagtactggccagggtggctctgatatagtagctctggtgtagtttctgcatttcaagaagactggcagacagttgtttttattcttcctcaaagcatttgcaatcagctaccattcaaaattgcttcttcttcaagatttatggaaaatactctgacgagtactcttgaacacaagttcctgataactttaagatcacgccactggactgtctatgaacttgcaaacaggctgatacctttgtgaagttgcccaccaaaacacagaaggaaaaaaacatgaatttcattgaactaaataataatgaggataatgtttttaagatttttttttttttttgagatggaatctcgctctgtcgcccaggctggagtgcagtggcacgatctcaactcactgcaagctccgcctcctgggttcacaccattctcctgcctcagcctcctgagtagctgggactacaggcgcctgccacaacgcccggctaattttttgtatttttagtagagacggggtttcactgtggtctcaatctcctgacttcatggtccgcctgcctcagcctcccaaagttctgggattacaggtgtgagccaccgcgcccagcccgtttttaagattttttatttgaaaaattgccaattctttaagtgttttctttttcagatttatgaatttctttatcttttaagctatctataccttactgcaatttggtaaagcagacttttgtgaacaaaaattataacatttacttttgctccctacctgactgccacagaactgggcaactattcatgagtattcatatgtttatggtaattcagttatttgcacaagttcagtgagaatctgctgtctttataatgggatatagtttaaaacattggttatattaccaaggctttgattgggatgttatatttgagaaaatacagagaatgatagattaacggagtgtctaatctatcgtgtcaaccccaaatttttacgtatgagatcctttagtccacccaatggctgacagtaacagcatctttaacacaactctttgttcaaatgtactatggtctcttttagagtcagactcctagactcacttgttctcactgtctgttttaatttaacccaggcatgcaatgctagataataaaattgctccctattggctgatcaaaaaaaaaaaaaaaaaaaaaaaaaaaaaaa

SEQ ID NO: 13465 - DNA, 5175 bp, Homo sapiens
gccccgagtgcaatcgcgggaagccagggtttccagctaggacacagcaggtcgtgatccgggtcgggacactgcctggcagaggctgcgagcatggggccctggggctggaaattgcgctggaccgtcgccttgctcctcgccgcggcggggactgcagtgggcgacagatgtgaaagaaacgagttccagtgccaagacgggaaatgcatctcctacaagtgggtctgcgatggcagcgctgagtgccaggatggctctgatgagtcccaggagacgtgcttgtctgtcacctgcaaatccggggacttcagctgtgggggccgtgtcaaccgctgcattcctcagttctggaggtgcgatggccaagtggactgcgacaacggctcagacgagcaaggctgtccccccaagacgtgctcccaggacgagtttcgctgccacgatgggaagtgcatctctcggcagttcgtctgtgactcagaccgggactgcttggacggctcagacgaggcctcctgcccggtgctcacctgtggtcccgccagcttccagtgcaacagctccacctgcatcccccagctgtgggcctgcgacaacgaccccgactgcgaagatggctcggatgagtggccgcagcgctgtaggggtctttacgtgttccaaggggacagtagcccctgctcggccttcgagttccactgcctaagtggcgagtgcatccactccagctggcgctgtgatggtggccccgactgcaaggacaaatctgacgaggaaaactgcgctgtggccacctgtcgccctgacgaattccagtgctctgatggaaactgcatccatggcagccggcagtgtgaccgggaatatgactgcaaggacatgagcgatgaagttggctgcgttaatgtgacactctgcgagggacccaacaagttcaagtgtcacagcggcgaatgcatcaccctggacaaagtctgcaacatggctagagactgccgggactggtcagatgaacccatcaaagagtgcgggaccaacgaatgcttggacaacaacggcggctgttcccacgtctgcaatgaccttaagatcggctacgagtgcctgtgccccgacggcttccagctggtggcccagcgaagatgcgaagatatcgatgagtgtcaggatcccgacacctgcagccagctctgcgtgaacctggagggtggctacaagtgccagtgtgaggaaggcttccagctggacccccacacgaaggcctgcaaggctgtgggctccatcgcctacctcttcttcaccaaccggcacgaggtcaggaagatgacgctggaccggagcgagtacaccagcctcatccccaacctgaggaacgtggtcgctctggacacggaggtggccagcaatagaatctactggtctgacctgtcccagagaatgatctgcagcacccagcttgacagagcccacggcgtctcttcctatgacaccgtcatcagcagggacatccaggcccccgacgggctggctgtggactggatccacagcaacatctactggaccgactctgtcctgggcactgtctctgttgcggataccaagggcgtgaagaggaaaacgttattcagggagaacggctccaagccaagggccatcgtggtggatcctgttcatggcttcatgtactggactgactggggaactcccgccaagatcaagaaagggggcctgaatggtgtggacatctactcgctggtgactgaaaacattcagtggcccaatggcatcaccctagatctcctcagtggccgcctctactgggttgactccaaacttcactccatctcaagcatcgatgtcaatgggggcaaccggaagaccatcttggaggatgaaaagaggctggcccaccccttctccttggccgtctttgaggacaaagtattttggacagatatcatcaacgaagccattttcagtgccaaccgcctcacaggttccgatgtcaacttgttggctgaaaacctactgtccccagaggatatggtcctcttccacaacctcacccagccaagaggagtgaactggtgtgagaggaccaccctgagcaatggcggctgccagtatctgtgcctccctgccccgcagatcaacccccactcgcccaagtttacctgcgcctgcccggacggcatgctgctggccagggacatgaggagctgcctcacagaggctgaggctgcagtggccacccaggagacatccaccgtcaggctaaaggtcagctccacagccgtaaggacacagcacacaaccacccggcctgttcccgacacctcccggctgcctggggccacccctgggctcaccacggtggagatagtgacaatgtctcaccaagctctgggcgacgttgctggcagaggaaatgagaagaagcccagtagcgtgagggctctgtccattgtcctccccatcgtgctcctcgtcttcctttgcctgggggtcttccttctatggaagaactggcggcttaagaacatcaacagcatcaactttgacaaccccgtctatcagaagaccacagaggatgaggtccacatttgccacaaccaggacggctacagctacccctcgagacagatggtcagtctggaggatgacgtggcgtgaacatctgcctggagtcccgcccctgcccagaacccttcctgagacctcgccggccttgttttattcaaagacagagaagaccaaagcattgcctgccagagctttgttttatatatttattcatctgggaggcagaacaggcttcggacagtgcccatgcaatggcttgggttgggattttggtttcttcctttcctgtgaaggataagagaaacaggcccggggggaccaggatgacacctccatttctctccaggaagttttgagtttctctccaccgtgacacaatcctcaaacatggaagatgaaagggcaggggatgtcaggcccagagaagcaagtggctttcaacacacaacagcagatggcaccaacgggaccccctggccctgcctcatccaccaatctctaagccaaacccctaaactcaggagtcaacgtgtttacctcttctatgcaagccttgctagacagccaggttagcctttgccctgtcacccccgaatcatgacccacccagtgtctttcgaggtgggtttgtaccttccttaagccaggaaagggattcatggcgtcggaaatgatctggctgaatccgtggtggcaccgagaccaaactcattcaccaaatgatgccacttcccagaggcagagcctgagtcaccggtcacccttaatatttattaagtgcctgagacacccggttaccttggccgtgaggacacgtggcctgcacccaggtgtggctgtcaggacaccagcctggtgcccatcctcccgacccctacccacttccattcccgtggtctccttgcactttctcagttcagagttgtacactgtgtacatttggcatttgtgttattattttgcactgttttctgtcgtgtgtgttgggatgggatcccaggccagggaaagcccgtgtcaatgaatgccggggacagagaggggcaggttgaccgggacttcaaagccgtgatcgtgaatatcgagaactgccattgtcgtctttatgtccgcccacctagtgcttccacttctatgcaaatgcctccaagccattcacttccccaatcttgtcgttgatgggtatgtgtttaaaacatgcacggtgaggccgggcgcagtggcctcacgcctgtaatcccagcactttgggaggccgaggcgggtggatcatgaggtcaggagatcgagaccatcctggctaacaaggtgaaaccccgtctctactaaaaatacaaaaaattagccgggcgcggtggtgggcacctgtagtcccagctactcgggaggctgaggcaggagaatggtgtgaacccgggaagcggagcttgcagtgagccgagattgcgccactgcagtccgcagtctggcctgggcgacagagcgagactccgtctcaaaaaaaacaaaacaaaaaaaaaccatgcatggtgcatcagcagcccatggcctctggccaggcatggcgaggctgaggtgggaggatggtttgagctcaggcatttgaggctgtcgtgagctatgattatgccactgctttccagcctgggcaacatagtaagaccccatctcttaaaaaatgaatttggccagacacaggtgcctcacgcctgtaatcccagcactttgggaggctgagctggatcacttgagttcaggagttggagaccaggcctgagcaacaaagcgagatcccatctctacaaaaaccaaaaagttaaaaatcagctgggtatggtggcacgtgcctgtgatcccagctacttgggaggctgaggcaggaggatcgcctgagcccaggaggtggaggttgcagtgagccatgatcgagccactgcactccagcctgggcaacagatgaagaccctatttcagaaatacaactataaaaaaaataaataaatcctccagtctggatcgtttgacgggacttcaggttctttctgaaatcgccgtgttactgttgcactgatgtccggagagacagtgacagcctccgtcagactcccgcgtgaagatgtcacaagggattggcaattgtccccagggacaaaacactgtgtcccccccagtgcagggaaccgtgataagcctttctggtttcggagcacgtaaatgcgtccctgtacagatagtggggattttttgttatgtttgcactttgtatattggttgaaactgttatcacttatatatatatatacacacatatatataaaatctatttatttttgcaaaccctggttgctgtatttgttcagtgactattctcggggccctgtgtagggggttattgcctctgaaatgcctcttctttatgtacaaagattatttgcacgaactggactgtgtgcaacgctttttgggagaatgatgtccccgttgtatgtatgagtggcttctgggagatgggtgtcactttttaaaccactgtatagaaggtttttgtagcctgaatgtcttactgtgatcaattaaatttcttaaatg

SEQ ID NO: 13466 - DNA, 2361 bp, Homo sapiens
aaagcagtgcttctctctggggccaaggccagagctgtggacaccttatcccactcatcctcatcctcttcctctgataaagcccctaccagtgctgataaagtctttctcgtgagagcctagaggccttaaaaaaaaaagtgcttgaaagagaaggggacaaaggaacaccagtattaagaggattttccagtgtttctggcagttggtccagaaggatgcctccattcctgcttctcacctgcctcttcatcacaggcacctccgtgtcacccgtggccctagatccttgttctgcttacatcagcctgaatgagccctggaggaacactgaccaccagttggatgagtctcaaggtcctcctctatgtgacaaccatgtgaatggggagtggtaccacttcacgggcatggcgggagatgccatgcctaccttctgcataccagaaaaccactgtggaacccacgcacctgtctggctcaatggcagccaccccctagaaggcgacggcattgtgcaacgccaggcttgtgccagcttcaatgggaactgctgtctctggaacaccacggtggaagtcaaggcttgccctggaggctactatgtgtatcgtctgaccaagcccagcgtctgcttccacgtctactgtggtcatttttatgacatctgcgacgaggactgccatggcagctgctcagataccagcgagtgcacatgcgctccaggaactgtgctaggccctgacaggcagacatgctttgatgaaaatgaatgtgagcaaaacaacggtggctgcagtgagatctgtgtgaacctcaaaaactcctaccgctgtgagtgtggggttggccgtgtgctaagaagtgatggcaagacttgtgaagacgttgaaggatgccacaataacaatggtggctgcagccactcttgccttggatctgagaaaggctaccagtgtgaatgtccccggggcctggtgctgtctgaggataaccacacttgccaagtccctgtgttgtgcaaatcaaatgccattgaagtgaacatccccagggagctggttggtggcctggagctcttcctgaccaacacctcctgccgaggagtgtccaacggcacccatgtcaacatcctcttctctctcaagacatgtggtacagtggtcgatgtggtgaatgacaagattgtggccagcaacctcgtgacaggtctacccaagcagaccccggggagcagcggggacttcatcatccgaaccagcaagctgctgatcccggtgacctgcgagtttccacgcctgtacaccatttctgaaggatacgttcccaaccttcgaaactccccactggaaatcatgagccgaaatcatgggatcttcccattcactctggagatcttcaaggacaatgagtttgaagagccttaccgggaagctctgcccaccctcaagcttcgtgactccctctactttggcattgagcccgtggtgcacgtgagcggcttggaaagcttggtggagagctgctttgccacccccacctccaagatcgacgaggtcctgaaatactacctcatccgggatggctgtgtttcagatgactcggtaaagcagtacacgtcccgggatcacctagcaaagcacttccaggtccctgtcttcaagtttgtgggcaaagaccacaaggaagtgtttctgcactgccgggttcttgtctgtggagtgttggacgagcgttcccgctgtgcccagggttgccaccggcgaatgcgtcgtggggcaggaggagaggactcagccggtctacagggccagacgctaacaggcggcccgatccgcatcgactgggaggactagttcgtagccatacctcgagtccctgcattggacggctctgctctttggagcttctccccccaccgccctctaagaacatctgccaacagctgggttcagacttcacactgtgagttcagactcccagcaccaactcactctgatcctggtccattcagtgggcacaggtcacagcactgctgaacaatgtggcctgggtggggtttcatctttctagggttgaaaactaaactgtccacccagaaagacactcaccccatttccctcatttctttcctacacttaaatacctcgtgtatggtgcaatcagaccacaaaatcagaagctgggtataatatttcaagttacaaaccctagaaaaattaaacagttactgaaattatgacttaaatacccaatgactccttaaatatgtaaattatagttataccttgaaatttcaattcaaatgcagactaattatagggaatttggaagtgtatcaataaaacagtatataatttt

SEQ ID NO: 13467 - DNA, 1980 bp, Homo sapiens
agacactggacttgtaaacgaaaagcttcataagtccctctttgcttagtacttttctcgtcctttccccagggtgcacgtaaccctcaagcactaggaccgtgcggaatccaggctgcgatggcaccttcatttaccgcccgcattcagttgttcctcttgcgggcgctaggctttctcataggcttagtaggccgagcagctttagtcttagggggtccaaagtttgcctcaaagacccctcggccggtgactgaaccattgcttctgctttcggggatgcagctggccaagctgatccgacagagaaaggtgaaatgtatagatgttgttcaggcttatatcaacagaatcaaggacgtgaacccaatgatcaatggaattgtcaagtacaggtttgaggaagcgatgagggaggctcatgctgtagatcaaaagcttgcagagaagcaggaagatgaagccaccctggaaaataaatggcccttccttggggttcctttgacagtcaaggaagctttccagctacaaggaatgcccaattcttctggactcatgaaccgtcgtgatgccattgccaaaacagatgccactgtggtggcattactgaagggagctggtgccattcctcttggcataaccaactgtagtgagttgtgtatgtggtatgaatccagtaacaagatctatggccgatcaaacaacccatatgatttacagcatattgtaggtggaagttctggtggtgagggctgcacactggcagctgcctgctcagttattggtgtgggctctgatattggtggtagcattcgaatgcctgctttcttcaatggtatatttggacacaagccttctccaggtgtggttcccaacaaaggtcagtttcccttggctgtgggagcccaggagttgtttctgtgcactggtcctatgtgccgctatgctgaagacctggcccccatgttgaaggtcatggcaggacctgggatcaaaaggttaaaactagacacaaaggtacatttaaaagacttaaaattttactggatggaacatgatggaggctcatttttaatgtccaaagtggaccaagatctcattatgactcagaaaaaggttgtggttcaccttgaaactattctaggagcctcagttcaacatgttaaactgaagaaaatgaagtactcttttcagttgtggatcgcaatgatgtcagcaaagggacatgatgggaaggaacctgtgaaatttgtagatttgcttggtgaccatgggaaacatgtcagtcctctgtgggagttgatcaaatggtgcctgggtctgtcagtgtacaccatcccttccattggactggctttgttggaagaaaagctcagatatagcaatgagaaataccaaaagtttaaggcagtggaagaaagcctgcgtaaagagctggtggatatgctaggtgatgatggtgtgttcttatatccctcacatcccacagtggcacctaagcatcatgtccctctaacacggcccttcaactttgcttacacaggtgtcttcagtgccctgggtttgcctgtgacccaatgcccactgggactgaatgccaaaggactccctttaggcatccaggttgtggctggaccctttaatgatcatctgaccctggctgtggcccagtacttggagaaaacttttgggggctgggtctgtccaggaaagttttaggaggaccttctgcaaggttaatgtgtgtgtgtgtttgtgttcgtgtggtggtgtttctattaattgggtgaaaccaagcaccagcagacaagcagagaaacaactggggaatttattgactcatttagttattctttctacttttatttccttctctaactgttggtcttactaaaatggtaatatttgcttcttgcttttatgttactggaaaattaggacatgtaaatggataagtgcaataaagtttcctaaatgctg

SEQ ID NO: 13468 - DNA, 2513 bp, Homo sapiens
gggtgtgatgcgagcgtcacggtggggatgctgctggctgcgcggcgctgagggccagcgagagcgagagcccgcccggggcggaggacggactcatccggatctggctgcagcgtgggctcggagctcccccttcctctcggtctccctctcggcccccctttatttccttcttgctttgcgtctttaacacctctcgaccctgtcctccccccgccactggaagtcttcccgtctctaaatggaattagtggagcccggagcctctggtgtaacgcacagacatgatccatgggcgcagcgtgcttcacattgtagcaagtttaatcatcctccatttgtctggggcaaccaagaaaggaacagaaaagcaaaccacctcagaaacacagaagtcagtgcagtgtggaacttggacaaaacatgcagagggaggtatctttacctctcccaactatcccagcaagtatccccctgaccgggaatgcatctacatcatagaagccgctccaagacagtgcattgaactttactttgatgaaaagtactctattgaaccgtcttgggagtgcaaatttgatcatattgaagttcgagatggaccttttggcttttctccaataattggacgtttctgtggacaacaaaatccacctgtcataaaatccagtggaagatttctatggattaaattttttgctgatggagagctggaatctatgggattttcagctcgatacaatttcacacctgatcctgactttaaggaccttggagctttgaaaccattaccagcgtgtgagtttgagatgggcggttccgaaggaattgtggagtctatacaaattatgaaggaaggcaaagctactgctagcgaggctgttgattgcaagtggtacatccgagcacctccacggtccaagatttacttacgattcttggactatgagatgcagaattcaaatgagtgcaagaggaattttgtggctgtgtatgatggaagcagttccgtggaggatttgaaagctaagttctgtagcactgtggctaatgatgtcatgctacgcacgggtcttggggtgatccgcatgtgggcagatgagggcagtcgaaacagccgatttcagatgctcttcacatcctttcaagaacctccttgtgaaggcaacacattcttctgccatagtaacatgtgtattaataatactttggtctgcaatggactccagaactgtgtgtatccttgggatgaaaatcactgtaaagagaagaggaaaaccagcctgctggaccagctgaccaacaccagtgggactgtcattggcgtgacttcctgcatcgtgatcatcctcattatcatctctgtcatcgtacagatcaaacagcctcgtaaaaagtatgtccaaaggaaatcagactttgaccagacagttttccaggaggtatttgaacctcctcattatgagttatgcactctcagagggacaggagctacagctgactttgcagatgtggcagatgactttgaaaattaccataaactgcggaggtcatcttccaaatgcattcatgaccatcactgtggatcacagctgtccagcactaaaggcagccgcagtaacctcagcacaagagatgcttctatcttgacagagatgcccacacagccaggaaaacccctcatcccacccatgaacagaagaaatatccttgtcatgaaacacaactactcgcaagatgctgcagatgcctgtgacatagatgaaatcgaagaggtgccgaccaccagtcacaggctgtccagacacgataaagccgtccagcggttctgcctcattgggtctctaagcaaacatgaatctgaatacaacacaactagggtctagaaagaaaattcaagagaagaactatttatacaaacatggggactgtgaaaagaaaattctatagtgaattgtgaaaagtggacatatttctaaattcattccactgcctttatccaaacttaagaattacagacatttgttattccttcggcaagacatccccgctgcacactgatatgttcatttcgtaatttggttgctggccaccaagtgctccttagtttttaaatacattttgagattaactggaaacttgaagaagaaattagttcccgattaagactatcccaactttatttttattgtcagtttcacttttgtttctatgttgttttatgtctttgttatataattgtacattgtgtgatatgtgaaaaaaaaacacgaatttggatgaaccttgtgttacatgtacattgttttcattatatagacagcttgagaatagtgcgttcctgaatgattttgaacatgctacagtgaaaagtgacagtgtggaccatggaatcaccagctagaggttatggactatacacacctattattatattctgattaaatacaggaaaaagtaacaagtaaaattactagattgcaataaaaaaattcattttttggtctttcctg

SEQ ID NO: 13469 - DNA, 2328 bp, Homo sapiens
acagccacactgcagtatgtcaggaacagtcatggagctgttctcattgtttgcctctccttttcctcctttttaccttctggcccctctcttcattcagagatgctggcagagccattccctaaggttgtagcaagtttaatcatcctccatttgtctggggcaaccaagaaaggaacagaaaagcaaaccacctcagaaacacagaagtcagtgcagtgtggaacttggacaaaacatgcagagggaggtatctttacctctcccaactatcccagcaagtatccccctgaccgggaatgcatctacatcatagaagccgctccaagacagtgcattgaactttactttgatgaaaagtactctattgaaccgtcttgggagtgcaaatttgatcatattgaagttcgagatggaccttttggcttttctccaataattggacgtttctgtggacaacaaaatccacctgtcataaaatccagtggaagatttctatggattaaattttttgctgatggagagctggaatctatgggattttcagctcgatacaatttcacacctgatcctgactttaaggaccttggagctttgaaaccattaccagcgtgtgagtttgagatgggcggttccgaaggaattgtggagtctatacaaattatgaaggaaggcaaagctactgctagcgaggctgttgattgcaagtggtacatccgagcacctccacggtccaagatttacttacgattcttggactatgagatgcagaattcaaatgagtgcaagaggaattttgtggctgtgtatgatggaagcagttccgtggaggatttgaaagctaagttctgtagcactgtggctaatgatgtcatgctacgcacgggtcttggggtgatccgcatgtgggcagatgagggcagtcgaaacagccgatttcagatgctcttcacatcctttcaagaacctccttgtgaaggcaacacattcttctgccatagtaacatgtgtattaataatactttggtctgcaatggactccagaactgtgtgtatccttgggatgaaaatcactgtaaagagaagaggaaaaccagcctgctggaccagctgaccaacaccagtgggactgtcattggcgtgacttcctgcatcgtgatcatcctcattatcatctctgtcatcgtacagatcaaacagcctcgtaaaaagtatgtccaaaggaaatcagactttgaccagacagttttccaggaggtatttgaacctcctcattatgagttatgcactctcagagggacaggagctacagctgactttgcagatgtggcagatgactttgaaaattaccataaactgcggaggtcatcttccaaatgcattcatgaccatcactgtggatcacagctgtccagcactaaaggcagccgcagtaacctcagcacaagagatgcttctatcttgacagagatgcccacacagccaggaaaacccctcatcccacccatgaacagaagaaatatccttgtcatgaaacacaactactcgcaagatgctgcagatgcctgtgacatagatgaaatcgaagaggtgccgaccaccagtcacaggctgtccagacacgataaagccgtccagcggttctgcctcattgggtctctaagcaaacatgaatctgaatacaacacaactagggtctagaaagaaaattcaagagaagaactatttatacaaacatggggactgtgaaaagaaaattctatagtgaattgtgaaaagtggacatatttctaaattcattccactgcctttatccaaacttaagaattacagacatttgttattccttcggcaagacatccccgctgcacactgatatgttcatttcgtaatttggttgctggccaccaagtgctccttagtttttaaatacattttgagattaactggaaacttgaagaagaaattagttcccgattaagactatcccaactttatttttattgtcagtttcacttttgtttctatgttgttttatgtctttgttatataattgtacattgtgtgatatgtgaaaaaaaaacacgaatttggatgaaccttgtgttacatgtacattgttttcattatatagacagcttgagaatagtgcgttcctgaatgattttgaacatgctacagtgaaaagtgacagtgtggaccatggaatcaccagctagaggttatggactatacacacctattattatattctgattaaatacaggaaaaagtaacaagtaaaattactagattgcaataaaaaaattcattttttggtctttcctg

SEQ ID NO: 13470 - DNA, 1665 bp, Homo sapiens
ggagctactcagaagcgggagtctccgagagaagaaaagcaggtggaaggagaggaagcggatgccgtggggtttacagcaggaaaatccgtggagacagcagatccgagaagcggcgatgtttgcgtagaaccctgtacgtgcttccttcggcctgtcgctcttcccttctctctgaccagcaccatgcttctcctggtgacaagccttctgctctgtgagttaccacacccagcattcctcctgatcccagagaaatcggatctgcgaacagtggcaccagcctctagtctcaatgtgaggtttgactccaggacgatgaatttaagctgggactgccaagaaaacacaaccttcagcaagtgtttcttaactgacaagaagaacagagtcgtggaacccaggctcagtaacaacgaatgttcgtgcacatttcgtgaaatttgtctgcatgaaggagtcacatttgaggttcacgtgaatactagtcaaagaggatttcaacagaaactgctttatccaaattcaggaagggagggtaccgctgctcagaatttctcctgtttcatctacaatgcggatttaatgaactgtacctgggcgaggggtccgacggccccccgtgacgtccagtattttttgtacatacgaaactcaaagagaaggagggagatccggtgtccttattacatacaagactcaggaacccatgtgggatgtcacctggataacctgtcaggattaacgtctcgcaattactttctggttaacggaaccagccgagaaattggcatccaattctttgattcacttttggacacaaagaaaatagaacgattcaaccctcccagcaatgtcaccgtacgttgcaacacgacgcactgcctcgtacggtggaaacagcccaggacctatcagaagctgtcgtacctggactttcagtaccagctggacgtccacagaaagaatacccagcctggcacggaaaacctactgattaatgtttctggtgatttggaaaatagatacaactttccaagctctgagcccagagcaaaacacagtgtgaagatcagagctgcagacgtccgcatcttgaattggagctcctggagtgaagccattgaatttgatcatctgggaggaattcaccccagaggaagggaaaggctaccgcgaagaggtcttgaccgtgaaggaaattacctgagacccagagggtgtaggaatggcatggacatctccgcctccgcgacacgggggaactgttttcttgatgatgctgtgaacctttatatcattttctatgtttttatttaaaaacatgacatttggggccaggcgcggtggctcacgcctgtaatcccagcactttgggaggccaaggcaggcggatcacctgaggtcaggagttcaagaccagcctgcccaacatggtgaaaccccatctggactaaaaatgcagaaatttacccaggcacggcggcggacgcccatcatcccagctacttgggaggctgaggcaggagaattgcttgaacccgtgaggcggaggttgtagtgagccaagatcgcaccattgcacaccaacctgggtgacagagcaagattgcatctcaaaacaaacaataataataaataataaaaacctgatatttggctggg

SEQ ID NO: 13471 - DNA, 1587 bp, Homo sapiens
ctcttcccttctctctgaccagcaccatgcttctcctggtgacaagccttctgctctgtgagttaccacacccagcattcctcctgatcccagagaaatcggatctgcgaacagtggcaccagcctctagtctcaatgtgaggtttgactccaggacgatgaatttaagctgggactgccaagaaaacacaaccttcagcaagtgtttcttaactgacaagaagaacagagtcgtggaacccaggctcagtaacaacgaatgttcgtgcacatttcgtgaaatttgtctgcatgaaggagtcacatttgaggttcacgtgaatactagtcaaagaggatttcaacagaaactgctttatccaaattcaggaagggagggtaccgctgctcagaatttctcctgtttcatctacaatgcggatttaatgaactgtacctgggcgaggggtccgacggccccccgtgacgtccagtattttttgtacatacgaaactcaaagagaaggagggagatccggtgtccttattacatacaagactcaggaacccatgtgggatgtcacctggataacctgtcaggattaacgtctcgcaattactttctggttaacggaaccagccgagaaattggcatccaattctttgattcacttttggacacaaagaaaatagaacgattcaaccctcccagcaatgtcaccgtacgttgcaacacgacgcactgcctcgtacggtggaaacagcccaggacctatcagaagctgtcgtacctggactttcagtaccagctggacgtccacagaaagaatacccagcctggcacggaaaacctactgattaatgtttctggtgatttggaaaatagatacaactttccaagctctgagcccagagcaaaacacagtgtgaagatcagagctgcagacgtccgcatcttgaattggagctcctggagtgaagccattgaatttggttccttaggatacagcggctgttcccgccagttccacagatcaaagacaaactgaatgataaccatgaggtggaagacgagatcatctgggaggaattcaccccagaggaagggaaaggctaccgcgaagaggtcttgaccgtgaaggaaattacctgagacccagagggtgtaggaatggcatggacatctccgcctccgcgacacgggggaactgttttcttgatgatgctgtgaacctttatatcattttctatgtttttatttaaaaacatgacatttggggccaggcgcggtggctcacgcctgtaatcccagcactttgggaggccaaggcaggcggatcacctgaggtcaggagttcaagaccagcctgcccaacatggtgaaaccccatctggactaaaaatgcagaaatttacccaggcacggcggcggacgcccatcatcccagctacttgggaggctgaggcaggagaattgcttgaacccgtgaggcggaggttgtagtgagccaagatcgcaccattgcacaccaacctgggtgacagagcaagattgcatctcaaaacaaacaataataataaataataaaaacctgatatttggctggg

SEQ ID NO: 13472 - DNA, 1447 bp, Homo sapiens
ggagctactcagaagcgggagtctccgagagaagaaaagcaggtggaaggagaggaagcggatgccgtggggtttacagcaggaaaatccgtggagacagcagatccgagaagcggcgatgtttgcgtagaaccctgtacgtgcttccttcggcctgtcgctcttcccttctctctgaccagcaccatgcttctcctggtgacaagccttctgctctgtgagttaccacacccagcattcctcctgatcccagagaaatcggatctgcgaacagtggcaccagcctctagtctcaatgtgaggtttgactccaggacgatgaatttaagctgggactgccaagaaaacacaaccttcagcaagtgtttcttaactgacaagaagaacagagtcgtggaacccaggctcagtaacaacgaatgttcgtgcacatttcgtgaaatttgtctgcatgaaggagtcacatttgaggttcacgtgaatactagtcaaagaggatttcaacagaaactgctttatccaaattcaggaagggagggtaccgctgctcagaatttctcctgtttcatctacaatgcggatttaatgaactgtacctgggcgaggggtccgacggccccccgtgacgtccagtattttttgtacatacgaaactcaaagagaaggagggagatccggtgtccttattacatacaagactcaggaacccatgtgggatgtcacctggataacctgtcaggattaacgtctcgcaattactttctggttaacggaaccagccgagaaattggcatccaattctttgattcacttttggacacaaagaaaataggttccttaggatacagcggctgttcccgccagttccacagatcaaagacaaactgaatgataaccatgaggtggaagacgagatcatctgggaggaattcaccccagaggaagggaaaggctaccgcgaagaggtcttgaccgtgaaggaaattacctgagacccagagggtgtaggaatggcatggacatctccgcctccgcgacacgggggaactgttttcttgatgatgctgtgaacctttatatcattttctatgtttttatttaaaaacatgacatttggggccaggcgcggtggctcacgcctgtaatcccagcactttgggaggccaaggcaggcggatcacctgaggtcaggagttcaagaccagcctgcccaacatggtgaaaccccatctggactaaaaatgcagaaatttacccaggcacggcggcggacgcccatcatcccagctacttgggaggctgaggcaggagaattgcttgaacccgtgaggcggaggttgtagtgagccaagatcgcaccattgcacaccaacctgggtgacagagcaagattgcatctcaaaacaaacaataataataaataataaaaacctgatatttggctggg

SEQ ID NO: 13473 - DNA, 1844 bp, Homo sapiens
ggagctactcagaagcgggagtctccgagagaagaaaagcaggtggaaggagaggaagcggatgccgtggggtttacagcaggaaaatccgtggagacagcagatccgagaagcggcgatgtttgcgtagaaccctgtacgtgcttccttcggcctgtcgctcttcccttctctctgaccagcaccatgcttctcctggtgacaagccttctgctctgtgagttaccacacccagcattcctcctgatcccagagaaatcggatctgcgaacagtggcaccagcctctagtctcaatgtgaggtttgactccaggacgatgaatttaagctgggactgccaagaaaacacaaccttcagcaagtgtttcttaactgacaagaagaacagagtcgtggaacccaggctcagtaacaacgaatgttcgtgcacatttcgtgaaatttgtctgcatgaaggagtcacatttgaggttcacgtgaatactagtcaaagaggatttcaacagaaactgctttatccaaattcaggaagggagggtaccgctgctcagaatttctcctgtttcatctacaatgcggatttaatgaactgtacctgggcgaggggtccgacggccccccgtgacgtccagtattttttgtacatacgaaactcaaagagaaggagggagatccggtgtccttattacatacaagactcaggaacccatgtgggatgtcacctggataacctgtcaggattaacgtctcgcaattactttctggttaacggaaccagccgagaaattggcatccaattctttgattcacttttggacacaaagaaaatagaacgattcaaccctcccagcaatgtcaccgtacgttgcaacacgacgcactgcctcgtacggtggaaacagcccaggacctatcagaagctgtcgtacctggactttcagtaccagctggacgtccacagaaagaatacccagcctggcacggaaaacctactgattaatgtttctggtgatttggaaaatagatacaactttccaagctctgagcccagagcaaaacacagtgtgaagatcagagctgcagacgtccgcatcttgaattggagctcctggagtgaagccattgaatttggttctgacgacgggaacctcggctctgtgtacatttatgtgctcctaatcgtgggaacccttgtctgtggcatcgtcctcggcttcctctttaaaaggttccttaggatacagcggctgttcccgccagttccacagatcaaagacaaactgaatgataaccatgaggtggaagacgagatcatctgggaggaattcaccccagaggaagggaaaggctaccgcgaagaggtcttgaccgtgaaggaaattacctgagacccagagggtgtaggaatggcatggacatctccgcctccgcgacacgggggaactgttttcttgatgatgctgtgaacctttatatcattttctatgtttttatttaaaaacatgacatttggggccaggcgcggtggctcacgcctgtaatcccagcactttgggaggccaaggcaggcggatcacctgaggtcaggagttcaagaccagcctgcccaacatggtgaaaccccatctggactaaaaatgcagaaatttacccaggcacggcggcggacgcccatcatcccagctacttgggaggctgaggcaggagaattgcttgaacccgtgaggcggaggttgtagtgagccaagatcgcaccattgcacaccaacctgggtgacagagcaagattgcatctcaaaacaaacaataataataaataataaaaacctgatatttggctggg

SEQ ID NO: 13474 - DNA, 1820 bp, Homo sapiens
ggagctactcagaagcgggagtctccgagagaagaaaagcaggtggaaggagaggaagcggatgccgtggggtttacagcaggaaaatccgtggagacagcagatccgagaagcggcgatgtttgcgtagaaccctctcttcccttctctctgaccagcaccatgcttctcctggtgacaagccttctgctctgtgagttaccacacccagcattcctcctgatcccagagaaatcggatctgcgaacagtggcaccagcctctagtctcaatgtgaggtttgactccaggacgatgaatttaagctgggactgccaagaaaacacaaccttcagcaagtgtttcttaactgacaagaagaacagagtcgtggaacccaggctcagtaacaacgaatgttcgtgcacatttcgtgaaatttgtctgcatgaaggagtcacatttgaggttcacgtgaatactagtcaaagaggatttcaacagaaactgctttatccaaattcaggaagggagggtaccgctgctcagaatttctcctgtttcatctacaatgcggatttaatgaactgtacctgggcgaggggtccgacggccccccgtgacgtccagtattttttgtacatacgaaactcaaagagaaggagggagatccggtgtccttattacatacaagactcaggaacccatgtgggatgtcacctggataacctgtcaggattaacgtctcgcaattactttctggttaacggaaccagccgagaaattggcatccaattctttgattcacttttggacacaaagaaaatagaacgattcaaccctcccagcaatgtcaccgtacgttgcaacacgacgcactgcctcgtacggtggaaacagcccaggacctatcagaagctgtcgtacctggactttcagtaccagctggacgtccacagaaagaatacccagcctggcacggaaaacctactgattaatgtttctggtgatttggaaaatagatacaactttccaagctctgagcccagagcaaaacacagtgtgaagatcagagctgcagacgtccgcatcttgaattggagctcctggagtgaagccattgaatttggttctgacgacgggaacctcggctctgtgtacatttatgtgctcctaatcgtgggaacccttgtctgtggcatcgtcctcggcttcctctttaaaaggttccttaggatacagcggctgttcccgccagttccacagatcaaagacaaactgaatgataaccatgaggtggaagacgagatcatctgggaggaattcaccccagaggaagggaaaggctaccgcgaagaggtcttgaccgtgaaggaaattacctgagacccagagggtgtaggaatggcatggacatctccgcctccgcgacacgggggaactgttttcttgatgatgctgtgaacctttatatcattttctatgtttttatttaaaaacatgacatttggggccaggcgcggtggctcacgcctgtaatcccagcactttgggaggccaaggcaggcggatcacctgaggtcaggagttcaagaccagcctgcccaacatggtgaaaccccatctggactaaaaatgcagaaatttacccaggcacggcggcggacgcccatcatcccagctacttgggaggctgaggcaggagaattgcttgaacccgtgaggcggaggttgtagtgagccaagatcgcaccattgcacaccaacctgggtgacagagcaagattgcatctcaaaacaaacaataataataaataataaaaacctgatatttggctggg

SEQ ID NO: 13475 - DNA, 1708 bp, Homo sapiens
ggagctactcagaagcgggagtctccgagagaagaaaagcaggtggaaggagaggaagcggatgccgtggggtttacagcaggaaaatccgtggagacagcagatccgagaagcggcgatgtttgcgtagaaccctgtacgtgcttccttcggcctgtcgctcttcccttctctctgaccagcaccatgcttctcctggtgacaagccttctgctctgtgagttaccacacccagcattcctcctgatcccagagaaatcggatctgcgaacagtggcaccagcctctagtctcaatgtgaggtttgactccaggacgatgaatttaagctgggactgccaagaaaacacaaccttcagcaagtgtttcttaactgacaagaagaacagagtcgtggaacccaggctcagtaacaacgaatgttcgtgcacatttcgtgaaatttgtctgcatgaaggagtcacatttgaggttcacgtgaatactagtcaaagaggatttcaacagaaactgctttatccaaattcaggaagggagggtaccgctgctcagaatttctcctgtttcatctacaatgcggatttaatgaactgtacctgggcgaggggtccgacggccccccgtgacgtccagtattttttgtacatacgaaactcaaagagaaggagggagatccggtgtccttattacatacaagactcaggaacccatgtgggatgtcacctggataacctgtcaggattaacgtctcgcaattactttctggttaacggaaccagccgagaaattggcatccaattctttgattcacttttggacacaaagaaaatagaacgattcaaccctcccagcaatgtcaccgtacgttgcaacacgacgcactgcctcgtacggtggaaacagcccaggacctatcagaagctgtcgtacctggactttcagtaccagctggacgtccacagaaagaatacccagcctggcacggaaaacctactggttctgacgacgggaacctcggctctgtgtacatttatgtgctcctaatcgtgggaacccttgtctgtggcatcgtcctcggcttcctctttaaaaggttccttaggatacagcggctgttcccgccagttccacagatcaaagacaaactgaatgataaccatgaggtggaagacgagatcatctgggaggaattcaccccagaggaagggaaaggctaccgcgaagaggtcttgaccgtgaaggaaattacctgagacccagagggtgtaggaatggcatggacatctccgcctccgcgacacgggggaactgttttcttgatgatgctgtgaacctttatatcattttctatgtttttatttaaaaacatgacatttggggccaggcgcggtggctcacgcctgtaatcccagcactttgggaggccaaggcaggcggatcacctgaggtcaggagttcaagaccagcctgcccaacatggtgaaaccccatctggactaaaaatgcagaaatttacccaggcacggcggcggacgcccatcatcccagctacttgggaggctgaggcaggagaattgcttgaacccgtgaggcggaggttgtagtgagccaagatcgcaccattgcacaccaacctgggtgacagagcaagattgcatctcaaaacaaacaataataataaataataaaaacctgatatttggctggg

SEQ ID NO: 13476 - DNA, 1964 bp, Homo sapiens
atcactgtagtagtagctggaaagagaaatctgtgactccaattagccagttcctgcagaccttgtgaggactagaggaagaatgctcctggctgttttgtactgcctgctgtggagtttccagacctccgctggccatttccctagagcctgtgtctcctctaagaacctgatggagaaggaatgctgtccaccgtggagcggggacaggagtccctgtggccagctttcaggcagaggttcctgtcagaatatccttctgtccaatgcaccacttgggcctcaatttcccttcacaggggtggatgaccgggagtcgtggccttccgtcttttataataggacctgccagtgctctggcaacttcatgggattcaactgtggaaactgcaagtttggcttttggggaccaaactgcacagagagacgactcttggtgagaagaaacatcttcgatttgagtgccccagagaaggacaaattttttgcctacctcactttagcaaagcataccatcagctcagactatgtcatccccatagggacctatggccaaatgaaaaatggatcaacacccatgtttaacgacatcaatatttatgacctctttgtctggatgcattattatgtgtcaatggatgcactgcttgggggatctgaaatctggagagacattgattttgcccatgaagcaccagcttttctgccttggcatagactcttcttgttgcggtgggaacaagaaatccagaagctgacaggagatgaaaacttcactattccatattgggactggcgggatgcagaaaagtgtgacatttgcacagatgagtacatgggaggtcagcaccccacaaatcctaacttactcagcccagcatcattcttctcctcttggcagattgtctgtagccgattggaggagtacaacagccatcagtctttatgcaatggaacgcccgagggacctttacggcgtaatcctggaaaccatgacaaatccagaaccccaaggctcccctcttcagctgatgtagaattttgcctgagtttgacccaatatgaatctggttccatggataaagctgccaatttcagctttagaaatacactggaaggatttgctagtccacttactgggatagcggatgcctctcaaagcagcatgcacaatgccttgcacatctatatgaatggaacaatgtcccaggtacagggatctgccaacgatcctatcttccttcttcaccatgcatttgttgacagtatttttgagcagtggctccgaaggcaccgtcctcttcaagaagtttatccagaagccaatgcacccattggacataaccgggaatcctacatggttccttttataccactgtacagaaatggtgatttctttatttcatccaaagatctgggctatgactatagctatctacaagattcagacccagactcttttcaagactacattaagtcctatttggaacaagcgagtcggatctggtcatggctccttggggcggcgatggtaggggccgtcctcactgccctgctggcagggcttgtgagcttgctgtgtcgtcacaagagaaagcagcttcctgaagaaaagcagccactcctcatggagaaagaggattaccacagcttgtatcagagccatttataaaaggcttaggcaatagagtagggccaaaaagcctgacctcactctaactcaaagtaatgtccaggttcccagagaatatctgctggtatttttctgtaaagaccatttgcaaaattgtaacctaatacaaagtgtagccttcttccaactcaggtagaacacacctgtctttgtcttgctgttttcactcagcccttttaacattttcccctaagcccatatgtctaaggaaaggatgctatttggtaatgaggaactgttatttgtatgtgaattaaagtgctcttatttt

SEQ ID NO: 13477 - DNA, 2082 bp, Homo sapiens
cttggctggaacctgagacggattcgctcccaaatgatgctccagtggctggagcaactcaagttcatcattgtcctgagagagaggagcagcgcggttctcggccgggacagcagaacgccaggggaccctcacctgggcgcgccggggcacgggctttgattgtcctggggtcgcggagacccgcgcgcctgccctgcacgccgggcggcaacctttgcagtcgcgttggctgctgcgatcggccggcgggtccctgccgaaggctcggctgcttctgtccacctcttacacttcttcatttatcggtggatcatttcgagagtccgtcttgtaaatgtttggcactttgctactttattgcttctttctggcgacagttccagcactcgccgagaccggcggagaaaggcagctgagcccggagaagagcgaaatatggggacccgggctaaaagcagacgtcgtccttcccgcccgctatttctatattcaggcagtggatacatcagggaataaattcacatcttctccaggcgaaaaggtcttccaggtgaaagtctcagcaccagaggagcaattcactagagttggagtccaggttttagaccgaaaagatgggtccttcatagtaagatacagaatgtatgcaagctacaaaaatctgaaggtggaagttaaattccaagggcaacatgtggccaaatccccatatattttaaaagggccggtttaccatgagaactgtgactgtcctctgcaagatagtgcagcctggctacgggagatgaactgccctgaaaccattgctcagattcagagagatctggcacatttccctgctgtggatccagaaaagattgcagtagaaatcccaaaaagatttggacagaggcagagcctatgtcactacaccttaaaggataacaaggtttatatcaagactcatggtgaacatgtaggttttagaattttcatggatgccatactactttctttgactagaaaggtgaagatgccagatgtggagctctttgttaatttgggagactggcctttggaaaaaaagaaatccaattcaaacatccatccgatcttttcctggtgtggctccacagattccaaggatatcgtgatgcctacgtacgatttgactgattctgttctggaaaccatgggccgggtaagtctggatatgatgtccgtgcaagctaacacgggtcctccctgggaaagcaaaaattccactgccgtctggagagggcgagacagccgcaaagagagactcgagctggttaaactcagtagaaaacacccagaactcatagacgctgctttcaccaactttttcttctttaaacacgatgaaaacctgtatggtcccattgtgaaacatatttcattttttgatttcttcaagcataagtatcaaataaatatcgatggcactgtagcagcttatcgcctgccatatttgctagttggtgacagtgttgtgctgaagcaggattccatctactatgaacatttttacaatgagctgcagccctggaaacactacattccagttaagagcaacctgagcgatctgctagaaaaacttaaatgggcgaaagatcacgatgaagaggccaaaaagatagcaaaagcaggacaagaatttgcaagaaataatctcatgggcgatgacatattctgttattatttcaaacttttccaggaatatgccaatttacaagtgagtgagccccaaatccgagagggcatgaaaagggtagaaccacagactgaggacgacctcttcccttgtacttgccataggaaaaagaccaaagatgaactctgatatgcaaaataacttctattagaataatggtgctctgaagactcttcttaactaaaaagaagaatttttttaagtattaattccatggacaatataaaatctgtgtgattgtttgcagtatgaagacacatttctacttatgcagtattctcatgactgtactttaaagtacatttttagaattttataataaaaccacctttattttaaaggaaaaaaaaaaaaaaaaaaaaaaa

SEQ ID NO: 13478 - DNA, 2137 bp, Homo sapiens
  misc_feature 2108: n = A,T,C or G
cctggatcttgtttctggactgagatggatggagaggccacagtgaagcctggagaacaagtgcctttgtggacacatggatggccccctgatgacccatctccttcctttgctgcaggttcttctttcgcccttccacaaaaaagaccccatccgagatggctgtgggagggctctctcccctccaggacccatctccgggccatgggaacactcaggccttcctcgcccctctgctggcgggaggagagctcctttgcagctccaaattcattgaagggctcaaggctggtgtcaggggagcctggaggagctgtcaccatccagtgccattatgccccctcatctgtcaacaggcaccagaggaagtactggtgccgtctggggcccccaagatggatctgccagaccattgtgtccaccaaccagtatactcaccatcgctatcgtgaccgtgtggccctcacagactttccacagagaggcttgtttgtggtgaggctgtcccaactgtccccggatgacatcggatgctacctctgcggcattggaagtgaaaacaacatgctgttcttaagcatgaatctgaccatctctgcaggtcccgccagcaccctccccacagccactccagctgctggggagctcaccatgagatcctatggaacagcgtctccagtggccaacagatggaccccaggaaccacccagaccttaggacaggggacagcatgggacacagttgcttccactccaggaaccagcaagactacagcttcagctgagggaagacgaaccccaggagcaaccaggccagcagctccagggacaggcagctgggcagagggttctgtcaaagcacctgctccgattccagagagtccaccttcaaagagcagaagcatgtccaatacaacagaaggtgtttgggagggcaccagaagctcggtgacaaacagggctagagccagcaaggacaggagggagatgacaactaccaaggctgataggccaagggaggacatagagggggtcaggatagctcttgatgcagccaaaaaggtcctaggaaccattgggccaccagctctggtctcagaaactttggcctgggaaatcctcccacaagcaacgccagtttctaagcaacaatctcagggttccattggagaaacaactccagctgcaggcatgtggaccttgggaactccagctgcagatgtgtggatcaccagcatggaggcagcatctggggaaggaagcgctgcaggggacctagatgctgccactggagacagaggtccccaagcaacactgagccagaccccggcagtaggaccctggggaccccctggcaaggagtcctccgtgaagcgagcaacatgcccaggtttaagtactcttaaagaaatcaaagtcagtgctgtccttacccagaaccctcacagtctgctctgtgtctctgcagctcaggaggcagaaagggtcaccttaattcagatgacacattttctggaagtgaacccccaagcagaccagctgccccatgtggaaagaaagatgctccaggatgactctcttcctgctggggccagcctgactgccccagagagaaatccaggaccctgagggacagagagatgaactgctcagttaccatgggagaaggaccaagatcaaaggccttcaggaccccagcctctttccatcatccttcctccacctgtgggaagagaagctgatgcagccggtgctccacccatggaagaaaggctggctgtccttgggcccaagaaagtcaagcattatccacgtccaaaggtgacaagatgactcaaaggagacttcaagaacagtgtatgaaacactggaagaggtcacctaggaaaagcatgaaatttccattcctgaatgtttgaaaatagaagaggcttccaatcagtgtggaaagtgacaaatcccctatcaacactcccagcccttgctgggggctccttttctgactactgttagcactcagcctcccattcacatgtattatatttaagtgtaccagccttgccttctcaagtagattctaagctccttttaaggcagtaattgcattntatctgtctcatgatgcccccagagaact

SEQ ID NO: 13479 - DNA, 2099 bp, Homo sapiens
gaaagaaacaacaactggaaaagaagcattgcataagaccaggatgtctctgaaatggatgtcagtctttctgctgatgcagctcagttgttactttagctctgggagttgtggaaaggtgctggtgtggcccacagaatacagccattggataaatatgaagacaatcctggaagagcttgttcagaggggtcatgaggtgattgtgttgacatcttcggcttctattcttgtcaatgccagtaaatcatctgctattaaattagaagtttatcctacatctttaactaaaaatgatttggaagatttttttatgaaaatgttcgatagatggacatatagtatttcaaaaaatacattttggtcatatttttcacaactacaagaattgtgttgggaatattctgactataatataaagctctgtgaagatgcagttttgaacaagaaacttatgagaaaactacaagagtcaaaatttgatgtccttctggcagatgccgttaatccctgtggtgagctgctggctgaactacttaacataccctttctgtacagtctccgcttctctgttggctacacagttgagaagaatggtggaggatttctgttccctccttcctatgtacctgttgttatgtcagaattaagtgatcaaatgattttcatggagaggataaaaaatatgatatatatgctttattttgacttttggtttcaagcatatgatctgaagaagtgggaccagttttatagtgaagttctaggaagacccactacattatttgagacaatggggaaagctgaaatgtggctcattcgaacctattgggattttgaatttcctcgcccattcttaccaaatgttgattttgttggaggacttcactgtaaaccagccaaacccttgcctaaggaaatggaagagtttgtgcagagctctggagaaaatggtattgtggtgttttctctggggtcgatgatcagtaacatgtcagaagaaagtgccaacatgattgcatcagcccttgcccagatcccacaaaaggttctatggagatttgatggcaagaagccaaatactttaggttccaatactcgactgtataagtggttaccccagaatgaccttcttggtcatcccaaaaccaaagcttttataactcatggtggaaccaatggcatctatgaggcgatctaccatgggatccctatggtgggcattcccttgtttgcggatcaacatgataacattgctcacatgaaagccaagggagcagccctcagtgtggacatcaggaccatgtcaagtagagatttgctcaatgcattgaagtcagtcattaatgaccctatctataaagagaatatcatgaaattatcaagaattcatcatgatcaaccggtgaagcccctggatcgagcagtcttctggattgagtttgtcatgcgccataaaggagccaagcaccttcgggtcgcagcccacaacctcacctggatccagtaccactctttggatgtgatagcattcctgctggcctgcgtggcaactatgatatttatgatcacaaaatgttgcctgttttgtttccgaaagcttgccaaaacaggaaagaagaagaaaagggattagttatatcaaaagcctgaagtggaatgaccaaaagatgggactcctcctttattccagcatggagggttttaaatggaggatttcctttttcctgcgacaaaacgtcttttcacaacttaccctgttaagtcaaaatttattttccaggaatttaatatgtactttagttggaattattctatgtcaatgatttttaagctatgaaaaataataatataaaaccttatgggcttatattgaaatttattattctaatccaaaagttaccccacacaaaagttactgagcttccttatgtttcacacattgtatttgaacacaaaacattaacaactccactcatagtatcaacattgttttgcaaatactcagaatattttggcttcattttgagcagaatttttgtttttaattttgccaatgaaatcttcaataattaaaaaaaaaaaaaaaaaaaaaaaaa

SEQ ID NO: 13480 - DNA, 2090 bp, Homo sapiens
ttcggcacgagtaagaccaggatgtctctgaaatggacgtcagtctttctgctgatacagctcagttgttactttagctctggaagctgtggaaaggtgctagtgtggcccacagaatacagccattggataaatatgaagacaatcctggaagagcttgttcagaggggtcatgaggtgactgtgttgacatcttcggcttctactcttgtcaatgccagtaaatcatctgctattaaattagaagtttatcctacatctttaactaaaaatgatttggaagattctcttctgaaaattctcgatagatggatatatggtgtttcaaaaaatacattttggtcatatttttcacaattacaagaattgtgttgggaatattatgactacagtaacaagctctgtaaagatgcagttttgaataagaaacttatgatgaaactacaagagtcaaagtttgatgtcattctggcagatgcccttaatccctgtggtgagctactggctgaactatttaacataccctttctgtacagtcttcgattctctgttggctacacatttgagaagaatggtggaggatttctgttccctccttcctatgtacctgttgttatgtcagaattaagtgatcaaatgattttcatggagaggataaaaaatatgatacatatgctttattttgacttttggtttcaaatttatgatctgaagaagtgggaccagttttatagtgaagttctaggaagacccactacattatttgagacaatggggaaagctgaaatgtggctcattcgaacctattgggattttgaatttcctcgcccattcttaccaaatgttgattttgttggaggacttcactgtaaaccagccaaacccctgcctaaggaaatggaagagtttgtgcagagctctggagaaaatggtattgtggtgttttctctggggtcgatgatcagtaacatgtcagaagaaagtgccaacatgattgcatcagcccttgcccagatcccacaaaaggttctatggagatttgatggcaagaagccaaatacattaggttccaatactcgactgtacaagtggttaccccagaatgaccttcttggtcatcccaaaaccaaagcttttataactcatggtggaaccaatggcatctatgaggcgatctaccatgggatccctatggtgggcattcccttgtttgcggatcaacatgataacattgctcacatgaaagccaagggagcagccctcagtgtggacatcaggaccatgtcaagtagagatttgctcaatgcattgaagtcagtcattaatgaccctgtctataaagagaatgtcatgaaattatcaagaattcatcatgaccaaccaatgaagcccctggatcgagcagtcttctggattgagtttgtcatgcgccacaaaggagccaagcaccttcgagtcgcagctcacaacctcacctggatccagtaccactctttggatgtgatagcattcctgctggcctgcgtggcaactgtgatatttatcatcacaaaattttgcctgttttgtttccgaaagcttgccaaaacaggaaagaagaagaaaagagattagttatatcaaaagcctgaagtggaatgactgaaagatgggactcctcctttatttcagcatggagggttttaaatggaggatttcctttttcctgtgacaaaacatcttttcacaacttaccttgttaagacaaaatttattttccagggatttaatacgtactttagttggaattattctatgtcaatgatttttaagctatgaaaaatacaatggggggaaggatagcatttggagatatacctaatgttaaatgacgagttactggatgcagcacgcaacatggcacatgtgtatacatatgtagctaacccttcgttgtgcacatgtaccctaaaacttaaagtataatttaaaaaaagcaaaaaaaaaaaataccaactcttttttttaaaccaggaaggaaaatgtgaacatggaaacaacttctagtattggatctgaaaataaagtgtcatccaagccataaaaaaaaa

SEQ ID NO: 13481 - DNA, 4399 bp, Homo sapiens
tttggagctgcgacgccaaacatggcgtgttcctagaagccgctttcggcatcagtaggcggcggcgtggggtctggcagcgtggggagagggaccaaccgacgccacttcgtgttgggaagtgggagcgggagggccgggcaattcccgaccgaaccaaacggtttccatggatctcaatagtgccagcactgttgttcttcaggtgttaacacaggccaccagtcaggatactgctgtgttaaaaccagctgaggagcagttgaagcagtgggagacacagccaggtttctattcagtgttgctgaatattttcaccaaccacactttggatataaatgtaaggtggcttgctgtactgtattttaaacatggaattgatcgctactggagacgtgtagcacctcatgctctctcagaggaggagaaaactactctgcgtgcagggctcatcaccaacttcaatgaaccaataaaccagattgcaactcagattgcagtgctcattgcaaaagttgctagattggattgtcccagacagtggcctgaactaattcccactcttatagagtctgttaaagtccaggatgatcttcgacagcacagagcattacttaccttctatcatgttaccaagacactggcatctaaacgacttgctgctgatagaaaactattttatgatttagcttctggaatttataattttgcctgctctctgtggaatcaccacacagacacattcctgcaagaagtttcttctggcaatgaagctgcaattttgagttcactagaacgaacactgctatcattgaaagtgctgcgtaagttaactgttaatggatttgtggaacctcataagaatatggaggtgatgggttttttacatggaatatttgaacgtctaaaacagtttctggaatgcagtagaagtataggtacagataatgtgtgtagagatagactggaaaagaccatcattctttttactaaagtgcttttggacttcttggatcagcatcctttttcatttactcctctaattcagagatcactggaattttctgtaagctatgtttttacagaagttggtgaaggcgttacatttgaacgattcattgtccaatgtatgaatcttattaagatgattgtcaaaaattatgcttataagccatccaaaaattttgaagatagcagccctgaaactcttgaagcccataagattaagatggcattcttcacatatcctactttgacagagatatgtagaagattagtctctcattatttcctattaactgaagaagaactgacaatgtgggaagaagacccagaaggctttacagtggaagaaacaggaggagattcttggaaatatagtttgaggccatgcactgaagtattatttatagatatattccatgaatataatcagactcttactcctgtacttctagaaatgatgcaaacacttcaaggacccacaaatgtggaagatatgaatgcactgttaatcaaagatgctgtgtataatgctgttggattagctgcttatgagctctttgacagtgttgattttgatcagtggtttaaaaaccagcttcttccagaattacaagtcattcacaataggtataagccattgcgacgcagggtgatttggctcatcggtcagtggatttctgtgaaattcaagtctgacttaagacccatgctttatgaagcaatctgtaacttgcttcaagatcaagatttagtggtccgtattgaaacagctacaactttgaagttaactgttgatgattttgaatttagaacagatcagtttctaccgtatttggaaaccatgttcacactactttttcagttactgcagcaagttacagaatgtgacacaaagatgcatgttttgcatgtcctttcttgtgtgatcgaaagagtcaacatgcagatacgaccatatgtgggatgtttggtacaatatttgcccctcctttggaagcagagtgaagaacacaatatgttgagatgtgctattttgacaacacttattcatcttgttcagggattaggagcagacagcaagaacctgtaccctttcctgctcccagttattcaactgagtacagatgtttcacagcctccacatgtttatcttctggaagatggtttagaattatggttagtaactttggaaaacagtccatgtattacaccagagttgcttcgtatatttcagaatatgtcaccacttcttgaactaagttcagaaaatcttagaacttgctttaagatcatcaatggttatatctttttatcatcaacagaatttttacagacatacgcagtaggtctatgccagtccttttgtgaacttttaaaggaaattactacagaaggtcaagttcaggtgctcaaggttgtggaaaatgcccttaaagtgaacccaatactaggtccacaaatgtttcaaccgattttaccctatgttttcaagggtattatagaaggggagaggtatcctgtagtgatgtccacgtatcttggagttatgggtcgagttctactacaaaacactagttttttttcttcactacttaatgagatggcccataaatttaatcaggagatggaccagcttttgggaaatatgattgaaatgtgggttgatcgaatggacaacattacccagcctgaaagaagaaaactttcagctttggctttgctctctcttctgccatctgataatagtgttatccaagataaattctgtgggattataaacatttcagtagaaggcctgcatgatgtcatgacggaagatcctgaaacaggaacttataaagactgtatgttgatgtctcatcttgaggaaccaaaagtaacagaagatgaagaaccacccacagaacaagataagaggaaaaagatgctggccctgaaggaccctgttcatacagtgtcactgcagcagttcatctacgagaagctcaaggcacagcaggagatgctaggagaacaaggtttccagtccctcatggaaacagtggatacggagattgtcacccagctacaggagtttttgcaaggattctaagagcacatgacatgtggctgcctcccctttcagaaacaagctgagtaacccagcctgccgtttgtatgtgagagcctgctgagatgaagaaatcacttcatgaaaataagcaaagaccacacattttttactacaaaatgtaaaggataaatgtaaatcctgcataactaaaatcacaaacctattcctcaaaagaatttaattttatatttatgagggggcccttcactaaaaagtacatgtaaaagtacatttgatgacaatagctgcttagtttcctgttaagagaagaaactttatcttttaattatgtgctcttaatatttgaagatgagagttaatacctgagatgtttttctgcaaccaaaattcattaaatttggctgccttatcctttttttaagctaatgaaactacaggtttgaaaaatgacaaagctgttcagatgatgctattaaagaaatgtgtgtactaagcaaaaatatataaatagtgacaaatacacattaccaagcttatcttgcaagggagttattttcatctaacatagaaagtgtgttttatcagacaaatgcttttattttcattctaataatttgatacagaaattagtaaaggcatttttttctttttttttccagtaaatacattgggtctataaatgtgcatttgtaagggccacaaaagtgaacgtgtggtactgtagtaccacgtgggagacctctggttatggtttagtcctagttcctttgttactcctgtgagcaccgagaagaactgggcgactcccagtcccacctgtgctgtgacagtcccacgtggctatgacagactgtttagtacttacccttctcaggttcctcagtgcaggggtgcatcagggcctcaataataggggtatacctgggaggatccagcagtaatccccagggtactaggattactagtactctgatggaactagtcttccttccttattcctcgaacatgcagtacataaaaaggggaaaaggagaaaaaaaaagccttactttgttttacttgccatttattgtaaggaaactttaaagcattttttaggaaatactcaaaagcaaggttggaaaatgttttatctttctatagaaagttgggtacagtatgtaactgcgggaaacccactgcccctttgtaagctgtggaacccaaactgtatggggatatttgatgttttcagaaagaggaagaaaatatggtccaaattaaattttccaaagatacctcaaaaaaaaaaaaaaaaaaaaaaaaaaaaaaaaaaaaaaa

SEQ ID NO: 13482 - DNA, 5511 bp, Homo sapiens
acacacacacacccctcccctgccatccctccccggactccggctccggctccgattgcaatttgcaacctccgctgccgtcgccgcagcagccaccaattcgccagcggttcaggtggctcttgcctcgatgtcctagcctaggggcccccgggccggacttggctgggctcccttcaccctctgcggagtcatgagggcgaacgacgctctgcaggtgctgggcttgcttttcagcctggcccggggctccgaggtgggcaactctcaggcagtgtgtcctgggactctgaatggcctgagtgtgaccggcgatgctgagaaccaataccagacactgtacaagctctacgagaggtgtgaggtggtgatggggaaccttgagattgtgctcacgggacacaatgccgacctctccttcctgcagtggattcgagaagtgacaggctatgtcctcgtggccatgaatgaattctctactctaccattgcccaacctccgcgtggtgcgagggacccaggtctacgatgggaagtttgccatcttcgtcatgttgaactataacaccaactccagccacgctctgcgccagctccgcttgactcagctcaccgagattctgtcagggggtgtttatattgagaagaacgataagctttgtcacatggacacaattgactggagggacatcgtgagggaccgagatgctgagatagtggtgaaggacaatggcagaagctgtcccccctgtcatgaggtttgcaaggggcgatgctggggtcctggatcagaagactgccagacattgaccaagaccatctgtgctcctcagtgtaatggtcactgctttgggcccaaccccaaccagtgctgccatgatgagtgtgccgggggctgctcaggccctcaggacacagactgctttgcctgccggcacttcaatgacagtggagcctgtgtacctcgctgtccacagcctcttgtctacaacaagctaactttccagctggaacccaatccccacaccaagtatcagtatggaggagtttgtgtagccagctgtccccataactttgtggtggatcaaacatcctgtgtcagggcctgtcctcctgacaagatggaagtagataaaaatgggctcaagatgtgtgagccttgtgggggactatgtcccaaagcctgtgagggaacaggctctgggagccgcttccagactgtggactcgagcaacattgatggatttgtgaactgcaccaagatcctgggcaacctggactttctgatcaccggcctcaatggagacccctggcacaagatccctgccctggacccagagaagctcaatgtcttccggacagtacgggagatcacaggttacctgaacatccagtcctggccgccccacatgcacaacttcagtgttttttccaatttgacaaccattggaggcagaagcctctacaaccggggcttctcattgttgatcatgaagaacttgaatgtcacatctctgggcttccgatccctgaaggaaattagtgctgggcgtatctatataagtgccaataggcagctctgctaccaccactctttgaactggaccaaggtgcttcgggggcctacggaagagcgactagacatcaagcataatcggccgcgcagagactgcgtggcagagggcaaagtgtgtgacccactgtgctcctctgggggatgctggggcccaggccctggtcagtgcttgtcctgtcgaaattatagccgaggaggtgtctgtgtgacccactgcaactttctgaatggggagcctcgagaatttgcccatgaggccgaatgcttctcctgccacccggaatgccaacccatggagggcactgccacatgcaatggctcgggctctgatacttgtgctcaatgtgcccattttcgagatgggccccactgtgtgagcagctgcccccatggagtcctaggtgccaagggcccaatctacaagtacccagatgttcagaatgaatgtcggccctgccatgagaactgcacccaggggtgtaaaggaccagagcttcaagactgtttaggacaaacactggtgctgatcggcaaaacccatctgacaatggctttgacagtgatagcaggattggtagtgattttcatgatgctgggcggcacttttctctactggcgtgggcgccggattcagaataaaagggctatgaggcgatacttggaacggggtgagagcatagagcctctggaccccagtgagaaggctaacaaagtcttggccagaatcttcaaagagacagagctaaggaagcttaaagtgcttggctcgggtgtctttggaactgtgcacaaaggagtgtggatccctgagggtgaatcaatcaagattccagtctgcattaaagtcattgaggacaagagtggacggcagagttttcaagctgtgacagatcatatgctggccattggcagcctggaccatgcccacattgtaaggctgctgggactatgcccagggtcatctctgcagcttgtcactcaatatttgcctctgggttctctgctggatcatgtgagacaacaccggggggcactggggccacagctgctgctcaactggggagtacaaattgccaagggaatgtactaccttgaggaacatggtatggtgcatagaaacctggctgcccgaaacgtgctactcaagtcacccagtcaggttcaggtggcagattttggtgtggctgacctgctgcctcctgatgataagcagctgctatacagtgaggccaagactccaattaagtggatggcccttgagagtatccactttgggaaatacacacaccagagtgatgtctggagctatggtgtgacagtttgggagttgatgaccttcggggcagagccctatgcagggctacgattggctgaagtaccagacctgctagagaagggggagcggttggcacagccccagatctgcacaattgatgtctacatggtgatggtcaagtgttggatgattgatgagaacattcgcccaacctttaaagaactagccaatgagttcaccaggatggcccgagacccaccacggtatctggtcataaagagagagagtgggcctggaatagcccctgggccagagccccatggtctgacaaacaagaagctagaggaagtagagctggagccagaactagacctagacctagacttggaagcagaggaggacaacctggcaaccaccacactgggctccgccctcagcctaccagttggaacacttaatcggccacgtgggagccagagccttttaagtccatcatctggatacatgcccatgaaccagggtaatcttggggagtcttgccaggagtctgcagtttctgggagcagtgaacggtgcccccgtccagtctctctacacccaatgccacggggatgcctggcatcagagtcatcagaggggcatgtaacaggctctgaggctgagctccaggagaaagtgtcaatgtgtaggagccggagcaggagccggagcccacggccacgcggagatagcgcctaccattcccagcgccacagtctgctgactcctgttaccccactctccccacccgggttagaggaagaggatgtcaacggttatgtcatgccagatacacacctcaaaggtactccctcctcccgggaaggcaccctttcttcagtgggtctcagttctgtcctgggtactgaagaagaagatgaagatgaggagtatgaatacatgaaccggaggagaaggcacagtccacctcatccccctaggccaagttcccttgaggagctgggttatgagtacatggatgtggggtcagacctcagtgcctctctgggcagcacacagagttgcccactccaccctgtacccatcatgcccactgcaggcacaactccagatgaagactatgaatatatgaatcggcaacgagatggaggtggtcctgggggtgattatgcagccatgggggcctgcccagcatctgagcaagggtatgaagagatgagagcttttcaggggcctggacatcaggccccccatgtccattatgcccgcctaaaaactctacgtagcttagaggctacagactctgcctttgataaccctgattactggcatagcaggcttttccccaaggctaatgcccagagaacgtaactcctgctccctgtggcactcagggagcatttaatggcagctagtgcctttagagggtaccgtcttctccctattccctctctctcccaggtcccagccccttttccccagtcccagacaattccattcaatctttggaggcttttaaacattttgacacaaaattcttatggtatgtagccagctgtgcactttcttctctttcccaaccccaggaaaggttttccttattttgtgtgctttcccagtcccattcctcagcttcttcacaggcactcctggagatatgaaggattactctccatatcccttcctctcaggctcttgactacttggaactaggctcttatgtgtgcctttgtttcccatcagactgtcaagaagaggaaagggaggaaacctagcagaggaaagtgtaattttggtttatgactcttaaccccctagaaagacagaagcttaaaatctgtgaagaaagaggttaggagtagatattgattactatcataattcagcacttaactatgagccaggcatcatactaaacttcacctacattatctcacttagtcctttatcatccttaaaacaattctgtgacatacatattatctcattttacacaaagggaagtcgggcatggtggctcatgcctgtaatctcagcactttgggaggctgaggcagaaggattacctgaggcaaggagtttgagaccagcttagccaacatagtaagacccccatctctttaaaaaaaaaaaaaaaaaaaaaaaaaaaactttagaactgggtgcagtggctcatgcctgtaatcccagccagcactttgggaggctgagatgggaagatcacttgagcccagaattagagataagcctatggaaacatagcaagacactgtctctacaggggaaaaaaaaaaaagaaactgagccttaaagagatgaaataaattaagcagtagatccaggatgcaaaatcctcccaattcctgtgcatgtgctcttattgtaaggtgccaagaaaaactgatttaagttacagcccttgtttaaggggcactgtttcttgtttttgcactgaatcaagtctaaccccaacagccacatcctcctatacctagacatctcatctcaggaagtggtggtgggggtagtcagaaggaaaaataactggacatctttgtgtaaaccataatccacatgtgccgtaaatgatcttcactccttatccgagggcaaattcacaaggatccccaagatccacttttagaagccattctcatcca

SEQ ID NO: 13483 - DNA, 4083 bp, Homo sapiens
tcttcccatccacccgccgcttctttcctccatctagcgatttttattttttaagtgtctcttcctttttctttcttttcttttttattttttatatatattttttggcattgctttgcagatgttgggatgagagtcggagccgaataccaagctcggatccctgaatttgatccaggtgctacaaagtacacagataaagacaatggagggatgcttgtatggtctccatatcacagtatcccagatgccaaattggatgaatacattgcaattgcaaaggaaaagcatggctacaatgtggaacaggcacttggcatgttgttctggcataaacataacattgagaagtcccttgctgatctccctaatttcactccctttccggatgagtggacagtggaagataaagtcctatttgaacaagcctttagttttcatggaaagagctttcacaggattcagcaaatgcttccagataagacaattgcaagccttgtaaaatattactattcttggaaaaaaactcgctctaggacaagtttgatggatcgccaggctcgtaaactagctaatagacataatcagggtgacagtgatgatgatgtagaagaaacacatccaatggatgggaatgatagtgattatgatcccaaaaaagaagccaaaaaagagggtaatactgaacaacctgtccaaactagcaagattggacttggaagaagagagtatcagagtttacaacatcgccatcattctcagcgttctaagtgccgtccacctaagggcatgtatttaacccaggaagatgtggtagcagtttcctgtagtcccaatgcagccaacaccatcctgaggcaactggacatggagttgatctctctaaaacgtcaggttcagaatgctaagcaagtaaacagtgcacttaaacagaaaatggaaggtggaattgaagaattcaaacctcctgagtcaaatcagaaaattaatgcccgttggaccacagaggagcagcttctagcagtgcaaggtgtccgcaaatatggtaaagattttcaagctattgcagatgtaattggcaacaagactgttggccaagtgaagaacttctttgtaaactacaggcgtcggtttaacttagaggaggtattgcaggagtgggaagcagaacaaggaacccaggcttctaatggtgatgcttctactttaggggaggagacaaaaagtgcttctaatgtgccatcagggaagagcactgatgaagaagaggaggcacagaccccacaggctcctcggacactgggtccatcacctcctgccccatcatccactccaacaccaacagcccctattgccactctgaaccagcctccaccacttcttcgtccaacactgcctgctgccccggctcttcaccggcagcctcctccactccagcagcaggctcggttcatccagccccggccaactttaaatcagcctccaccacctcttattcgccctgctaattccatgccaccccgtctaaacccaagaccggtgttgtccacggttggtggtcaacagccaccatcacttattggaattcagacagattcacagtcctcactgcactaaaaattaaattggacacagctgcagtaacttttcaccccatcattataccagtgctcatctgactgatgaaaaagaggaaagaataatcatttctagatactgaggctgcgaactagttctgtggcagtggactagcataagtggatgtctaagaaatttttcagttcactagactaaaatgttttacaacaaaaagcctccagttagcctcctttctagagtatatgttcagcaatgtgatctcataaaaggaaaaacaaaagatttaagtattctatataccaagtttttgttttgtttttactgtatttattttattgaggttctttatattcctgcctcttcatagtcaaggctcttagtacaggaatattgacttaggaattgtgaaaactccttaagtttcttaagttaaggatgtttggcttttttctttaattttttaaaaaccattttcctatgttaggagtgcaagaatagccagcatttccgattttgacatatgttcattttatgcatatttaagaaattatagctgcatatcccttctttcaaaaaatgttgcttttttttttaaaggaattttaatatattcctttaaaagaaagcaatttaatcaattgcaaagcaattatataaaaccacaaagaatgtactgaacctactaaccctttaacatacagtttagggtcctagcgcagagtccttgtttaaaggtcattgactcatcatctgtcagtaatgagaggattggaagaataattttgcatacaaatgaggacttaatttgttgaaatataatctctttaagttccttgaaaatggagttggttttttttgtttctaaatgctatctgcttttaactagtagttgcctacatctggggacttcagagaagaattatattttgttagttaagtagacacagtggttatggaagcatttctttacagtaccctttacgtgtttggtttctgaacttaaaattgccctcatacttaataatatggtctgcatttaatatgaaaggtgttttattgataaatctattgtactatttggatacatttgtgtattccttgcagccaacctgtattcgtgggattggtgtagggttaaatcatcaacattatttcataaaataagaatttgttctgtgttatctaaagatgtatcagtatattgtcacagttgtgctgttaactaaaaatgctgagacccctttttatagaaaaacaaaaagacatcaagtcttcttaattcaacccataatcattaagtacttaacaaagaatattttacaagtgatagtatttcaacaatgtgtaattaatatttttgatacagtgatttcatattggaatcattatttgtgcaaagggacagacagatcacttagattgctatactagtggacataggctaaatgtttgcacattcacattcttatcacgtgtagaatacttcacaaaatagtcaacatctaaggccctaatttatgttttgaaagatcatgtgttcccaaagtattccctattgttggctccacagccttaaagtgctatagatttaaattcattgattagttttaatttttaattttagactgtgtatttccataaataccctacgtactggcatatttgaaactctttttccaggttaggtccttttctttctcattgaatcatcttaaatagttcttggccctgaatttagctgatttaaaattcttaatattcaagaatttatacttattttttccttaaaagccacaggggacagttaaatatcttaaaatatctaaaacattttttaaagcacttagattgtcttacgtatgtgcatactatacctttacagcgtttattgtcttgtctcttgtcagtagaccttcagtacacagtatgtgggatatgtcagtcaagttggtcagcaccagcatctgtccagctgttcagtatattgtgattcattaaaaaatctcttctatcccagacatgggccaaggtgctgtatctgagggatgtgctgtaatttgatttacatgcattagagcacacagtagaaaaacgttagcttcattagtaatatgacacatgtatatagtgagatgtctttattgtgtgctttgcatattttgtaaatattttgcacgtcattatttttcttttttgtttaagcagtgtttggcctggaagagtgatatgcttgctgcttaatcaaaggattaaagatttaaagatgtctatgtcttctatttttatataatttcatgttctatgaggaatttagtacctcttcactgtgaaattcgaaataatgatttttataaaagcaaaactagaaatcttttaatgacaattttcattaatttcagggttatcatttttgagaaatctacaccaaagtggttttttaaaattacataactaaaaataaaccacactgtggatacatcttat

SEQ ID NO: 13484 - DNA, 4512 bp, Homo sapiens
cccagcccaagtttttagggtggggatccagactggttatacgtaccttcagtccttctcccagaggaaggcagaaacacctcaaagcctgcatgtaagaacatctactgagaaattattttaatcagacaccagctgagtgggagaaaggaaaagaacagagaagaacaaacaaaactcccttggtcttggatgtaagagaatccagcagagatggactggagtttcttcagagtagttgcagtgctgttcatttttctggtggtggtagaagttaacagtgaattccgaatccaggtaagagattataacactaaaaatggcaccatcaaatggcattcaatccgaaggcagaaacgtgaatggatcaagttcgcagcagcctgtcgtgaaggtgaagacaactcaaagaggaacccaatcgccaaaattcactcagattgtgctgcaaaccagcaagttacataccgcatctctggagtaggaattgatcagccaccatatgggatctttgtcattaatcagaaaactggtgaaattaatataacatccatagttgatcgagaggtcactcctttcttcattatctactgccgagctctgaactcaatgggccaagatttagagaggcctctagagctcagagtcagggttttggatataaatgacaaccctccagtgttttcaatggctacatttgcaggacaaatagaagaaaattctaatgcaaatacactggtgatgatactcaatgctactgacgcagatgaaccgaacaatttgaactcaaaaatagccttcaagattataagacaagaaccttcagattcaccaatgtttattatcaacagaaatactggagaaattcgaacgatgaataattttctagacagagagcaatacggccagtatgctcttgctgtaagaggctctgaccgagatggtggggcagatggcatgtcagcggaatgtgagtgcaacattaaaatcctcgatgtcaatgataatatcccttacatggaacagtcttcatataccatagaaattcaagaaaatactctaaattcaaatttgctcgagattagagtaattgatttggatgaagagttctcagctaactggatggcagtaattttctttatctctggaaatgaaggaaattggtttgagatagaaatgaatgaaagaacaaatgtgggaattttaaaggttgttaagcccttagattatgaagctatgcagagtctgcaactcagtattggtgtcagaaataaagctgaatttcatcattcaattatgtctcaatataaactgaaagcatctgcaatttctgtgactgtgttaaatgtaattgaaggcccagtgtttcgtccaggttcaaagacatatgttgtaactggtaatatgggatcaaatgataaagtgggagactttgtagctactgacctggacacaggtagaccttcaacgactgttaggtatgtaatgggaaataatccagctgacctgctagctgttgattcaagaacaggcaaactcactttgaaaaataaagttaccaaggaacagtacaatatgctcggaggaaaataccaaggaacgattctctctatagatgataatcttcaaagaacttgcactggtacaattaatattaacattcaaagttttggtaatgacgacaggactaatacagagccgaacactaaaattactaccaatactggcagacaagaaagtacttcttccactaactatgataccagcacaacttctactgactctagccaagtatattcttctgaacccggaaacggagccaaagatttgttatcagacaatgtacattttggtcctgctggcattggactcctcatcatgggattcttggtcttaggattggtcccatttttgatgatctgttgtgattgtggaggtgctcctcgtagtgcagctggctttgagcctgttcccgaatgttcagatggagcaattcattcatgggcagtagaaggaccacagcctgaacccagggatataaccactgtcataccacaaataccacctgataacgcaaatataattgaatgcattgacaactcaggagtttatacaaatgagtatggtggcagagaaatgcaagatctgggaggaggagagagaatgacaggatttgaactaacagagggagttaaaacttcaggaatgcctgagatatgtcaagaatactctggaacattaagaagaaattctatgagggaatgtagagaaggaggtctgaatatgaatttcatggaaagctacttctgtcagaaagcatatgcttacgcagatgaagatgaaggacgcccatctaatgactgtttgctcatatatgacatcgaaggtgtaggttcccctgctggctctgtgggttgttgtagcttcattggagaagacctggatgacagcttcttggataccctgggacctaaatttaagaagttggcagacatcagcctaggaaaagaatcatatccagaccttgatccttcttggccaccacaaagcactgaaccagtttgccttcctcaggaaacagagcccgttgttagtggacacccaccaatctccccacatttcggcactaccacagtaatttctgagagcacctatccctcgggacctggtgtactgcatcctaagcctattctcgatcctctgggctatggtaatgtcactgtgaccgagtcttacaccacctctgacactctgaagccctctgtgcacgttcacgataaccgaccagcatcaaacgtggtagtgacagagagagtggtcggcccaatctctggcgctgatttgcatggaatgttagagatgcctgacttgcgagatgggtcgaatgttatagtgacagaaagggtaatagcaccaagctctagtctacccacctctctgactatccatcatcctagagagtcttcaaatgtggtagtgacagaaagagtaatccaaccaacttccggcatgataggtagtctgagtatgcaccccgagttagccaatgcccacaatgtcattgtgacagagagggttgtttctggtgctggcgtaactggaattagtggcaccactgggatcagcggtggcataggcagcagtggcctggttggcaccagcatgggtgctgggagcggtgccctgagtggagctggcataagtggtggtggcattggcctgagcagcttgggagggacagccagcattggccacatgaggagttcctctgaccatcactttaaccaaaccattgggtccgcctcccctagcacagctcgaagtcgaatcacaaagtatagtaccgtgcaatatagcaagtagtcaggaccccagctcactttttcatagtcattgtggtttagatccaattcccaccactaaaaaactaacaatgtgatttataacgcacaacttcgtgctcaggtcatctaggagcaaggtgagaaatcacaatgagaaaaataaatggaaacaccactgctaggggagagctctccttagcattcataaacttttctcttatattaggactaaggaactaaaacttgaggcagagtcttctttgtgcctgagtggcctgtagtccatctccagcatgtaactggccttacgatggcaattggcatcattctccttgctctgttttgcttttccatatagctcgagcaaaattcaaaaagaactaaatatgcaatatatgttcatatctatgggaaaaatctaaaatgtgtgccagatgccctgttggtttcacagataacataaataaaaattcaaccacagatttatacaagggttaaccattttttttaagtttgactacatagtcaagtccacaagccatcaagcactcctaccttaattattgcactagagaaaataaattccaaattaggaagtgtttcctaggaggaaaattccattagagagtggcaataggatgaggtttcttcagggtaaactagcaatgcctgagcctgaaccttaatgtggggcctcagttaatatccctgtggagtcaaggattcttctgattctagtgtgtgtttagtgatagatgtagtcttgacgaatattgcttactggtgaggttgaggaatatcacactcgtctttccctttaccactgtggttttgacttaagaaagcaaaactcactaagtttacttctcgaattgaagcaagtgaggcctgacatggttgtcatcactagtggcaaatgaccttccaagtaagcagatgggaactgaattgtgttttcaggttttgtttttagtaggtgatattcattcgtatccagctctttattacatagctctgaagttaaaatgatttacataggccgagctgtggacaaaaaaaaagaagcagcagcttgtagtatgcttaagctttggggaatttttttttaaggggatctaaaaaaatgtttttagaacatgtaaaatgtttaatggtgaaagttggaaaa

SEQ ID NO: 13485 - DNA, 1723 bp, Homo sapiens
ttggctctcgcctaccgggggcttctctcaccgggactcgggactcccgggaagtggaccggcagaagagggggctagctagctgtctctgcggaccaaggagacccccgcgcccccccggtgtgaggcggcctcacagggccgggtgggctggcgagccgacgcggcggcggaggaggctgtgaggagtgtgtggaacaggacccgggacagaggaaccatggctccgcagaacctgagcaccttttgcctgttgctgctatacctcatcggggcggtgattgccggacgagatttctataagatcttgggggtgcctcgaagtgcctctataaaggatattaaaaaggcctataggaaactagccctgcagcttcatcccgaccggaaccctgatgatccacaagcccaggagaaattccaggatctgggtgctgcttatgaggttctgtcagatagtgagaaacggaaacagtacgatacttatggtgaagaaggattaaaagatggtcatcagagctcccatggagacattttttcacacttctttggggattttggtttcatgtttggaggaacccctcgtcagcaagacagaaatattccaagaggaagtgatattattgtagatctagaagtcactttggaagaagtatatgcaggaaattttgtggaagtagttagaaacaaacctgtggcaaggcaggctcctggcaaacggaagtgcaattgtcggcaagagatgcggaccacccagctgggccctgggcgcttccaaatgacccaggaggtggtctgcgacgaatgccctaatgtcaaactagtgaatgaagaacgaacgctggaagtagaaatagagcctggggtgagagacggcatggagtacccctttattggagaaggtgagcctcacgtggatggggagcctggagatttacggttccgaatcaaagttgtcaagcacccaatatttgaaaggagaggagatgatttgtacacaaatgtgacaatctcattagttgagtcactggttggctttgagatggatattactcacttggatggtcacaaggtacatatttcccgggataagatcaccaggccaggagcgaagctatggaagaaaggggaagggctccccaactttgacaacaacaatatcaagggctctttgataatcacttttgatgtggattttccaaaagaacagttaacagaggaagcgagagaaggtatcaaacagctactgaaacaagggtcagtgcagaaggtatacaatggactgcaaggatattgagagtgaataaaattggactttgtttaaaataagtgaataagcgatatttattatctgcaaggtttttttgtgtgtgtttttgtttttattttcaatatgcaagttaggcttaatttttttatctaatgatcatcatgaaatgaataagagggcttaagaatttgtccatttgcattcggaaaagaatgaccagcaaaaggtttactaatacctctccctttggggatttaatgtctggtgctgccgcctgagtttcaagaattaaagctgcaagaggactccaggagcaaaagaaacacaatatagagggttggagttgttagcaatttcattcaaaatgccaactggagaagtctgtttttaaatacattttgttgttatttttttcatgaaaaaaaaaaaaaaaaaaaaaaaaaaaaaaaaaaa

SEQ ID NO: 13486 - DNA, 3639 bp, Homo sapiens
taaagggtgttaacataatcccccaatcccatacaattcaatttcagaaaagtatttagggactgtgctaaaatagcatctccaagcttgctatggcaagatgatgctcaggttttccatgtgcaggggaaatgatgaaggttttgcaatggaacaaatatggttgctgctgcttctaacaattagagtgcttccggggtctgctcagttcaacggctacaactgtgatgccaacctccacagtagatttcctgctgaaagagacatcagtgtctattgtggagtgcaggctattacgatgaagattaatttttgcacggtacttttctcgggttattcggaaacagatctggcactgaatggaaggcatggggactcccactgcagagggttcatcaataacaacacctttccagcagtggtcatttttatcatcaatctcagcaccttggagggctgtggaaacaacctggtggtatccacaattcctggagtcagtgcttatggaaatgcaacttcagtgcaagtaggaaatatttcaggatatattgatactccagacccaccaacaatcatcagctatctacctgggcttctttacaaatttagttgtagttatccattggaatacctggttaataatacccagcttgcttcgtcctcagcggctatttctgtgagagagaacaatggcacatttgtcagcactttgaacctgctcctttataacgattcaacctacaaccagcagttaattatccccagtataggattacctttgaaaaccaaagtatttgcagctgtccaagccactaatttggatggcagatggaatgttttaatggattattgctatactaccccatcaggaaacccaaatgatgacattcgatatgatcttttccttagctgtgacaaggaccctcagaccaccgtcattgagaatggccgaagccagcggggccggttttcttttgaagtgttccgatttgtgaaacacaagaatcagaaaatgtccactgtcttcttgcactgcgttaccaagctctgcagagcagatgactgccccttccttatgccgatttgcagccacagagaaaggagagatgctgggaggaggacgacttggagcccccagagctcttctggcagcgcggtgctctctgctggtcccatcattactcggagtgatgagactccaaccaacaattcgcaacttggttctccaagtatgcctcccttccagctgaacgccatcaccagcgcactgatatcaggaatggtcattctgggagttacgagcttttctcttcttctgtgctcactggcccttctgcacaggaagggacccacaagtttagtgttgaatggcataagaaacccagtctttgactgactataacagattcctgctctctggagaaggcttcactgactaaactatgtgtgactgcagtcagtgttccgtctgaatttcatgtcagtccacattcaatatttgtaggtttgataaatttcacagtatagcttgtcagcataatgatagtgaaagaagtttattatattgctattgtcacttatgtacgtggcgagccgtatttttatgccaccagtgaatatattgacaataagtgaaaaatattcaggacttagggcttacaggatcagtaatatttcattttatttcagttttcttttgattgttggttaaaagataaaaggtgggagtagacaaaaaatgaaatgtgttgcatttcccccttaagcattaatggcatttagatttgcacacgtggtcctagaataaatgttgctttttgttttaatccggatattcccagcttcaggatgtgttttaataggactggccaatttggatacctgagatttaactactcattctatgacctcctgtgtttttggccgattttcatgtctgaccatattcattttaaaagaaactcttgggacatatctcttaacctggggcacccttttgtgtagaagatagtgaaaatagttgttagcttccaaggctactgctaagtggccctagatcattattcattagaataggaatggctgcgatcagttttcttcttctggttcaggtgagaacaccagcacatgttaactctcctcccaggtaaacagttcagctgctgttgcagctgtgcttccagcagtgaggtaactatgcaaagattatttttaattcaagaatcatcacatgtgaaaacaagctgtagttgtgaaaagagttcctagaagggtttttaacaatttagattccctttttcctaaaacaaaaaggaaacttaggttaagtgtagtttgcagaacattgttggaatctacataaaaagatattccttcccccatattttcgatgccaggcaataatcaggagagggtttctttttaaggtatcttcttgtaggtgtcataattgccatgaataaacaatattttcctctaacagtaaactgcaagaagcttctgatcctttatcagttttgcaaaaaagcaagctttaagcagcccatgttcttacaaaaaaaatcaacattctctttgtttaagctacctatgcactgaacaaacaaaacaatttaatagccaacaccaaaacccagcatgtgaagttactagaattgccatgttaactataagcaattgctgtaatcactaatttctattcaacatttgtgacccattagtccggacttaatttactatactgcatgcaaatcatcaagcaattgcttcaaaggaaatgtctacaatgtgagttaataattaaatcaatcctcaagttgaaaaacactttttctccaatttgcctgaatatttcaggaggaagtgtttatattataataattagctatataattgcatcaactttttatttcaaggtatagttgccaagtaaagtgggatctggaaagtctctggataatttctttacaaaaaaagtttaaatcacataaaaagccaatctactcttccctgtgttactttaaaataactttgaagtgactattctgagctttatctgtgttaacatgattaactgaccatactactaatgtgaccctgtatatacatggatagtattgaaatatgctggtaaatctatttcagatactttaagtgaattgccattgattctacgattaagttctgtgaataggacattatatcatttaagctgttttgtcaatttgatttttatgcttttggaacggctgctgtttcagctgttggccttttcaattctatactccattttatagaattgaataatggacacatgtcacttgggaagcaacgtaagtatcacattattttttgccaccctttcatcataaatggaagaatcagagttataatgagataaaccaggtctgttttttacaactttgttcttataaatctgcagttatatggagtatttagttatactgaattttacagttattatagtgtgaaaaaccttacaaaatatgtgcaaatgtttcttcagttttaatacctcaaactgttttttgcacttcaggggtaaggtctgatgacatgtaaaagatgatcgtttaataaaataattgtttaaaatgttaaaaaaaaaaaaaaaaaaaa

SEQ ID NO: 13487 - DNA, 5727 bp, Homo sapiens
atgtgggtggccaagtggctgactgggctgctctaccatctctcgctcttcatcaccaggtcttgggaagttgacttccaccccaggcaagaagccctggtgaggacactgacctcctacgaagtagtgatccccgagcgggtcaatgagtttggagaagtgttccctcagagccaccacttcagccggcagaaacgcagctccgaggcgctggaacccatgccgttccgaacccactatcgcttcactgcctacgggcagctcttccagctgaacctgaccgccgatgcatcctttctggccgccggctacaccgaggtgcacttgggaaccccggagcgcggggcctgggagagcgacgcagggccctcggacctgcgccactgcttctaccgcggccaggtcaactcacaggaggattacaaggccgtcgtcagcttatgcggaggcctggtgggaacatttaaaggacagaacggtgaatatttcttagaacctataatgaaggcagatgggaatgaatatgaagatggtcacaacaagccacatcttatatacagacaagacttaaataactcttttctgcagactctgaagtattgcagtgtgtcagaaagtcaaataaaggaaaccagtttaccctttcatacctacagcaacatgaatgaagatcttaatgtaatgaaagaaagagttttaggacacacatcaaaaaatgtaccattgaaagatgaaagaagacattccaggaaaaaacgtcttatatcatatccaagatacattgaaattatggttacagctgatgctaaagtggtttctgctcatggatcgaatttgcaaaactatatactgactctaatgtcaattgttgcaacaatctacaaagatccaagtattggaaatttgatacacatagtagtggtaaaattagttatgattcaccgtgaggaggaaggaccagtcattaattttgatggtgctaccacattaaagaacttttgttcatggcaacaaactcagaatgaccttgatgatgttcacccttcccaccatgacactgctgttcttatcactaggtatgatatttgttcatctaaagagaaatgtaacatgttaggtttatcatatttaggtaccatatgtgatcctttacaaagctgctttattaatgaagaaaaaggactcatttctgcttttactatagcccatgagcttgggcacacacttggtgttcaacatgatgataatcctagatgtaaagaaatgaaagttacaaagtatcatgtaatggcccccgctttaagttttcacatgagtccttggagctggtcaaactgtagtcggaaatatgttactgaattcctagagactggttacggggaatgtcttcttgacaaaccagatgaagaaatatataatctgccttcagaacttcctggatcacgatatgatggaaacaagcagtgtgagcttgcgtttggtcctgggtcacaaatgtgtccccatataaatatatgcatgcatctgtggtgcacaagcacagaaaagcttcacaaaggctgtttcactcaacacgtgccaccagcagatggaacagactgcggtcctggaatgcattgccgtcatgggctatgtgtaaacaaagaaacggaaacacgtcctgtaaatggtgaatggggaccatgggaaccttacagttcttgttcaagaacatgtggaggcggaatcgaaagtgcaaccaggcgctgtaatcgtcctgagccaagaaacggaggaaattactgtgtgggccgcaggatgaaatttcgatcatgtaatactgattcatgtccaaaaggcacacaagactttcgagagaagcagtgctctgattttaatggtaaacatttggacatcagtggcattccctctaatgtgaggtggcttccaagatacagtggcgttggcacaaaggatcgttgtaaactctattgtcaggttgctggaaccaattatttctacctattgaaggatatggttgaagatggtactccttgtggaactgaaactcatgacatctgtgttcaaggccagtgtatggcagctggttgtgatcacgtgttaaactccagtgccaagatagacaaatgtggagtgtgtggtggggacaactcttcatgcaagacaataacaggtgtcttcaacagttctcattatggttataatgttgttgtaaagattcccgcaggagcaacaaacgttgacattcgtcagtacagctattctggacaaccagatgacagttaccttgcattatctgacgctgaagggaattttcttttcaatggaaattttcttctaagtacgtcaaaaaaagaaatcaatgtgcaaggaactgttattgaatacagtggatcaaataacgcagttgaaagaattaatagtactaatcgacaagagaaagaaattcttattgaggtgttgtgtgtgggtaatttatacaaccctgatgtacattattccttcaatatccctttggaagagaggagtgacatgttcacatgggacccctatggaccatgggaaggctgtaccaaaatgtgtcaaggtcttcagcgaagaaacataacttgcatacataagagtgatcatagtgttgtgtctgataaagaatgtgaccacttgccacttccatcatttgttactcaaagttgcaatacagactgtgaactaaggtggcatgttattggcaaaagtgaatgttcatcccaatgtggtcaaggatatagaaccttggacatccattgcatgaagtattccattcatgaaggacagactgttcaagttgatgaccactactgtggtgaccagcttaaacctcctacccaagaactatgccatggtaactgtgtcttcacaagatggcattattcagaatggtctcagtgttccaggagttgtggaggaggggaaaggtctcgagaatcttattgtatgaataactttggccatcgtcttgctgacaatgaatgccaagaactgtcccgagtgacgagagagaattgcaatgaattttcctgtcccagttgggctgctagtgaatggagcgagtgccttgttacatgtggtaaaggaacaaagcagcggcaggtatggtgtcagctgaatgtagatcacttgagtgatggcttctgtaattcaagtaccaaacctgaatctctgagtccatgtgaacttcatacatgtgcttcctggcaagtaggaccatggggtccttgcacaaccacatgtggacatgggtatcagatgcgagatgttaaatgtgtcaatgagctagctagtgcagtgttagaggacacagaatgccatgaagctagtcgccccagtgacagacagagctgtgtacttacaccttgctcatttatttctaaacttgagaccgctttattaccaactgttctcataaaaaagatggcacaatggcgacatggttcttggaccccatgctccgtatcttgtggaagaggtactcaagcccgctatgtaagctgtcgtgatgctcttgatagaatagcagatgaatcatattgtgcccacttaccccgacctgctgaaatatgggactgttttaccccttgtggagagtggcaagcaggggattggtcaccctgttcagcttcctgtggccatggaaaaacaactcgacaagttttatgcatgaactaccatcagccaattgatgagaattactgtgatcctgaagttcgccctttgatggaacaggaatgtagcctggcagcctgccctcctgcacacagccactttcctagttcccctgtgcagccaagctattatctaagcacgaatttgccattaactcaaaaacttgaagataatgaaaatcaggtggtccatccatcagtcagaggaaaccagtggagaaccggaccatggggacagtgctccagcagttgttctggaggtcttcagcatagggctgtggtctgccaggatgaaaatggacaaagtgctagttactgcgatgcagcctccaagcctccagagttacagcaatgtggtccagggccttgtccacagtggaactacggaaattggggagaatgttcacaaacatgtggaggaggaataaaatcaagacttgtaatatgtcaatttcccaatggccaaatattagaagatcacaactgtgaaattgtaaacaagccacctagcgtaatacagtgtcatatgcatgcttgccctgctgatgtgtcatggcatcaggaaccatggacatcgtgctcagcttcttgtggtaaaggtagaaagtaccgtgaagtgttttgcattgaccaattccaaaggaaattagaagacacaaattgcagtcaagtacagaaacctccaactcacaaagcctgtagatctgtcagatgcccttcatggaaagccaatagctggaatgagtgctctgtgacctgtggctctggagttcagcagagggatgtatactgcagactgaaaggtgttggtcaggtggttgaagaaatgtgtgatcagtccacccgaccttgttctcagaggcgatgttggagtcaggactgtgtgcagcacaaggggatggaaagagggaggctgaattgttcaacatcatgtgagagaaaagattcacatcaacgaatggagtgcacagataaccaaatcagacaagtgaatgaaatagtctataattcttcaaccatatctcttacatccaagaattgcaggaaccctccttgcaattacattgtggtaacagcagactcatcacagtgtgcaaacaactgtggatttagttacagacaaaggattacatattgcaccgagatcccatctactaagaaacataagctccatcgacttcggcctatagtttatcaagaatgccctgtggtgccttcctctcaggtttaccaatgcattaacagctgtttgcatttggccacttggaaagttggaaaatggagcaagtgctcagtgacttgtggaattgggataatgaagagacaagtgaaatgcattaccaaacatggtttgtccagtgacttatgtttaaaccatttaaaaccaggtgctcaaaagaaatgttatgccaatgactgtaaatcatttaccacctgcaaagaaattcaagtgaaaaaccacattagaaaggatggtgactattaccttaacattaagggaagaataataaagatttattgtgcagacatgtacttggagaaccctaaggaatatttaacactggtccaaggtgaagaaaacttttctgaagtgtatggctttaggctaaaaaatccatatcaatgtccttttaatgggagtagaagggaagactgtgaatgtgacaatggacacttagctgctggatacactgttttcagcaaaataagaattgatctcacttccatgcaaattaaagctacggaccttcttttttccaaaacaatatttggaaatgcagttccatttgccacagctggagattgctacagtgctttcagatgcccacagggacagtttagcattaatttgtcaggaactgggatgaagatatccagcacagcaaagtggctcactcaggggagttatacctctgtcagcatacgaagatcacaggatggaactagatttttcggcaaatgtggagggtactgtggaaagtgtcttcctcacatgactactggtctcccaattcaagtcatatga

SEQ ID NO: 13488 - DNA, 1362 bp, Homo sapiens
atgctgcggatcctgtgcctggcactctgcagcctgctgactggcacgcgagctgaccctggggcactgctgcggttgggcatggacatcatgaaccaggtccagagcgccatggatgagagtcatatcctggagaagatggcagccgaggcaggcaagaaacagccagggatgaaacctatcaagggcatcaccaatttgaaggtgaaggatgtccagctgcccgtcatcacactgaactttgtacctggagtgggcatcttccaatgtgtgtccacaggcatgaccgtcactggcaagagcttcatgggagggaacatggagatcatcgtggccctgaacatcacagccaccaaccggcttctgcgggatgaggagacaggcctccccgtgttcaagagtgagggctgtgaggtcatcctggtcaatgtgaagactaacctgcctagcaacatgctccccaagatggtcaacaagttcctggacagcaccctgcacaaagtcctccctgggctgatgtgtcccgccatcgatgcagtcctggtgtatgtgaacaggaagtggaccaacctcagtgaccccatgcctgtgggccagatgggcaccgtcaaatatgttctgatgtccgcaccagccaccacagccagctacatccaactggacttcagtcctgtggtgcagcagcaaaagggcaaaaccatcaagcttgctgatgccggggaggccctcacgttccctgagggttatgccaaaggctcgtcgcagctgctgctcccagccaccttcctctctgcagagcttgcccttctgcagaagtcctttcatgtgaatatccaggatacaatgattggtgagctgcccccacaaaccaccaagaccctggctcgcttcattcctgaagtggctgtagcttatcccaagtcaaagcccttgacgacccagatcaagataaagaagcctcccaaggtcactatgaagacaggcaagagcctgctgcacctccacagcaccctggagatgttcgcagctcggtggcggagcaaggctccaatgtccctctttctcctagaagtgcacttcaatctgaaggtccagtactcagtgcacgagaaccagctgcagatggccacttctttggacagattactgagcttgtcccggaagtcctcatcgattggcaacttcaatgagagggaattaactggcttcatcaccagctatctcgaagaagcctacatcccagttgtcaatgatgtgcttcaagtggggctcccactcccggactttctggccatgaattacaatctggctgagctggacatagtagagaatgccctgatgctggacttgaagctgggctga

SEQ ID NO: 13489 - DNA, 1734 bp, Homo sapiens
ggtctgaggcctctgcctaaagacaaagcctgtgctggggtgtgcaggatataaggttggacttccagacccactgcccgggagaggagaggagcgggccgaggactccagcgtgcccaggtctggcatcctgcacttgctgccctctgacacctgggaagatggccggcccgtggaccttcacccttctctgtggtttgctggcagccaccttgatccaagccaccctcagtcccactgcagttctcatcctcggcccaaaagtcatcaaagaaaagctgacacaggagctgaaggaccacaacgccaccagcatcctgcagcagctgccgctgctcagtgccatgcgggaaaagccagccggaggcatccctgtgctgggcagcctggtgaacaccgtcctgaagcacatcatctggctgaaggtcatcacagctaacatcctccagctgcaggtgaagccctcggccaatgaccaggagctgctagtcaagatccccctggacatggtggctggattcaacacgcccctggtcaagaccatcgtggagttccacatgacgactgaggcccaagccaccatccgcatggacaccagtgcaagtggccccacccgcctggtcctcagtgactgtgccaccagccatgggagcctgcgcatccaactgctgcataagctctccttcctggtgaacgccttagctaagcaggtcatgaacctcctagtgccatccctgcccaatctagtgaaaaaccagctgtgtcccgtgatcgaggcttccttcaatggcatgtatgcagacctcctgcagctggtgaaggtgcccatttccctcagcattgaccgtctggagtttgaccttctgtatcctgccatcaagggtgacaccattcagctctacctgggggccaagttgttggactcacagggaaaggtgaccaagtggttcaataactctgcagcttccctgacaatgcccaccctggacaacatcccgttcagcctcatcgtgagtcaggacgtggtgaaagctgcagtggctgctgtgctctctccagaagaattcatggtcctgttggactctgtgcttcctgagagtgcccatcggctgaagtcaagcatcgggctgatcaatgaaaaggctgcagataagctgggatctacccagatcgtgaagatcctaactcaggacactcccgagttttttatagaccaaggccatgccaaggtggcccaactgatcgtgctggaagtgtttccctccagtgaagccctccgccctttgttcaccctgggcatcgaagccagctcggaagctcagttttacaccaaaggtgaccaacttatactcaacttgaataacatcagctctgatcggatccagctgatgaactctgggattggctggttccaacctgatgttctgaaaaacatcatcactgagatcatccactccatcctgctgccgaaccagaatggcaaattaagatctggggtcccagtgtcattggtgaaggccttgggattcgaggcagctgagtcctcactgaccaaggatgcccttgtgcttactccagcctccttgtggaaacccagctctcctgtctcccagtgaagacttggatggcagccatcagggaaggctgggtcccagctgggagtatgggtgtgagctctatagaccatccctctctgcaatcaataaacacttgcctgtgatgcctgcaaaaaaa

SEQ ID NO: 13490 - DNA, 2543 bp, Homo sapiens
caatttttaagaaatgatcatctagggaaaatgttttaaaatcttttaaaatatctttttgttatactttaaaactgccttcagctgcctattggtaaataaggtctggatatcagtacatgacaacatatactaatgaattgaactgtgaattaggaatgaaaattgcctagaaatttttttatgagttattaggattaaagtaagaatttcctttgctgggctgtgtaggcactaagattccgtggttgttggaggggttaaatttggatctactagtgcatatattttaccgaggattcataaaaacacgacagtggagcctgggtcaatccattaccatgtacaagcagtgaccaatagaaaaggaagaagaagatccaagaaggctgaggtaagcagtcttctgaagccctgtcaaagtggaaacaatagatcaaaggtgttcatggtgactgggacgagtaggtttcactgtttctcataggagacttgacagcttaaagtaaaaacaaattattttcgtcaaagtttttttttttctcttaactgatttttagcaaacctcagactgagacacaggactcaacggtgtattcctggaaggcaaggtgctataatggcaggcacaatctgtttcatcatgtgggtgttattcataacagacactgtgtggtctagaagtgtgaggcaggtctatgaagtacatgattcagatgattggactattcatgacttcgagtgtcccatggaatgtttctgcccacccagttttcctactgctttatattgtgaaaatagaggtctcaaagaaattcctgctattccttcaagaatttggtatctttatcttcaaaacaacctgatagaaaccattcctgaaaagccatttgagaatgccacccagctaagatggataaatctaaacaagaacaaaataaccaactacggaattgaaaaaggagccctaagccagctgaagaagttgctcttcttatttctggaagataatgagctagaggaggtaccttctccattgccaagaagtttagaacaattacaattagctagaaataaggtgtccagaattcctcaagggacctttagcaatctggagaacctgacccttcttgacctacagaacaacaaattagtggacaatgcctttcaaagagacacttttaaaggactcaagaatctcatgcagctaaacatggccaagaatgccctgaggaatatgcctccaagattaccagccaatacaatgcagttgtttttagacaacaattccattgaaggaataccagaaaattattttaatgtgattcctaaagtggcctttttgagactaaatcacaacaaactgtcagatgagggtctcccatcaagaggatttgatgtatcatcaattctagatcttcaactgtcgcacaatcaactcacaaaggttccccgaatcagtgctcatctgcagcaccttcaccttgatcataacaaaattaaaagtgtgaatgtctctgtaatatgtcccagcccatccatgctgcctgcagaacgagattccttcagttatggacctcatcttcgctacctccgtctggatggaaatgaaatcaaaccaccaattccaatggctttaatgacctgcttcagacttctgcaggctgtcattatttaaacacattctcaccaaatctaaaattagtttaatgagctgtttctgacatgaaatgtggttaccattaataggtttaggacacaagtcatattccccattgctctcggccaccattttcatttgtgcagtgtattttttctattcaaagatgcttttgccagttacatgcatcacagcctgcattaatttgcttttcttttaattaataaaacagacacagagttaagatagtttatcaactcaaagatagttttattttggtctcttccatagcttattaacactaaagaaaacaattacattcttatacaataaaaaggacacatttgtgtatgtttaaaattacttatgcagataccgtaatttacagtataaatgtaataatcaaacaggaggataacgacctgaagaaaatgagaaaataaaatatttcttaattgtaatcataataaaacaattgcagattgctaagtagctgttggtggtacaagtttgatatttagcttgagaatgggtatggaatgaatcaaatacttcatcactaaagaattcttgttatttaatatcaaataatgaaacagcagtcacttctagttcattaccatttcttgtagctgttgtttttagatatagtccactgcattcttataagttctaaattttatgtttattataatgcatttcttgtggaatcttagtgttttaacatttgaaatccacttaaactgcaaattgttctttatatttgattgtgttttttggattttctaaataaaaatattgaatgctttctaacaaaacagaatatttcaaagaaattagcaagcttcattaaagaacatgttttaataaaaaaaaaaaaaaa

SEQ ID NO: 13491 - DNA, 1413 bp, Homo sapiens
agggaataaaggctcagggaccggcagttctactctagagcccaccagcctctcagagcctccggtgactggcctgtgtctccccctggatggacatgtggacggcgctgctcatcctgcaagccttgttgctaccctccctggctgatggtgccacccctgccctgcgctttgtagccgtgggtgactggggaggggtccccaatgccccattccacacggcccgggaaatggccaatgccaaggagatcgctcggactgtgcagatcctgggtgcagacttcatcctgtctctaggggacaatttttacttcactggtgtgcaagacatcaatgacaagaggttccaggagacctttgaggacgtattctctgaccgctcccttcgcaaagtgccctggtacgtgctagccggaaaccatgaccaccttggcaatgtctctgcccagattgcatactctaagatctccaagcgctggaacttccccagccctttctaccgcctgcacttcaagatcccacagaccaatgtgtctgtggccatttttatgctggacacagtgacactatgtggcaactcagatgacttcctcagccagcagcctgagaggccccgagacgtgaagctggcccgcacacagctgtcctggctcaagaaacagctggcggcggccagggaggactacgtgctggtggctggccactaccccgtgtggtccatagccgagcacgggcctacccactgcctggtcaagcagctacggccactgctggccacatacggggtcactgcctacctgtgcggccacgatcacaatctgcagtacctgcaagatgagaatggcgtgggctacgtgctgagtggggctgggaatttcatggacccctcaaagcggcaccagcgcaaggtccccaacggctatctgcgcttccactatgggactgaagactcactgggtggctttgcctatgtggagatcagctccaaagagatgactgtcacttacatcgaggcctcgggcaagtccctctttaagaccaggctgccgaggcgagccaggccctgaactcccatgactgcccagctctgaggcccgatctccactgttgggtgggtggcctgccgggaccctgctcacaggcaggcttttcctccaacctgtggcgctgcagcagggcaggaaggggaaacacagctgatgaactgtggtgccacatgacccttgtggcacagatgcccacgtatgtgaaacacacatggacatgtgtcccagccacagtgttatgctctgtggctggctcacctttgctgagttccggggtgcaatgggggagggagggagggaaagcttcctcctaaatcaagcatctttctgttactgatgttcaataaaagaatagttgccaaggctg

SEQ ID NO: 13492 - DNA, 5295 bp, Homo sapiens
ggggaagcttcgcaggcgtgcacggagcagtgagatcactggcgttataaatatcccggtgccagcgcggagatccgctcgggtggcctctctcttcccctctccccttctcttccccgaggctatgtccacccggtgcggcgaggcgggcagagccagaggcacgcagccgcacaggggctacagagcccagaatcagccctacaagatgcacttaggacccccgcggctggaagaatgagcttgtccttcctcctcctcctcttcttcagccacctgatcctcagcgcctgggctcacggggagaagcgtctcgcccccaaagggcaacccggacccgctgccactgataggaaccctagaggctccagcagcagacagagcagcagtagcgctatgtcttcctcttctgcctcctcctcccccgcagcttctctgggcagccaaggaagtggcttggagcagagcagtttccagtggagcccctcggggcgccggaccggcagcctctactgcagagtgggcatcggtttccatctgcagatctacccggatggcaaagtcaatggatcccacgaagccaatatgttaagccaagttcacagatgactgcaagttcagggagcgttttcaagaaaatagctataatacctatgcctcagcaatacatagaactgaaaaaacagggcgggagtggtatgtggccctgaataaaagaggaaaagccaaacgagggtgcagcccccgggttaaaccccagcatatctctacccattttctgccaagattcaagcagtcggagcagccagaactttctttcacggttactgttcctgaaaagaaaaagccacctagccctatcaagccaaagattcccctttctgcacctcggaaaaataccaactcagtgaaatacagactcaagtttcgctttggataatattcctcttggccttgtgagaaaccattctttcccctcaggagtttctataggtgtcttcagagttctgaagaaaaattactggacacagcttcagctatacttacactgtattgaagtcacgtcatttgtttcaatgtgactgaaacaaaatgttttttgataggaaggaaactggaattctttgtactaatacagggagcacactccttcagttcagcaagacataaagccttttgctttatgcttgagggatatttagaactttgtattttcggaaagttaaataacagggactacgtatttttctgacttttacagattaacctgaaagaacatacatgatacatttttatttttggtttccaaagaatattttgatgcagataaaatattttgttaacttttgtttttttttgtttgttttcttaaaagtacctctgcattgagcatattttcttacttttattattttaattaatatgacataagcaatcattttatgctgtttatgaattataaatgtgtttatagctcatttgtaatatggaaatcttttacatttttcctattcactgcacttttttattgtttttatttctagccatacctcagataatatgtttagttttacattttaaaatgtttaaattctctttcacagcaccaaaggctcagcttggatttgtgtgtatgtgtatgtcaattcatgacattatgtggaatcctaaacctttggtggctgggatatgatgggttagaagcaaggagaaaatataaggactttttgatggaattaaatgtgggaggtaaggaaaaggatttagaggtaaaagtacactaagtttgcaacatttattgagatctaagtctgtcttgccttcatttctctttttatctcccccttgccctcattcttgaacagctggaggaatacattttattctgtccatgaagcatacactatgaaattcaagtgcttaaaaatacttctatgactctctgctatcccactgtatagatccacagggagcaaacacttagaaatgatagagaactgaaggagatcaatggtttaacagttatccatgccaagtcccattgtcagaaatattcttattactcagtcaaacactctttgagcttcccttcctaaaggtaaccaatccagtgaatagatgtgcccttttataaggaaacttctgatgtttattaaaaaaactggccttttgatagaggtaacttaatttgggaatttgttgtgttgaaatggcatttaatttcaacctaaatactgactgctggacataaatcacagaaaatttaacttaagaaaatttacaaaatttattctcaggtaatcattttaataaagttctgcaaaatacacgtttatcttacattcagaaatgtggcaaaaaaggcatagctaaaggctaaacatatggctttagtagtaacaaaagggttcatagaaacttcatggtttgcatttaaacatgtttaaagtgtacttataaactatttttttcttaaagcaaactatgatttattttggtgcacaaatacaaagtggaaacttaccaaaattgaactagctaccatataagcagattgctttaatttgatgggaaaatagtacacacatatatataacaaataatatattaaaaaacccatccatcaactaaaacattatatgtatacatcagtatagtgttttattataaagccaattatctgattaagcattctttccactgaatgcataatgtttaaatagcataaaatgaaatgctacaaaaattgaactaatttatactttaaagtatttctgggttaaatgaaacaatgaaattttttagtatgttcaactctcatccaaatggcatatgaccctgtttacacagcctaaagctaaaaatattactctagtttattctaatctattgttaagtattgtgcactgtataccaagttcttagggcacatgaaaaattttagctgccaaacaggaactagtaaacatatgttcctaataagtgaagggaaagataataatgatggtcaacaataagccacgtcaatgcataagttgtataggctaaatgttgcttgtaggctacattaaactcaaatgtaatagtttatcttatactcctggtttgatttgattagcatattaacgtgaaagtaggatagctactaaatatatattatgcaagtcaggaatcattaatttcaaaatttaaagccatgctaaaattaaaaagaaaatattaaattacacaattacacttgtctttactggccatacaaaatgattttttttttttttttgagacagagtcttgctctgtcaccaggctggagtgcagtggcatgatctcggctcactgcaacctccaactccctggtttaagggattctcctgcctcagcctcccaagtagctgggattacagactcatgccaccacgccagctaatttttgtatttttagtagagacggggtttcaccatgttggtcaggatggtctcaatcctggcctcttgatagtcctgacctcatgatctgcccacctcggcctccccaaagtgctgggattacaggtacaatgatgtataattaatgcttagtgaagcataaagttacctacatcaattaattaaatgaacttatgtacagaaaacatgtataaatataagtctatactaatgcttacaactttctaagagggttcttgcttatgtagctttttattattttaagtaactagaaccaccaaatatcaaataaaattatttggttatggttatgttcatctaaacacaacaataacttttatattaatatttaggagtctattttgtctataggtgacaaacatctccagactaacatgtcagttttatcaattatattatgtttaattatttaagatttctttatgtggaacatctatagagataaatagaaattttcaataagatgtagtaacactgtgatttatctttcaagagtctctcttcacttccttctaaagagactaatttgagagtacaggtgcatattaattttcttggttctttcagctgaattatattggtccagaagttcaaaatcatgtgacaataataagggatactgacagaagttatttccaagtttgtgtatatattataaaaattacatatataaaactaaggcttttatttctgttatttttaagcttttatttcttgtagctaaaaataaaacatcataaatctggtaggtaaatttcttattaaatcaatcttgaaatagaaaatgtaataactttcttaccattaacattttttacccttccatagaagggagggaataaatcatgacttatcccattttcaataacaaaacgaaactatggcactaaccaaaaacttgcattctggcataatttttacagttgcagagaattgtttctgggctcattaaaaaaagtagtattgcagacattgctgcaatgggaagcagacaataacttcttaaaggaattctacacctcctttaagatttacttaattgctacatctaaattctgataatttaaaatccattttaggtgataaaattttttaaaagttttgaaggaaacctctggataaatggacaaggcctaatttttttttgtagtcaatccaactgtactggccaatttttgaaataagattatatgattaggtattagcagagacaaagagttacctcctccatcttactctgccctatttgaaagtctcaggggagaaaagggaacaagatgctgatccaacctgagtggagtcaggtgaggcatctttacatctaagaatttttttttaaattttattattattatacttcaagttctagggtacatgtccacaatgcacatgtctgtcacacatgcacacatgtgccatgctggtgtgctgcacccaccaacctgtcatccagcattaggtatatctcctaatgctatccctcccctctccacccaccccacagcaggccccggtatgtgatgttccccttcgtgtgtccatgtgttcttattgttcaattcccacctatgagtgagaatatgtggtgtttggtttttggtccttgcaatagtttgctgagaatgatggtttccagcttcatccatgtccctacaaagaacatgaactcatcattttttatggctgcatagtattccatggtgtatatgtgccacattttcttaatccagtctatcattgttggacatttgggttggttccaagtctttgctattgtgaatagtgctgcaataaacatatgtgtgcatgtgtctttaaaaaaaaaaa

SEQ ID NO: 13493 - DNA, 2703 bp, Homo sapiens
ccccattccttggtctcgtctgagcagttaggttccgcctgtggttgcacatttggttcatctgaggatgttcaggctggggctgctggtttgtttctacaatgacctggaattgctggatgccactgtggctcaagtcctgctttaccagatgatcaagtgcagccacctgaggggcttccaggctggcgtccagaagctcaaagcagaactcctggacattgccatggagaaccagaccctcaatgagaccctgggttctttgtcggatgcagttgtaggtttgacctacagccaactggaatccctctcccccgaggctgtgcacggagccatctccaccctcaaccaggtctcaggttgggccaagagccaggtcatcatcttgtctgccaaatacttggcccatgagaaggtgctgtctttctacaatgtcagccagatgggcgcactgctggctggggtcagcacccaggccttctgcagcatgaaacgcaaggacatctcgcaggtcctgagaagtgccgtctcccagtatgtatccgacttgtcacctgcccagcagcaaggtatcctcagcaagatggtccaagcggaagacactgccccaggcatcgtggagatacaaggggctttctttaaggaagtgtctctctttgatttaaggaggcaacctggattcaactctacagtcctgaaggataaggaacttggaaggagccaggctctgttcctgtatgagcttctgttaaagaccaccagaaggcctgaggagcttttgagtgctgggcagctggtcaaaggcgtgacctgctcacacattgatgccatgagcactgacttctttctggcccatttccaggattttcagaacaacttcgccctgctttcaccctatcaggttaattgtttggcgtggaaatactgggaagtttccagattgtctatgccacctttcctcttggctgcactcccggcccgctacctggcttctgtcccagcctcccagtgtgtgccctttctgatcagcctggggaagagctggttggactccttggttttagattcccacaaaaagacttcagtcctcaggaaagtgcagcagtgcctggacgactccattgctgatgagtacactgtggacatcatggggaacctgctgtgtcacttgccggcagccatcatcgacagggggatctcccccagggcttgggcgactgctctacacggcctcagagactgcccagacctcaaccctgagcaaaaggctgcagtgaggctcaagctcctgggacagtatggactccctcagcactggacagccgagaccacgaaggacttgggaccctttctagtacttttctcaggagatgaattaagctctatagccacaaagtttcctgagatccttctgcaagcagcttccaagatggccaggaccctgcccactaaagaattcctctgggctgtctttcagtctgttcggaacagcagtgataagatccccagctatgaccctatgcctggttgccatggagtcgtggccccctcttctgatgacatcttcaagttggccgaagccaacgcctgctgggccctggaggacctgcggtgcatggaggaagacacattcatcaggaccgtggaactgctgggagctgtccagggtttcagccggcctcagctgatgaccctgaaggagaaagcaatacaggtttgggacatgccatcttactggagagaacaccatatcgtctccctggggcgcattgctctggctcttaatgagagtgagctggagcagctggacctcagctccatagacactgtggcttccctaagctggcaaacagaatggaccccgggacaggctgaatccattttgcaagggtacctggatgattcaggatacagtatccaggacctgaagagctttcatttggtaggacttggtgcaaccctgtgtgctataaacatcactgaaatcccacttataaagatctcagaattcagggtggtagtggccagaattgggaccctgctctgcagcacacatgtcttagccgagtttaagaggaaggctgaagttgtgtttggggatcccactgagtggaccagttctgtcttgcaggagcttgggaccattgcagctggattaactaaggcagagctccggatgcttgacaaggatttgatgccatatttccagccatcagcaataaaatgccttcctgatgagatattcaaagagctgtccgcggagcagatcgcctccctgggtccggagaacgccgcggcggtgacccacgcccagcgccggcggctcagtccactgcagctgcagagcctccagcaggcgctagatggcgccaagactcactcctggcaggacgcgcccgctagcgccggtcccactagaacctcatcctcgcgttctcccgcaggagctctccagtcgtggggtctttggcttggttgtcccctgctggttctaatggccaagctcctgtggtgagtggcctgagcgcatcgtcctgtgttgccccaagcagctggccaacatgtgtagagacaggatgctccagatggtgggacacccttccctggatccagaccctcatctagggcagggaaaccctggggccttgatggtgaaaatgcaccccaaatgaaaaataattattaaaaatgatcttgcaaatt

SEQ ID NO: 13494 - DNA, 3624 bp, Homo sapiens
aatgtctcaggaacctacgacatactcccttttcctattcctttttctgagccatggagtgtcgagttatacagtgccaaattccaggcaggatttgcatccattgttgcaaaacatggcggaagaaataatagatggaagctatctgaatgcactgctggatctcatacagtttcaaagctcccacgtgtggacggatgacctgtcccacagagtcctggcctatctgaattcccggaatgttgccttcaccatccccagcctgcaggcagccgtggaaaaccacctggagcagcgtctgcaccagccccagaagctgctggaggacctgaggaagacagacgcccagcagttccgcactgccatgaaatgcctcttagaagacaagaaggacggcttggacctgaaagacatcatcatcgacttaggagagattcgagaacgagccttgcagagccctggcgtgaaccgcagcctgtttctcatcacactggagaggtgtttccagatgctgaactccctggagtgtgtggagatcctgggcaaggtgctgagggggtcctcagggagctttctccagccagacatcacagagcggctccctcgggacctgcgcgaggatgcctttaagaacctatctgcagtgttcaaagatctctacgacaaaacctcggctcattcccagagagctctctattcctggatgactggaatactgcagacatcctccaatgccactgatgactctgcttcatgggtcagtgcggaacacttatgggttttgggcagatacatggttcacctatcgtttgaagaaattacgaaaattagtcctatagaaattgggctgtttatcagctatgacaacgccaccaagcagctggacatggtctatgacatcacacctgagctggcccaggcgtttctggagaggatcagctcctccaactttaacatgaggaatacctccaccatccacaggctggggctgctggtttgtttctacaatgacctggaattgctggatgccactgtggctcaagtcctgctttaccagatgatcaagtgcagccacctgaggggcttccaggctggcgtccagaagctcaaagcagaactcctggacattgccatggagaaccagaccctcaatgagaccctgggttctttgtcggatgcagttgtaggtttgacctacagccaactggaatccctctcccccgaggctgtgcacggagccatctccaccctcaaccaggtctcaggttgggccaagagccaggtcatcatcttgtctgccaaatacttggcccatgagaaggtgctgtctttctacaatgtcagccagatgggcgcactgctggctggggtcagcacccaggccttctgcagcatgaaacgcaaggacatctcgcaggtcctgagaagtgccgtctcccagtatgtatccgacttgtcacctgcccagcagcaaggtatcctcagcaagatggtccaagcggaagacactgccccaggcatcgtggagatacaaggggctttctttaaggaagtgtctctctttgatttaaggaggcaacctggattcaactctacagtcctgaaggataaggaacttggaaggagccaggctctgttcctgtatgagcttctgttaaagaccaccagaaggcctgaggagcttttgagtgctgggcagctggtcaaaggcgtgacctgctcacacattgatgccatgagcactgacttctttctggcccatttccaggattttcagaacaacttcgccctgctttcaccctatcaggttaattgtttggcgtggaaatactgggaagtttccagattgtctatgccacctttcctcttggctgcactcccggcccgctacctggcttctgtcccagcctcccagtgtgtgccctttctgatcagcctggggaagagctggttggactccttggttttagattcccacaaaaagacttcagtcctcaggaaagtgcagcagtgcctggacgactccattgctgatgagtacactgtggacatcatggggaacctgctgtgtcacttgccggcagccatcatcgacagggggatctcccccagggcttgggcgactgctctacacggcctcagagactgcccagacctcaaccctgagcaaaaggctgcagtgaggctcaagctcctgggacagtatggactccctcagcactggacagccgagaccacgaaggacttgggaccctttctagtacttttctcaggagatgaattaagctctatagccacaaagtttcctgagatccttctgcaagcagcttccaagatggccaggaccctgcccactaaagaattcctctgggctgtctttcagtctgttcggaacagcagtgataagatccccagctatgaccctatgcctggttgccatggagtcgtggccccctcttctgatgacatcttcaagttggccgaagccaacgcctgctgggccctggaggacctgcggtgcatggaggaagacacattcatcaggaccgtggaactgctgggagctgtccagggtttcagccggcctcagctgatgaccctgaaggagaaagcaatacaggtttgggacatgccatcttactggagagaacaccatatcgtctccctggggcgcattgctctggctcttaatgagagtgagctggagcagctggacctcagctccatagacactgtggcttccctaagctggcaaacagaatggaccccgggacaggctgaatccattttgcaagggtacctggatgattcaggatacagtatccaggacctgaagagctttcatttggtaggacttggtgcaaccctgtgtgctataaacatcactgaaatcccacttataaagatctcagaattcagggtggtagtggccagaattgggaccctgctctgcagcacacatgtcttagccgagtttaagaggaaggctgaagttgtgtttggggatcccactgagtggaccagttctgtcttgcaggagcttgggaccattgcagctggattaactaaggcagagctccggatgcttgacaaggatttgatgccatatttccagccatcagcaataaaatgccttcctgatgagatattcaaagagctgtccgcggagcagatcgcctccctgggtccggagaacgccgcggcggtgacccacgcccagcgccggcggctcagtccactgcagctgcagagcctccagcaggcgctagatggcgccaagactcactcctggcaggacgcgcccgctagcgccggtcccactagaacctcatcctcgcgttctcccgcaggagctctccagtcgtggggtctttggcttggttgtcccctgctggttctaatggccaagctcctgtggtgagtggcctgagcgcatcgtcctgtgttgccccaagcagctggccaacatgtgtagagacaggatgctccagatggtgggacacccttccctggatccagaccctcatctagggcagggaaaccctggggccttgatggtgaaaatgcaccccaaatgaaaaataattattaaaaatgatcttgcaaattaaaaaaaaaaaaaaa

SEQ ID NO: 13495 - DNA, 3111 bp, Homo sapiens
gcgagttgtgtgagccgccagtatggccgggctatggcggcgagcactggctacgtgcgactgtggggagcggcgcggtgctgggtgctgcggcggccgatgctggccgccgccggggggcgggttcccactgcagcaggagcgtggttgctccgaggccagcggacctgcgacgcctctcctccttgggcactgtggggccgaggcccggcaattgggggccaatggcgggggttttgggaagcgagcagccgcggcggaggcgcattctcggggggcgaggacgcctccgagggcggcgcggaggaaggagccggcggcgcggggggcagcgcgggcgccggggaaggcccggtcataacggcgctcacgcccatgacgatccccgatgtgtttccgcacctgccgctcatcgccatcacccgcaacccggtgttcccgcgctttatcaagattatcgaggttaaaaataagaagttggttgagctgctgagaaggaaagttcgtctcgcccagccttatgtcggcgtctttctaaagagagatgacagcaatgagtcggatgtggtcgagagcctggatgaaatctaccacacggggacgtttgcccagatccatgagatgcaggaccttggggacaagctgcgcatgatcgtcatgggacacagaagagtccatatcagcagacagctggaggtggagcccgaggagccggaggcggagaacaagcacaagccccgcaggaagtcaaagcggggcaagaaggaggcggaggacgagctgagcgccaggcacccggcggagctggcgatggagcccacccctgagctcccggctgaggtgctcatggtggaggtagagaacgttgtccacgaggacttccaggtcacggaggaggtgaaagccctgactgcagagatcgtgaagaccatccgggacatcattgccttgaaccctctctacagggagtcagtgctgcagatgatgcaggctggccagcgggtggtggacaaccccatctacctgagcgacatgggcgccgcgctcaccggggccgagtcccatgagctgcaggacgtcctggaagagaccaatattcctaagcggctgtacaaggccctctccctgctgaagaaggaatttgaactgagcaagctgcagcagcgcctggggcgggaggtggaggagaagatcaagcagacccaccgtaagtacctgctgcaggagcagctaaagatcatcaagaaggagctgggcctggagaaggacgacaaggatgccatcgaggagaagttccgggagcgcctgaaggagctcgtggtccccaagcacgtcatggatgttgtggacgaggagctgagcaagctgggcctgctggacaaccactcctcggagttcaatgtcacccgcaactacctagactggctcacgtccatcccttggggcaagtacagcaacgagaacctggacctggcgcgggcacaggcagtgctggaggaagaccactacggcatggaggacgtcaagaaacgcatcctggagttcattgccgttagccagctccgcggctccacccagggcaagatcctctgcttctatggcccccctggcgtgggtaagaccagcattgctcgctccatcgcccgcgccctgaaccgagagtacttccgcttcagcgtcgggggcatgactgacgtggctgagatcaagggccacaggcggacctacgtgggcgccatgcccgggaagatcatccagtgtttgaagaagaccaagacggagaaccccctgatcctcatcgacgaggtggacaagatcggccgaggctaccagggggacccgtcgtcggcactgctggagctgctggacccagagcagaatgccaacttcctggaccactacctggacgtgcccgtggacttgtccaaggtgctgttcatctgcacggccaacgtcacggacaccatccccgagccgctgcgagaccgtatggagatgatcaacgtgtcgggctacgtggcccaggagaagctggccattgcggagcgctacctggtgccccaggctcgcgccctgtgtggcttggatgagagcaaggccaagctgtcatcggacgtgctgacgctgctcatcaagcagtactgccgcgagagcggtgtccgcaacctgcagaagcaagtggagaaggtgttacggaaatcggcctacaagattgtcagcggcgaggccgagtccgtggaggtgacgcccgagaacctgcaggacttcgtggggaagcccgtgttcaccgtggagcgcatgtatgacgtgacaccgcccggcgtggtcatggggctggcctggaccgcaatgggaggctccacgctgtttgtggagacatccctgagacggccacaggacaaggatgccaagggtgacaaggatggcagcctggaggtgacaggccagctgggggaggtgatgaaggagagcgcccgcatagcctacaccttcgccagagccttcctcatgcagcacgcccccgccaatgactacctggtgacctcacacatccacctgcatgtgcccgagggcgccacccccaaggacggcccaagcgcaggctgcaccatcgtcacggccctgctgtccctggccatgggcaggcctgtccggcagaatctggccatgactggcgaagtctccctcacgggcaagatcctgcctgttggtggcatcaaggagaagaccattgcggccaagcgcgcaggggtgacgtgcatcgtcctgccagccgagaacaagaaggacttctacgacctggcagccttcatcaccgagggcctggaggtgcacttcgtggaacactaccgggagatcttcgacatcgccttcccggacgagcaggcagaggcgctggccgtggaacggtgacggccaccccgggactgcaggcggcggatgtcaggccctgtctgggccagaactgagcgctgtggggagcgcgcccggacctggcagtggagccaccgagcgagcagctcggtccagtgacccagatcccagggacctcagtcggcttaatcagagtgtggcatagaagctatttaatgattaaagtcatttgcagta

SEQ ID NO: 13496 - DNA, 1454 bp, Homo sapiens
atgcagccagtcatgctggccctgtggtccctgcttctgctctggggcctggcgactccatgccaggagctgctagagacggtgggcacgctcgctcggattgacaaggatgaactcggcaaagccatccagaactcactggttggggagcccattctgcagaatgtgctgggatcggtcacagctgtgaaccggggcctcttgggctcaggagggctgcttggaggaggcggcttgctgggccacggaggggtttttggcgttgtcgaggagctctctggtctgaagattgaggagctcacgctgccaaaggtgttgctgaagctgctgccgggatttggggtgcagctgagcctgcacaccaaagtgggcatgcattgctccggcccccttggtggccttctgcagctggctgcggaggtgaacgtgacatcgcgggtggcgctggccgtgagctcaaggggcacacccatccttatcctcaagcgctgcagcacgctcctgggccacatcagcctgttctcagggctgctgcccacaccactctttggggtcgtggaacagatgctcttcaaggtgcttccgggactgctgtgccccgtggtggacagtgtgctgggtgtggtgaatgagctcctgggggctgtgctgggcctggtgtcccttggggctcttgggtccgtggaattctctctggccacattgcctctcatctccaaccagtacatagaactggacatcaaccctatcgtgaagagtgtagctggtgatatcattgacttccccaagtcccgtgccccagccaaggtgccccccaagaaggaccacacatcccaggtgatggtgccactgtacctcttcaacaccacgtttggactcctgcagaccaacggcgccctcgacatggacatcacccctgagctggttcccagcgatgtcccactgacaactacagacctggcagctttgctccctgaggccctggggaagctgcccctgcaccagcaactcctactgttcctgcgggtgagggaagctcccacggtcacactccacaacaagaaggccttggtctccctcccagccaacatccatgtgctgttctatgtccctaaggggacccctgaatccctctttgagctgaactccgtcatgactgtgcgtgcccagctggctccctcggctaccaagctgcacatctccctgtccctggaacggctcagtgtcaaggtggcctcctcctttacccatgcctttgacggatcgcgtttagaagaatggctcagccatgtggtcggggcagtgtatgcaccaaagcttaacgtggccctggatgttggaattcccctgcctaaggttcttaatatcaatttttccaattcagttctggagatcgtagagaatgctgttgtgctgaccgtggcatcctgaggctgagacatggccaccagcct

SEQ ID NO: 13497 - DNA, 4757 bp, Homo sapiens
ccgaagcagggcgcgcagcagcgctgagtgccccggaacgtgcgtcgcgcccccagtgtccgtcgcgtccgccgcgccccgggcggggatggggcggccagactgagcgccgcacccgccatccagacccgccggccctagccgcagtccctccagccgtggccccagcgcgcacgggcgatggcgaaggcgacgtccggtgccgcggggctgcgtctgctgttgctgctgctgctgccgctgctaggcaaagtggcattgggcctctacttctcgagggatgcttactgggagaagctgtatgtggaccaggcggccggcacgcccttgctgtacgtccatgccctgcgggacgcccctgaggaggtgcccagcttccgcctgggccagcatctctacggcacgtaccgcacacggctgcatgagaacaactggatctgcatccaggaggacaccggcctcctctaccttaaccggagcctggaccatagctcctgggagaagctcagtgtccgcaaccgcggctttcccctgctcaccgtctacctcaaggtcttcctgtcacccacatcccttcgtgagggcgagtgccagtggccaggctgtgcccgcgtatacttctccttcttcaacacctcctttccagcctgcagctccctcaagccccgggagctctgcttcccagagacaaggccctccttccgcattcgggagaaccgacccccaggcaccttccaccagttccgcctgctgcctgtgcagttcttgtgccccaacatcagcgtggcctacaggctcctggagggtgagggtctgcccttccgctgcgccccggacagcctggaggtgagcacgcgctgggccctggaccgcgagcagcgggagaagtacgagctggtggccgtgtgcaccgtgcacgccggcgcgcgcgaggaggtggtgatggtgcccttcccggtgaccgtgtacgacgaggacgactcggcgcccaccttccccgcgggcgtcgacaccgccagcgccgtggtggagttcaagcggaaggaggacaccgtggtggccacgctgcgtgtcttcgatgcagacgtggtacctgcatcaggggagctggtgaggcggtacacaagcacgctgctccccggggacacctgggcccagcagaccttccgggtggaacactggcccaacgagacctcggtccaggccaacggcagcttcgtgcgggcgaccgtacatgactataggctggttctcaaccggaacctctccatctcggagaaccgcaccatgcagctggcggtgctggtcaatgactcagacttccagggcccaggagcgggcgtcctcttgctccacttcaacgtgtcggtgctgccggtcagcctgcacctgcccagtacctactccctctccgtgagcaggagggctcgccgatttgcccagatcgggaaagtctgtgtggaaaactgccaggcattcagtggcatcaacgtccagtacaagctgcattcctctggtgccaactgcagcacgctaggggtggtcacctcagccgaggacacctcggggatcctgtttgtgaatgacaccaaggccctgcggcggcccaagtgtgccgaacttcactacatggtggtggccaccgaccagcagacctctaggcaggcccaggcccagctgcttgtaacagtggaggggtcatatgtggccgaggaggcgggctgccccctgtcctgtgcagtcagcaagagacggctggagtgtgaggagtgtggcggcctgggctccccaacaggcaggtgtgagtggaggcaaggagatggcaaagggatcaccaggaacttctccacctgctctcccagcaccaagacctgccccgacggccactgcgatgttgtggagacccaagacatcaacatttgccctcaggactgcctccggggcagcattgttgggggacacgagcctggggagccccgggggattaaagctggctatggcacctgcaactgcttccctgaggaggagaagtgcttctgcgagcccgaagacatccaggatccactgtgcgacgagctgtgccgcacggtgatcgcagccgctgtcctcttctccttcatcgtctcggtgctgctgtctgccttctgcatccactgctaccacaagtttgcccacaagccacccatctcctcagctgagatgaccttccggaggcccgcccaggccttcccggtcagctactcctcttccggtgcccgccggccctcgctggactccatggagaaccaggtctccgtggatgccttcaagatcctggaggatccaaagtgggaattccctcggaagaacttggttcttggaaaaactctaggagaaggcgaatttggaaaagtggtcaaggcaacggccttccatctgaaaggcagagcagggtacaccacggtggccgtgaagatgctgaaagagaacgcctccccgagtgagctgcgagacctgctgtcagagttcaacgtcctgaagcaggtcaaccacccacatgtcatcaaattgtatggggcctgcagccaggatggcccgctcctcctcatcgtggagtacgccaaatacggctccctgcggggcttcctccgcgagagccgcaaagtggggcctggctacctgggcagtggaggcagccgcaactccagctccctggaccacccggatgagcgggccctcaccatgggcgacctcatctcatttgcctggcagatctcacaggggatgcagtatctggccgagatgaagctcgttcatcgggacttggcagccagaaacatcctggtagctgaggggcggaagatgaagatttcggatttcggcttgtcccgagatgtttatgaagaggattcctacgtgaagaggagccagggtcggattccagttaaatggatggcaattgaatccctttttgatcatatctacaccacgcaaagtgatgtatggtcttttggtgtcctgctgtgggagatcgtgaccctagggggaaacccctatcctgggattcctcctgagcggctcttcaaccttctgaagaccggccaccggatggagaggccagacaactgcagcgaggagatgtaccgcctgatgctgcaatgctggaagcaggagccggacaaaaggccggtgtttgcggacatcagcaaagacctggagaagatgatggttaagaggagagactacttggaccttgcggcgtccactccatctgactccctgatttatgacgacggcctctcagaggaggagacaccgctggtggactgtaataatgcccccctccctcgagccctcccttccacatggattgaaaacaaactctatggcatgtcagacccgaactggcctggagagagtcctgtaccactcacgagagctgatggcactaacactgggtttccaagatatccaaatgatagtgtatatgctaactggatgctttcaccctcagcggcaaaattaatggacacgtttgatagttaacatttctttgtgaaaggtaatggactcacaaggggaagaaacatgctgagaatggaaagtctaccggccctttctttgtgaacgtcacattggccgagccgtgttcagttcccaggtggcagactcgtttttggtagtttgttttaacttccaaggtggttttacttctgatagccggtgattttccctcctagcagacatgccacaccgggtaagagctctgagtcttagtggttaagcattcctttctcttcagtgcccagcagcacccagtgttggtctgtgtccatcagtgaccaccaacattctgtgttcacatgtgtgggtccaacacttactacctggtgtatgaaattggacctgaactgttggatttttctagttgccgccaaacaaggcaaaaaaatttaaacatgaagcacacacacaaaaaaggcagtaggaaaaatgctggccctgatgacctgtccttattcagaatgagagactgcggggggggcctgggggtagtgtcaatgcccctccagggctggaggggaagaggggccccgaggatgggcctgggctcagcattcgagatcttgagaatgatttttttttaatcatgcaacctttccttaggaagacatttggttttcatcatgattaagatgattcctagatttagcacaatggagagattccatgccatctttactatgtggatggtggtatcagggaagagggctcacaagacacatttgtcccccgggcccaccacatcatcctcacgtgttcggtactgagcagccactacccctgatgagaacagtatgaagaaagggggctgttggagtcccagaattgctgacagcagaggctttgctgctgtgaatcccacctgccaccagcctgcagcacaccccacagccaagtagaggcgaaagcagtggctcatcctacctgttaggagcaggtagggcttgtactcactttaatttgaatcttatcaacttactcataaagggacaggctagctagctgtgttagaagtagcaatgacaatgaccaaggactgctacacctctgattacaattctgatgtgaaaaagatggtgtttggctcttatagagcctgtgtgaaaggcccatggatcagctcttcctgtgtttgtaatttaatgctgctacaaggtgtttctgtttcttagattctgaccatgactcataagcttcttgtcattcttcattgc

SEQ ID NO: 13498 - DNA, 4520 bp, Homo sapiens
tcgcgggccgaggacgcctctggggcggcaccgcgtcccgagagccccagaagtcggcggggaagtttccccggtggggggcgtttcgggcctcccggacggctctcggccccggagcccggtcgcaggagcgcgggcccgggggcgggaacgcgccgcggccgcctcctcctccccggctcccgcccgcggcggtgttggcggcggcggtggcggcggcggcggcgcttccccggcgcggagcggctttaaaaggcggcactccaccccccggcgcactcgcagctcgggcgccgcgcgagcctgtcgccgctatgcctccgcgcgcgccgcctgcgcccgggccccggccgccgccccgggccgccgccgccaccgacaccgccgcgggcgcggggggcgcggggggcgcggggggcgccggcgggcccgggttccggccgctcgcgccgcgtccctggcgctggctgctgctgctggcgctgcctgccgcctgctccgcgcccccgccgcgccccgtctacaccaaccactgggcggtgcaagtgctgggcggcccggccgaggcggaccgcgtggcggcggcgcacgggtacctcaacttgggccagattggaaacctggaagattactaccatttttatcacagcaaaacctttaaaagatcaaccttgagtagcagaggccctcacaccttcctcagaatggacccccaggtgaaatggctccagcaacaggaagtgaaacgaagggtgaagagacaggtgcgaagtgacccgcaggccctttacttcaacgaccccatttggtccaacatgtggtacctgcattgtggcgacaagaacagtcgctgccggtcggaaatgaatgtccaggcagcgtggaagaggggctacacaggaaaaaacgtggtggtcaccatccttgatgatggcatagagagaaatcaccctgacctggccccaaattatgattcctacgccagctacgacgtgaacggcaatgattatgacccatctccacgatatgatgccagcaatgaaaataaacacggcactcgttgtgcgggagaagttgctgcttcagcaaacaattcctactgcatcgtgggcatagcgtacaatgccaaaataggaggcatccgcatgctggacggcgatgtcacagatgtggtcgaggcaaagtcgctgggcatcagacccaactacatcgacatttacagtgccagctgggggccggacgacgacggcaagacggtggacgggcccggccgactggctaagcaggctttcgagtatggcattaaaaagggccggcagggcctgggctccattttcgtctgggcatctgggaatggcgggagagagggggactactgctcgtgcgatggctacaccaacagcatctacaccatctccgtcagcagcgccaccgagaatggctacaagccctggtacctggaagagtgtgcctccaccctggccaccacctacagcagtggggccttttatgagcgaaaaatcgtcaccacggatctgcgtcagcgctgtaccgatggccacactgggacctcagtctctgcccccatggtggcgggcatcatcgccttggctctagaagcaaacagccagttaacctggagggacgtccagcacctgctagtgaagacatcccggccggcccacctgaaagcgagcgactggaaagtgaacggcgcgggtcataaagttagccatttctatggatttggtttggtggacgcagaagctctcgttgtggaggcaaagaagtggacagcagtgccatcgcagcacatgtgtgtggccgcctcggacaagagacccaggagcatccccttagtgcaggtgctgcggactacggccctgaccagcgcctgcgcggagcactcggaccagcgggtggtctacttggagcacgtggtggttcgcacctccatctcacacccacgccgaggagacctccagatctacctggtttctccctcgggaaccaagtctcaacttctggcaaagaggttgctggatctttccaatgaagggtttacaaactgggaattcatgactgtccactgctggggagaaaaggctgaagggcagtggaccttggaaatccaagatctgccatcccaggtccgcaacccggagaagcaagggaagttgaaagaatggagcctcatactgtatggcacagcagagcacccgtaccacaccttcagtgcccatcagtcccgctcgcggatgctggagctctcagccccagagctggagccacccaaggctgccctgtcaccctcccaggtggaagttcctgaagatgaggaagattacacaggtgtgtgccatccggagtgtggtgacaaaggctgtgatggccccaatgcagaccagtgcttgaactgcgtccacttcagcctggggagtgtcaagaccagcaggaagtgcgtgagtgtgtgccccttgggctactttggggacacagcagcaagacgctgtcgccggtgccacaaggggtgtgagacctgctccagcagagctgcgacgcagtgcctgtcttgccgccgcgggttctatcaccaccaggagatgaacacctgtgtgaccctctgtcctgcaggattttatgctgatgaaagtcagaaaaattgccttaaatgccacccaagctgtaaaaagtgcgtggatgaacctgagaaatgtactgtctgtaaagaaggattcagccttgcacggggcagctgcattcctgactgtgagccaggcacctactttgactcagagctgatcagatgtggggaatgccatcacacctgcggaacctgcgtggggccaggcagagaagagtgcattcactgtgcgaaaaacttccacttccacgactggaagtgtgtgccagcctgtggtgagggcttctacccagaagagatgccgggcttgccccacaaagtgtgtcgaaggtgtgacgagaactgcttgagctgtgcaggctccagcaggaactgtagcaggtgtaagacgggcttcacacagctggggacctcctgcatcaccaaccacacgtgcagcaacgctgacgagacattctgcgagatggtgaagtccaaccggctgtgcgaacggaagctcttcattcagttctgctgccgcacgtgcctcctggccgggtaagggtgcctagctgcccacagagggcaggcactcccatccatccatccgtccaccttcctccagactgtcggccagagtctgtttcaggagcggcgccctgcacctgacagctttatctccccaggagcagcatctctgagcacccaagccaggtgggtggtggctcttaaggaggtgttcctaaaatggtgatatcctctcaaatgctgcttgttggctccagtcttccgacaaactaacaggaacaaaatgaattctgggaatccacagctctggctttggagcagcttctgggaccataagtttactgaatcttcaagaccaaagcagaaaagaaaggcgcttggcatcacacatcactcttctccccgtgcttttctgcggctgtgtagtaaatctccccggcccagctggcgaaccctgggccatcctcacatgtgacaaagggccagcagtctacctgctcgttgcctgccactgagcagtctggggacggtttggtcagactataaataagataggtttgagggcataaaatgtatgaccactggggccggagtatctatttctacatagtcagctacttctgaaactgcagcagtggcttagaaagtccaattccaaagccagaccagaagattctatcccccgcagcgctctcctttgagcaagccgagctctccttgttaccgtgttctgtctgtgtcttcaggagtctcatggcctgaacgaccacctcgacctgatgcagagccttctgaggagaggcaacaggaggcattctgtggccagccaaaaggtaccccgatggccaagcaattcctctgaacaaaatgtaaagccagccatgcattgttaatcatccatcacttcccattttatggaattgcttttaaaatacatttggcctctgcccttcagaagactcgtttttaaggtggaaactcctgtgtctgtgtatattacaagcctacatgacacagttggatttattctgccaaacctgtgtaggcattttataagctacatgttctaatttttaccgatgttaattattttgacaaatatttcatatattttcattgaaatgcacagatctgcttgatcaattcccttgaatagggaagtaacatttgccttaaattttttcgacctcgtctttctccatattgtcctgctcccctgtttgacgacagtgcatttgccttgtcacctgtgagctggagagaacccagatgttgtttattgaatctacaactctgaaagagaaatcaatgaagcaagtacaatgttaaccctaaattaataaaagagttaacatcccatggcaaaaaa

SEQ ID NO: 13499 - DNA, 4559 bp, Homo sapiens
tcgcgggccgaggacgcctctggggcggcaccgcgtcccgagagccccagaagtcggcggggaagtttccccggtggggggcgtttcgggcctcccggacggctctcggccccggagcccggtcgcaggagcgcgggcccgggggcgggaacgcgccgcggccgcctcctcctccccggctcccgcccgcggcggtgttggcggcggcggtggcggcggcggcggcgcttccccggcgcggagcggctttaaaaggcggcactccaccccccggcgcactcgcagctcgggcgccgcgcgagcctgtcgccgctatgcctccgcgcgcgccgcctgcgcccgggccccggccgccgccccgggccgccgccgccaccgacaccgccgcgggcgcggggggcgcggggggcgcggggggcgccggcgggcccgggttccggccgctcgcgccgcgtccctggcgctggctgctgctgctggcgctgcctgccgcctgctccgcgcccccgccgcgccccgtctacaccaaccactgggcggtgcaagtgctgggcggcccggccgaggcggaccgcgtggcggcggcgcacgggtacctcaacttgggccagattggaaacctggaagattactaccatttttatcacagcaaaacctttaaaagatcaaccttgagtagcagaggccctcacaccttcctcagaatggacccccaggtgaaatggctccagcaacaggaagtgaaacgaagggtgaagagacaggtgcgaagtgacccgcaggccctttacttcaacgaccccatttggtccaacatgtggtacctgcattgtggcgacaagaacagtcgctgccggtcggaaatgaatgtccaggcagcgtggaagaggggctacacaggaaaaaacgtggtggtcaccatccttgatgatggcatagagagaaatcaccctgacctggccccaaattatgattcctacgccagctacgacgtgaacggcaatgattatgacccatctccacgatatgatgccagcaatgaaaataaacacggcactcgttgtgcgggagaagttgctgcttcagcaaacaattcctactgcatcgtgggcatagcgtacaatgccaaaataggaggcatccgcatgctggacggcgatgtcacagatgtggtcgaggcaaagtcgctgggcatcagacccaactacatcgacatttacagtgccagctgggggccggacgacgacggcaagacggtggacgggcccggccgactggctaagcaggctttcgagtatggcattaaaaagggccggcagggcctgggctccattttcgtctgggcatctgggaatggcgggagagagggggactactgctcgtgcgatggctacaccaacagcatctacaccatctccgtcagcagcgccaccgagaatggctacaagccctggtacctggaagagtgtgcctccaccctggccaccacctacagcagtggggccttttatgagcgaaaaatcgtcaccacggatctgcgtcagcgctgtaccgatggccacactgggacctcagtctctgcccccatggtggcgggcatcatcgccttggctctagaagcaaacagccagttaacctggagggacgtccagcacctgctagtgaagacatcccggccggcccacctgaaagcgagcgactggaaagtgaacggcgcgggtcataaagttagccatttctatggatttggtttggtggacgcagaagctctcgttgtggaggcaaagaagtggacagcagtgccatcgcagcacatgtgtgtggccgcctcggacaagagacccaggagcatccccttagtgcaggtgctgcggactacggccctgaccagcgcctgcgcggagcactcggaccagcgggtggtctacttggagcacgtggtggttcgcacctccatctcacacccacgccgaggagacctccagatctacctggtttctccctcgggaaccaagtctcaacttctggcaaagaggttgctggatctttccaatgaagggtttacaaactgggaattcatgactgtccactgctggggagaaaaggctgaagggcagtggaccttggaaatccaagatctgccatcccaggtccgcaacccggagaagcaagggaagttgaaagaatggagcctcatactgtatggcacagcagagcacccgtaccacaccttcagtgcccatcagtcccgctcgcggatgctggagctctcagccccagagctggagccacccaaggctgccctgtcaccctcccaggtggaagttcctgaagatgaggaagattacacagctcaatccaccccaggctctgctaatattttacagaccagtgtgtgccatccggagtgtggtgacaaaggctgtgatggccccaatgcagaccagtgcttgaactgcgtccacttcagcctggggagtgtcaagaccagcaggaagtgcgtgagtgtgtgccccttgggctactttggggacacagcagcaagacgctgtcgccggtgccacaaggggtgtgagacctgctccagcagagctgcgacgcagtgcctgtcttgccgccgcgggttctatcaccaccaggagatgaacacctgtgtgaccctctgtcctgcaggattttatgctgatgaaagtcagaaaaattgccttaaatgccacccaagctgtaaaaagtgcgtggatgaacctgagaaatgtactgtctgtaaagaaggattcagccttgcacggggcagctgcattcctgactgtgagccaggcacctactttgactcagagctgatcagatgtggggaatgccatcacacctgcggaacctgcgtggggccaggcagagaagagtgcattcactgtgcgaaaaacttccacttccacgactggaagtgtgtgccagcctgtggtgagggcttctacccagaagagatgccgggcttgccccacaaagtgtgtcgaaggtgtgacgagaactgcttgagctgtgcaggctccagcaggaactgtagcaggtgtaagacgggcttcacacagctggggacctcctgcatcaccaaccacacgtgcagcaacgctgacgagacattctgcgagatggtgaagtccaaccggctgtgcgaacggaagctcttcattcagttctgctgccgcacgtgcctcctggccgggtaagggtgcctagctgcccacagagggcaggcactcccatccatccatccgtccaccttcctccagactgtcggccagagtctgtttcaggagcggcgccctgcacctgacagctttatctccccaggagcagcatctctgagcacccaagccaggtgggtggtggctcttaaggaggtgttcctaaaatggtgatatcctctcaaatgctgcttgttggctccagtcttccgacaaactaacaggaacaaaatgaattctgggaatccacagctctggctttggagcagcttctgggaccataagtttactgaatcttcaagaccaaagcagaaaagaaaggcgcttggcatcacacatcactcttctccccgtgcttttctgcggctgtgtagtaaatctccccggcccagctggcgaaccctgggccatcctcacatgtgacaaagggccagcagtctacctgctcgttgcctgccactgagcagtctggggacggtttggtcagactataaataagataggtttgagggcataaaatgtatgaccactggggccggagtatctatttctacatagtcagctacttctgaaactgcagcagtggcttagaaagtccaattccaaagccagaccagaagattctatcccccgcagcgctctcctttgagcaagccgagctctccttgttaccgtgttctgtctgtgtcttcaggagtctcatggcctgaacgaccacctcgacctgatgcagagccttctgaggagaggcaacaggaggcattctgtggccagccaaaaggtaccccgatggccaagcaattcctctgaacaaaatgtaaagccagccatgcattgttaatcatccatcacttcccattttatggaattgcttttaaaatacatttggcctctgcccttcagaagactcgtttttaaggtggaaactcctgtgtctgtgtatattacaagcctacatgacacagttggatttattctgccaaacctgtgtaggcattttataagctacatgttctaatttttaccgatgttaattattttgacaaatatttcatatattttcattgaaatgcacagatctgcttgatcaattcccttgaatagggaagtaacatttgccttaaattttttcgacctcgtctttctccatattgtcctgctcccctgtttgacgacagtgcatttgccttgtcacctgtgagctggagagaacccagatgttgtttattgaatctacaactctgaaagagaaatcaatgaagcaagtacaatgttaaccctaaattaataaaagagttaacatcccatggcaaaaaa

SEQ ID NO: 13500 - DNA, 7309 bp, Homo sapiens
atggagactctggatagccagagggtccaggaccgcctgctggcagccccaggatgcagctccccttctggccaacaggaactcttttccagtcatgtgatgcaggaagagagcgcaaatgatatggaatgtgagcagctgccagcagagatactgcgacaagtgaccgttcaccgagaccctatatatggctttggcttcgtggctggcagtgagaggcctgtggtggttcgatctgtgaggccaggaggcccctctgagaacaagctcctggctggtgaccagattgtggctattaatgaggaagacgtgagtgaagccccgagggagagactcatagaacttatcaggagcgctaaggaattcatcgttcttacagttctgcacactcatcagtcccccaaatctgctttcatcagtgctgcgaagaaggccaagttgaggtccaatcctgtgaaggttcgattttctgagcaggtggcagttggagaaacagatgcaaaaatgatgaagaaggaagctctcctcctcatccctaatgtcctgaaggttttcttagaaaatgggcagatcaagtcattcacatttgatggtcggaccactgttaaggatgtgatgttgacattacaggaccgcctttccctgaggttcattgagcactttgctcttgtccttgagtatgccgggccagaacagaatcacaagtttctgcttcttcaggacaagcaacccctggcttatgtggtacagcggacacactatcatggaatgaaatgcctcttccgaataagcttctttcccaaagaccctgtggagctgctgcgtcgggatcctgctgcttttgagtacctatacatccagagtcggaatgatgttattcgagaacgctttggaatggatcccaagccagagatgcttttgggccttgctgcgctccacatctatatcactgtctcagccactcgacctagtcagaagatctcgctcaagaatgtggagaaggagtggggcctggaaccctttcttcccccctccctcctgcaggtcatcaaagagaagaacctccggaaatctctctctcagcaactgaaggctcaccaaacacatccttcctgcggcaccaagggctctgcaattcaggcaaagctccagtatctacgaattctgaatgaacttcctaccttcacgggcgttttgttcaacactgtaggcctggatgagaagcagtcggccaccacgctcctggtgggaccccgtcatggcatcagccatgttattgacctcaaaaccaacctcaccactgtgctgtccgagttcagcaagatcagcaagatccagctgttccgggagaaccagggcgtggcccgggtggagaccagcatcatggatgccaagcctctggtgctgttgatggagtggcctgaagccaccaactttgcctgcctgatcgcggggtactgccgcctcttgctggattccaggaagatggtcttctccaggcctgccagccagccacttccacctccaatgatcaaggcagattacatgcacagcgcccaccgccctgtcactgggggccacctggggaaaaaggagagtagttatgtgggcagcgtgggcaccagccccaggaaatcgagccgctgcacgcccccacctgccgactctgagcttgtcagcttctgctacctccatatgcgggaacaaaggaaggagcaggaaagccggacagatgtcaacgagaacctaatcttctttgaggagaccaggccccgaaccaagtctgaccccacatccaaaagctctggccaaggttatgaggtagtccctgatgactttgatgcagctagcctagaccacgagccttgtgccagcagggcccggtcctacaccttggacaattcccttggggctgaagccctgaatttctactgtgactcttgcaaagccaaacttcaggagcagctgggccctcgcaaaggtgggaagcctggctcctctcgtgacaatatagtagatttgatgtccctcccaccacctgggagtgaggaggaggaggaggaggaagatgagacaacttctctgttgccagccattgctgccccaccccctggtttccgagacaacagctctgatgaggatgaccccaagcgccgggctgtccagagccaggaacaaggacgccacctgcgtgggcttctgtacgatgagattccagtgacattgattgacagtgtgcagacccggacagttcgagatcatgcccaggagctagatgatgccctggtgtccactctgcaggctctagaagccctggctgcatccgaggatggaccacacccaccacccccacagactgcaggtctgattgtgctggccacaatcactcctgaatcatcgctggactcaggtcatgaaaccaactcttcagagctcacagacatgtcagagatgatgtcggccatgaagcagcaccagaacaccacctacttcctggcccagcacctcaacaaggacagcctccttgcccgcaaggacctgcccttccggatccagagctgtgcagcccaggccgttcttacggccccttactctcttgggcgcccggatcccaacccatctctccaacccattgccacaggccagagtcctggcccccctggcgctcggaggaagctgccccagtcagagggccaggtacagggagaacgaacatactccttggcagtgcacccagcactgtccccacagcttagtgaacagaagaatctgagtctgctgtccccagttcctgaggacaaagggcctggccacactagggcaggcctagaaatgtcactgagggcagccacatcatccctcagtgaagagcaggtctctgagctgagggacaacctgcccaaggaggtcaggttgagccccaagcttatcctcgacccaaagagcagtgtgacccctgccatcatctcggccgccctacagcaagtggttcacaataagagtctagtcactgctggtggggctttggggaacccccccagcaggggtgagagaaggctggaggccagcatggggaggccagaggttagcatgatgagcagcagtgccagtaagaatctgaagttcaaaattagccccagtgctccagagacctcatggaattctcaacatcagctgggtgcagaggtctcttccagccccagagcacccacaggcagccgggctgacagcctgcacctctcccaacaagaggacagtctgcctgttcaaaatttccctcccaaaagctatcttttgcgaacaagccgagagtcagtgggcaagcaagctacaggggaggtggcaggcaaaggcgggccagtgggtggtaagcccaccctgcagaagcagggcaccatctccagccaaggggagaaggcgcagctggagagcacacccaaaagaagcaagctcgaagagaccagcctggttccccgagctacctaccccatggctctgcagagccccagctgccagtcaagaagccacagccccagctgccagcctcatggccacagccccagcagccagtctcgaggtcagagccccagctgccaacctcgaggccagagcccactgaggtctcaggctgccagccggcaggtgagcaccatgccctctaggaagcttgaaacaactctcaatggagcccactcgacctctgaaggccctgccaaacccaagtcatcccgaggtcctttccggctacgcaatttattctctgccaccttcccaacccgccagaagaaggagacagatgagcggcaggcccaactgcagaaggtaaagcagtatgaactggagttccttgaggaacttctaaagccaccaagccagggggagctgccaggcaccgagtacctgcaacctccagcacctggccgctgcagctgccagctccgcagcagccctgtgcagcaggggcctggcatgtcccgtgagcagaggcgcagctgtgactgcaagcgcatctgccgggggggccggccacaagccacccagacaccagtgcccagcctccgggggagggaaagggacagagtcctccctagccagaggcagccagaggctggcccaggcgtgagcctcagcagccccatcaatgtccagcgcattcgttctaccagcctggagtcccgagagtgccgatcggaccctgagagtggtgtttcgtgcctgaccacgtgtgcctcggggggcgagtgtctgggagctcccaattacaggaaactgatgcgccgctacagtatcagtgagctggaccagggtgacagggcctcgctgacctcggatgtctacccacatcctcccctgggcatgctgcccagggaggccaaggaggtagaggcaagcctccccatagccttgggtcccaaaagcaggtctctggagtcaccgacgctgggagacccctcctacgtccaggttgccccagagaccaaaggccccagacagatggccgtgttctcactgcccgaggaggtgtaccggaagcctgccgagctagacgaggacagtgagagcagcaagtgctgctccatccgctactgcttctactaccgcaagtgtgacatggcagatgatgccagtgatggcaaggatgagctctcctactctatccccatgaagatcctgcctggcatgaagctggacgagcaggtggtgcctgtggtgagcaggaccctgcaggtgctggatgctgctacctgcagcagcagcagccctgaggcctcccgcactcaggagattgacctccgtgtgtccaccttcgaggggagcctggccaagatcaatgccctgcgggcccatgcctatggcctccctgatggcttcctggctgcccggctggacaccaacgagctgctgacagtcctgcggcagtgtgtggccagccccgaggcccgtgcccccaagccctatgtgtctcagatctccgagtataagcttgagctagctctcaagttcaaggagctccgggcctcctgccgccgtgtggccaatgtggacaagagcccaactcacatgctggcagccatcacgggcagcttccaggtgctgagcagcctcattgagaccttcgtgcggctggtgttcattgtgcgctccgaggcccagcgccaagagctgctggccaaggtagaagaggtggtgaggaactacaccttcctgctgcgtgcagctgaggagtccacagcccgtaaccttaaccagcagcagcagcaacaacaacagcagcagcagcaacaacaacagcagcagcaacaacaacagcagcagcagcagcagcaggtggcagcagctgcaggggcagccacagagcatccaccaggctccccaacttcggcgactgttatgagcacattcacccactccttaaaaacccttattaagtagggcatctgcccacacctgtcccccttccccaaccatggccccaggtttgagctttgtggtccttgcatcttgtggtgagtgtgtgtgtgtctgctgggccagtcagggtccaagagcccatcagtctccggggagtggaaactctcttgattgaggctctctcttaagggctgcaggcttagctgccgccctgggtgtcctcaccccttccctggcctctgggcctcactgtgagggcaaaggcccctcttcactctgctcacagcagagctgtattttatctcttctctggggctgagaggtgacatcaggctcacttcctgctcaatccgtgttgggcgctgggggagccagggcctgaagcaagcggaccctcaggctttgagctcctcgtggcatcggctcccctgctgggagcagtggcagtagcagcaggccacattgccgtgccgaggggagagggcgctcagtccagatgtccccatccaccttgggctcacactcacctggtagatgccaccctgagggcctgtgcctgggtgagatgtctgcagaaaacagccacactaggctgtttgcagcggcccaactggccggcagcctggtgagccctcacctccaggtccagtagctccacaccagccatccccaaagtgccctgcccctcactgatgggcagggcagctcagtccactagggagcaagcatctgggatcaccccactcattttgggtaaggtacctgatgaaaacgtctgcctggggagacccagtgcaggcctaggagcccgcctagcccggcccagcccagctcaggggctgttgctgcaggcatgaggcttctctctcaacatctctctaccagacagactgtccttgggagtttgacttagctgtggatcggggaggggggtggggggaggggggaaaggggtaggggtggggggtgttgatgactatatcttaaacttctggaagctagcgtgatatgttaatcctgagtatatgcttttggctgtgtattgaccctgtggatttgtctctctaagaaaagaagctgagcgccttacccggtgcagtcctgcacctttctccctctctggagccatctggaagggaattcacactgtttaacatccaccttgacacacacctcctattgccaccaccgctgccaccaccaccgccaccaccgctgccaaccctccccccacgccccccacccccgcaaccttcctgggagtgaagacacggagtccctaccaactgtcccactgtagggaacaaagaaagccaatgtttcttctgtatagattgcttctcgtccgcctctccatatctccccatttcccacacccttgtgccctgtgtctgcctctgtttcatcactgtgtcagaggcccatgtgaaatctttcattctgatgtgagttttataaagatgtacactgtgcttaatccctgcccatccttggtagcccctagtgcaataaagtctccctgagtggtgagttctcccggcaaggaggaggggagtttcttctgcagaatccagcccctcacttccttgcttctcctcccccaggaccaagttgttgaatgggccagagatgcagccagtggggaatccttttcccctcagccactgcaagctggagtgctgatatggtcttctttttctcccaacttcgccactcagcccctgcctgtgtcattccaccgccatccttcacctctccctcagcctcatggagaggaaacattttctaatgtctgtatatagtatatatactacataaaatatataaattatatatatactaatttatgtcttgtttttcaaacaagaatgattaaatctattcatcttactatccc

SEQ ID NO: 13501 - DNA, 6331 bp, Homo sapiens
gtctcctctggatcttaactactgagcgcaatgctgagccatggagccgggttggccttgtggatcacactgagcctgctgcagactggactggcggagccagagagatgtaacttcaccctggcggagtccaaggcctccagccattctgtgtctatccagtggagaattttgggctcaccctgtaactttagcctcatctatagcagtgacaccctgggggccgcgttgtgccctacctttcggatagacaacaccacatacggatgtaaccttcaagatttacaagcaggaaccatctataacttcaagattatttctctggatgaagagagaactgtggtcttgcaaacagatcctttacctcctgctaggtttggagtcagtaaagagaagacgacttcaaccggcttgcatgtttggtggactccttcttccggaaaagtcacctcatatgaggtgcaattatttgatgaaaataaccaaaagatacagggggttcaaattcaagaaagtacttcatggaatgaatacacttttttcaatctcactgctggtagtaaatacaatattgccatcacagctgtttctggaggaaaacgttctttttcagtttataccaatggatcaacagtgccatctccagtgaaagatattggtatttccacaaaagccaattctctcctgatttcctggtcccatggttctgggaatgtggaacgataccggctgatgctaatggataaagggatcctagttcatggcggtgttgtggacaaacatgctacttcctatgcttttcacgggctgtcccctggctacctctacaacctcactgttatgactgaggctgcagggctgcaaaactacaggtggaaactagtcaggacagcccccatggaagtctcaaatctgaaggtgacaaatgatggcagtttgacctctctaaaagtcaaatggcaaagacctcctggaaatgtggattcttacaatatcaccctgtctcacaaagggaccatcaaggaatccagagtattagcaccttggattactgaaactcactttaaagagttagtccccggtcgactttatcaagttactgtcagctgtgtctctggtgaactgtctgctcagaagatggcagtgggcagaacatttccagacaaagttgcaaacctggaggcaaacaataatggcaggatgaggtctcttgtagtgagctggtcgccccctgctggagactgggagcagtatcggatcctactcttcaatgattctgtggtgctgctcaacatcactgtgggaaaggaagaaacacagtatgtcatggatgacacggggctcgtaccgggaagacagtatgaggtggaagtcattgttgagagtggaaatttgaagaattctgagcgttgccaaggcaggacagtccccctggctgtcctccagcttcgtgtcaaacatgccaatgaaacctcactgagtatcatgtggcagacccctgtagcagaatgggagaaatacatcatttccctagctgacagagacctcttactgatccacaagtcactctccaaagatgccaaagaattcacttttactgacctggtgcctggacgaaaatacatggctacagtcaccagtattagtggagacttaaaaaattcctcttcagtaaaaggaagaacagtgcctgcccaagtgactgacttgcatgtggccaaccaaggaatgaccagtagtctgtttactaactggacccaggcacaaggagacgtagaattttaccaagtcttactgatccatgaaaatgtggtcattaaaaatgaaagcatctccagtgagaccagcagatacagcttccactctctcaagtccggcagcctgtactccgtggtggtaacaacagtgagtggagggatctcttcccgacaagtggttgtggagggaagaacagtcccttccagtgtgagtggagtaacggtgaacaattccggtcgtaatgactacctcagcgtttcctggctgctggcgcccggagatgtggataactatgaggtaacattgtctcatgacggcaaggtggttcagtcccttgtcattgccaagtctgtcagagaatgttccttcagctccctcaccccaggccgcctctacaccgtgaccataactacaaggagtggcaagtatgaaaatcactccttcagccaagagcggacagtgcctgacaaagtccagggagtcagtgttagcaactcagccaggagtgactatttaagggtatcctgggtgcatgccactggagactttgatcactatgaagtcaccattaaaaacaaaaacaacttcattcaaactaaaagcattcccaagtcagaaaacgaatgtgtatttgttcagctagtccctggacggttgtacagtgtcactgttactacaaaaagtggacaatatgaagccaatgaacaagggaatgggagaacaattccagagcctgttaaggatctaacattgcgcaacaggagcactgaggacttgcatgtgacttggtcaggagctaatggggatgtcgaccaatatgagatccagctgctcttcaatgacatgaaagtatttcctccttttcaccttgtaaataccgcaaccgagtatcgatttacttccctaacaccaggccgccaatacaaaattcttgtcttgacgattagcggggatgtacagcagtcagccttcattgagggcttcacagttcctagtgctgtcaaaaatattcacatttctcccaatggagcaacagatagcctgacggtgaactggactcctggtgggggagacgttgattcctacacggtgtcggcattcaggcacagtcaaaaggttgactctcagactattcccaagcacgtctttgagcacacgttccacagactggaggccggggagcagtaccagatcatgattgcctcagtcagcgggtccctgaagaatcagataaatgtggttgggcggacagttccagcatctgtccaaggagtaattgcagacaatgcatacagcagttattccttaatagtaagttggcaaaaagctgctggtgtggcagaaagatatgatatcctgcttctaactgaaaatggaatccttctgcgcaacacatcagagccagccaccactaagcaacacaaatttgaagatctaacaccaggcaagaaatacaagatacagatcctaactgtcagtggaggcctctttagcaaggaagcccagactgaaggccgaacagtcccagcagctgtcaccgacctgaggatcacagagaactccaccaggcacctgtccttccgctggaccgcctcagagggggagctcagctggtacaacatctttttgtacaacccagatgggaatctccaggagagagctcaagttgacccactagtccagagcttctctttccagaacttgctacaaggcagaatgtacaagatggtgattgtaactcacagtggggagctgtctaatgagtctttcatatttggtagaacagtcccagcctctgtgagtcatctcagggggtccaatcggaacacgacagacagcctttggttcaactggagtccagcctctggggactttgacttttatgagctgattctctataatcccaatggcacaaagaaggaaaactggaaagacaaggacctgacggagtggcggtttcaaggccttgttcctggaaggaagtacgtgctgtgggtggtaactcacagtggagatctcagcaataaagtcacagcggagagcagaacagctccaagtcctcccagtcttatgtcatttgctgacattgcaaacacatccttggccatcacgtggaaagggcccccagactggacagactacaacgactttgagctgcagtggttgcccagagatgcacttactgtcttcaacccctacaacaacagaaaatcagaaggacgcattgtgtatggtcttcgtccagggagatcctatcaattcaacgtcaagactgtcagtggtgattcctggaaaacttacagcaaaccaatttttggatctgtgaggacaaagcctgacaagatacaaaacctgcattgccggcctcagaactccacggccattgcctgttcttggatccctcctgattctgactttgatggttatagtattgaatgccggaaaatggacacccaagaagttgagttttccagaaagctggagaaagaaaaatctctgctcaacatcatgatgctagtgccccataagaggtacctggtgtccatcaaagtgcagtcggccggcatgaccagcgaggtggttgaagacagcactatcacaatgatagaccgcccccctcctccacccccacacattcgtgtgaatgaaaaggatgtgctaattagcaagtcttccatcaactttactgtcaactgcagctggttcagcgacaccaatggagctgtgaaatacttcacagtggtggtgagagaggctgatggcagtgatgagctgaagccagaacagcagcaccctctcccttcctacctggagtacaggcacaatgcctccattcgggtgtatcagactaattattttgccagcaaatgtgccgaaaatcctaacagcaactccaagagttttaacattaagcttggagcagagatggagagcttaggtggaaaacgcgatcccactcagcaaaaattctgtgatggaccactgaagccacacactgcctacagaatcagcattcgagcttttacacagctctttgatgaggacctgaaggaattcacaaagccactctattcagacacatttttttctttacccatcactactgaatcagagcccttgtttggagctattgaaggtgtgagtgctggtctgtttttaattggcatgctagtggctgttgttgccttattgatctgcagacagaaagtgagccatggtcgagaaagaccctctgcccgtctgagcattcgtagggatcgaccattatctgtccacttaaacctgggccagaaaggtaaccggaaaacttcttgtccaataaaaataaatcagtttgaagggcatttcatgaagctacaggctgactccaactaccttctatccaaggaatacgaggagttaaaagacgtgggccgaaaccagtcatgtgacattgcactcttgccggagaatagagggaaaaatcgatacaacaatatattgccctatgatgccacgcgagtgaagctctccaatgtagatgatgatccttgctctgactacatcaatgccagctacatccctggcaacaacttcagaagagaatacattgtcactcagggaccgcttcctggcaccaaggatgacttctggaaaatggtgtgggaacaaaacgttcacaacatcgtcatggtgacccagtgtgttgagaagggccgagtaaagtgtgaccattactggccagcggaccaggattccctctactatggggacctcatcctgcagatgctctcagagtccgtcctgcctgagtggaccatccgggagtttaagatatgcggtgaggaacagcttgatgcacacagactcatccgccactttcactatacggtgtggccagaccatggagtcccagaaaccacccagtctctgatccagtttgtgagaactgtcagggactacatcaacagaagcccgggtgctgggcccactgtggtgcactgcagtgctggtgtgggtaggactggaacctttattgcattggaccgaatcctccagcagttagactccaaagactctgtggacatttatggagcagtgcacgacctaagacttcacagggttcacatggtccagactgagtgtcagtatgtctacctacatcagtgtgtaagagatgtcctcagagcaagaaagctacggagtgaacaagaaaaccccttgtttccaatctatgaaaatgtgaatccagagtatcacagagatccagtctattcaaggcattgagaatgtacctgaagagctcctggataaaaattattcactgtgtgatttgtttttaaaaacttgcttcatgccctacagaggtgccagctatttctgttgatactatgtataatttattaatctggagaatgtttaaaattttatataatttaaaggtaacagatattattgtacatagttgtattttgtagtttcttctgtaaatatgtatttttcataatgtttaatattaagctttatataatactatttttccacactaaagtgttcatgacttgttctacataaaactaattcaacctgtaaa

SEQ ID NO: 13502 - DNA, 8526 bp, Homo sapiens
tggaagtatgcgagacttaagagctcaagtgactagtggtctcctgccatttccagaagtgactcttcaagcccttggagaagacgaaataacattagaatctgtgcttcgtggaaagtttgctgcagggaaaaatggacttgcttgcttggcttgtggtccacaacttgaggtagtaaactctataacaggagagcgattgtctgcttacagattcagtggagtcaatgaacagcctcctgtagttttagctgtgaaagaattctcttggcagaagagaactggattattaataggattggaagaaacagaagggagtgttctctgtctttatgaccttggaatatcaaaagtagttaaagcagttgttcttcctggaagggtaacagctattgaacctataattaatcatggaggagccagtgcaagcactcagcatttacatccaagtctgcgatggctttttggagtggcagctgtggtcactgatgttggacagatccttcttgttgacctatgtttggatgacttgtcatgcaatcaaaatgaagttgaagcatcagatcttgaagttctaactggtatcccagctgaagtaccacacattagagaaagtgtaatgagacaagggcgccatctgtgtttccagttagtaagtccaacaggaacagctgtttcaactcttagttacataagcaggacaaatcagcttgctgtaggtttttctgatggctatctagcactttggaacatgaaaagcatgaaaagagaatattacatacaattggaaagtggacaagttcctgtatatgctgtcacttttcaagaacctgagaatgatcctcggaattgctgttacttgtgggctgttcagtctacacaagatagtgaaggggatgttttgagtttgcatctgctgcagctggcctttggtaatagaaagtgtttggcatcaggacaaatcttatatgaggggttagaatactgtgaagaaagatacaccctggacctgacaggtggcatgttccctttgaggggacagacgagtaataccaaattgttgggatgccagagtatagagaaatttcgatctcatggtgacagggaggaaggcgtgaatgaagctctatcgcctgacactagtgtttcagtctttacctggcaggtgaatatatatggacagggaaagccttctgtatatttggggctttttgatataaatcgttggtatcatgcacaaatgccagattcgttaaggtcaggagaatatctacataattgctcttattttgcactgtggtcattggagtctgttgtaagtaggacttctccacatggcatcttggatatattagtacatgagagaagtttaaatagaggagtccctccttcatatccacctcccgagcagttttttaatccaagcacttataattttgatgccacttgtttgttaaactcgggagttgttcatttaacttgtactggctttcagaaggagactttgacttttttaaagaaatcaggtccatcactcaatgaactcattcctgatggttataatcgatgtcttgtagctggccttctttccccaagatttgttgatgttcagccttccagtttaagccaagaagaacagttagaagctatattgtcagcagcaattcagactagttccctgggacttttgactggttatatccgaagatggataacagaagaacaaccaaattctgccactaatttgcgctttgttcttgaatggacgtggaataaagtggttctcacaaaagaggaatttgacagactatgtgtgccattatttgatggttcgtgtcatttcatggatccacaaactatacagtctatccagcaatgctatttgcttcttagcaatcttaatatagtcttgagctgttttgcatcagaagcccgagagatcactgagagaggactgatagacttaagcaataagtttgtggtttcccacctcatctgtcagtatgcacaagtggttctttggttctctcattctgggcttttaccagaaggcatagatgattctgtgcagttgtcaaggttatgctacaactaccctgtaattcagaactactacaccagtcgtcgacagaagtttgagcgtttatcaagagggaagtggaatcccgattgcttgatgattgatggactggtttctcagttaggagagcgaattgagaagttgtggaaacgagatgaaggaggcacaggaaaatatcctcctgctagtctgcatgcagtacttgatatgtacctattagacggcgttactgaagcagccaaacactctattaccatttatttgctacttgatattatgtattcctttcccaacaaaacagacactcccattgaatctttcccaactgtatttgccatttcttggggccaagttaaacttattcaggggttttggttgatagatcataatgactatgagagtggtttggatcttttgtttcatccagctactgcaaaacctttgtcatggcaacattcaaagattattcaggcattcatgagtcagggcgagcacagacaagccctcagatatattcagacaatgaagccaacagtgtccagtggtaacgatgttatccttcacctcactgttttgctttttaataggtgtatggttgaagcctggaattttttgcggcaacattgcaataggttgaatatagaggagttactgaagcacatgtatgaagtctgtcaggaaatgggcttgatggaagatttactgaagttaccatttacagacactgagcaggaatgtttagtgaaatttttgcagtccagtgccagcgttcagaatcatgaattccttttagtgcaccatttgcagcgtgccaattatgtgcctgccttgaagctgaaccaaactctgaagattaatgttatgaatgatcgtgatcctcgtttgcgggagagatcactggctcgaaattctatattagaccagtatggaaaaatccttcctagagtccatcgaaaattagccattgaacgagctaagccttatcatctgtcaacatcatcagtttttcgattagtttctagacccaaaccattatcagcagttccaaagcaagttgtaacaggaactgtgttgacaagatctgttttcatcaacaatgtgttatctaaaattggagaagtttgggcaagcaaagaacctataaatagcaccacacctttcaatagttctaaaatagaagaaccatctcctatagtgtattcgctcccagctccagagctgcctgaggcattttttggaacaccaatttcaaaagcatcacaaaaaatttctagactgctagatttggttgttcagcctgtcccccggccttctcagtgttcggagtttattcagcaaagctccatgaaatctcctttgtacctagtatcccgttcactgccctcaagttcgcaattaaaaggatcgcctcaggccatctccagggcttcagaattacatttgcttgaaactcctcttgtagttaagaaagctaaaagtttggccatgtcagttactacttctggattttctgagttcactcctcagtccatcctgaggtctactcttcgatcaacacctttagcatctccctctccatcacctggaaggtctcctcaacgacttaaagaaactagaatttcatttgtggaagaagatgtccacccaaaatggattcctggggctgcagatgatagcaaattagaagtatttactacacctaaaaaatgtgcagttccagtggaaactgaatggctgaagagcaaagataggaccacatcttttttcctgaacagccctgaaaaggagcatcaagaaatggatgaggggtcacaaagtttagagaaactggatgtgagcaaaggaaacagcagtgtttcaatcacatccgatgagactaccttagagtatcaggatgcaccgtcaccggaagaccttgaagagactgttttcacggcctctaagcccaaaagctcttccactgcactaactactaatgtaactgaacaaactgaaaaggatggagataaagatgtatttgcatcagaagtaactccttcagacctacagaaacaaatgggcaatttagaagatgcagaaacaaaggatctcttagttgcagcagaggcattttcagaattgaatcacttaagcccggttcaaggaactgaagcttctctttgtgcaccatcagtctatgaagggaaaatcttcacccagaagtccaaggtaccagtgttggacgaaggattaacatctgttgaaacctacacccctgcaattagagcaaatgacaataaatctatggctgatgtccttggtgatggtggaaactcctcgctcactatctctgaaggtcctattgtctctgagcgcaggcttaaccaggaagtagcgctgaacttaaaagaagatcatgaagtagaagttggtgtactaaaagaaagtgttgacttaccagaagaaaagcttccaatttctgacagccctcctgatactcaagaaattcatgtgattgaacaagaaaagcttgaagctcaagattcaggagaagaggctaggaatctttcatttaatgagttatatccctctggaacacttaagcttcagtacaattttgatactattgaccaacagttttgtgacttagctgataacaaagacactgctgaatgtgacattgctgaagtagatggggaactttttgtggctcaaagcaactttaccttgatattggaaggtgaagaaggagaagttgagccaggtgattttgcatcatctgatgtgttacctaaagcagctaacacagcaactgaagaaaaacttgtatgcagtggggaaaatgataatcatggacaaattgcaaatttgccatctgccgtaactagtgaccaaaagtcccaaaaagtagacactttaccatatgtgcctgaacctattaaagtagcaattgcagaaaatttactagatgtaattaaagacacaagaagtaaagaaattacttcagatacaatggaacagtccattcatgaaacaatacctttagtgagccaaaacataatgtgtcccactaaattggtcaaatctgcatttaagactgctcaggaaacaagcacaatgactatgaatgtcagccaggttgatgacgtggtttcctccaaaactcgtacgagaggtcaacgtatccaaaacgtgaatgtcaaatcagcacaacaggaagcatcagcagatgttgctactcctaagatgccagggcagtcagtcaggaagaaaactaggaaggcaaaagaaatttctgaagcttctgaaaacatctattctgatgtcagaggactatctcagaaccagcaaatacctcaaaattctgttacgcctaggagaggaaggagaaagaaagaagttaatcaggacatactagaaaacaccagttctgtggaacaagaattacagatcactacaggtagggaatcaaaaagattaaaatcatctcagctgttggaaccagcagttgaagaaactactaaaaaagaagttaaggtttcatctgttacaaaaaggactcctagaagaattaaaagatctgtagaaaatcaggaaagtgttgaaattataaatgatctaaaagttagtacggtaacaagtcctagcagaatgatcagaaaattgagaagtactaatttagatgcttctgaaaatacaggaaataagcaagatgataaatccagtgacaagcagctgcgtattaaacatgttagaagggtcagagggagagaagttagtccatcagatgtgagagaagactccaaccttgagtcatctcagttgactgttcaagcagaatttgatatgtctgccatacctagaaaacgtggtagaccaagaaaaatcaatccatctgaagatgtaggatctaaggctgttaaggaagagagaagccccaagaagaaagaagctcccagcattagaaggagatctacaagaaataccccagctaaaagtgaaaatgttgatgttggaaaaccagctttaggaaaatccattttagtgccaaacgaggaactttcgatggtgatgagctctaagaaaaaacttacaaaaaagactgaaagtcaaagccaaaaacgttcattgcactcagtatcagaagaacgcacagatgaaatgacacataaagaaacaaatgagcaggaagaaagattgctcgccacagcttccttcactaaatcatcccgcagcagcaggactcggtctagcaaggccatcttgttgccggacctttctgaaccaaacaatgagcctttattttctccagcgtcagaagttccaaggaaagcaaaagctaaaaaaatagaggttcctgcacagctgaaagaattagtttcggatttatcttctcagtttgtcatctcacctcctgctttaaggagcagacaaaaaaacacatccaataagaacaagcttgaagatgaactgaaagatgatgcacaatcagtagaaactctgggaaagccaaaagcgaaacgaatcaggacgtcaaaaacaaaacaagcaagcaaaaacacagaaaaagaaagtgcttggtcacctcctcccatagaaattcggctgatttcccccttggctagcccagctgacggagtcaagagcaaaccaagaaaaactacagaagtgacaggaacaggtcttggaaggaacagaaagaaactgtcttcctatccaaagcaaattttacgcagaaaaatgctgtaatttcttgggaagattttaatgtacacctatttgtaaagtcatcagaatagtgtggattattaaatatctagtttggaagaaaataatttatataaattattgtaaatttttatgtaaacagaaggtcttcaataagtaaagtaactccatatggagtgattgtttcagtccaggcaatttttctattttatattaagacttcatacatttatatatgtaaatatggcttattaatggaatgttaaataaaatgtatacttcacagtcgtttgtgtcttggatttttgaaagggaggggatatctgtttaaatagttttatatgctcattggtctcattttctctataattaaaatactagaccagtcttaaaatggggatgattgaagtattgatatttctttttacagttactattttataatttatgcactttgattctgtgattcagatttctaatcagaaaatgtatttttttgtttttggctgttactatgttaaaattgaattatgggcatgtcattttgccatctttgtagtttcacaaattttgtgtaatctacctcaaatgaataatccaagtattggttaactataatgttggcatctcttattcggcaagcttaaaggctctttaaagtcttaattagtcaaagactaatccaggttagattgaccggttcactgctcacttgcaaccttatcaaagggtttgacaaagggaaatgtaaaataaatctgtttatggatattgagtgcatcttgtatgtgcctaatattgataggatgagatgtctgaacaaatttttataatattgctgtgaaggagcttgctattgaaccacagaaatcccttaatattcaggttttaaaactggcaaattctcacaggacctcaggcacagattattgaggttgggagagagtgagtagatgtagaaaaggagaaaaacaacacacgccctgttctctacagtacaactgtgtgcaattaagcaatggtacttgatgtaggctctaacactcatcaataaataagtgttgtaaaataatttataacaggtaatcgatagtgtgtaatgaatggactattaataattgattatctagaaacgaactgctttcgtgggcttttaatattttaatgtgaagcatatgcagtgtgctttctgcatttatttttctaccaaataatacagataatgagaaattggtgaaaatgcctacgcaaagtgttgacagtgtgaaagcagtgcgagtgcggccttttagtcaggttagtgatggatgttacgctgccttgttgaaaatttcactgactttgattttattacttttttaatgatagttatcaaacttgtatttaagctgcttgtcatttatggaatattgaacttatttaaatgaacttgttaaatgaataaagagctaaacataattcagtaaacaattcctttgcgcaagtagcacaataaacatggatgcaacgtatgtcaagttaatacttttttaaaccaacgcaatttggtgaatatagatgtgtggtacctgtttttaataagtgtactttttttcccccctccgtgaatgtagatcataagcaaacaaattgcctgttctaaatgaactttacatatattttaaatgaatgtatgtacttacgtataaatgtctttatatagcttgaataaaaacactgctcattaaaaaaaaaaaaaa

SEQ ID NO: 13503 - DNA, 5138 bp, Homo sapiens
gatccgcagaggagcccacttgagagcgcctcctgtcgtctgtaaggttgccttgccatccctcggcaccccaacttcccccgcccccccatcgcctcctcctccatcctccagttcaaaatggcgacggcggcggcagcggcggcggtgatggctcctccgggctgcccgggttcgtgccccaacttcgccgtagtctgctccttcttggagcgctacgggccgctgctagacctgcctgagttgccgttccctgagctggagcgggtgctgcaggcgccgccgccggacgtcggcaacggagaagtaccaaaagaattggtggagctccatttgaagctgatgaggaaaattggcaaatctgttactgcagacagatgggaaaaatatttgatcaagatatgccaagagtttaacagtacctgggcatgggagatggagaagaagggctatcttgaaatgagtgttgaatgcaaactagcactcttaaagtacctctgtgagtgtcagtttgatgacaatctcaaattcaagaatattattaatgaggaggatgccgatactatgcgtctccagccaattggtcgagacaaagatggcctcatgtactggtaccaattggatcaagatcacaatgtcagaatgtacatagaagaacaagatgatcaagatggctcttcatggaaatgcattgtcagaaatcgaaacgagttggctgagactcttgcactcctgaaagcacaaattgatcctgtactattgaaaaactctagccaacaagacaactcttctcgggaaagtcccagcttagaggatgaggagactaaaaaagaggaagaaacacctaaacaagaggaacagaaagaaagtgaaaagatgaaaagtgaggagcagcctatggatttagaaaaccgttctacagccaatgttctagaagagactactgtgaaaaaagaaaaagaagatgaaaaggaacttgtgaaactgccagtcatagtgaagctagaaaaacctttgccagaaaatgaagaaaaaaagattatcaaagaagaaagtgattccttcaaggaaaatgtcaaacccattaaagttgaggtgaaggaatgtagagcagatcctaaagataccaaaagtagcatggagaagccagtggcacaggagcctgaaaggatcgaatttggtggcaatattaaatcttctcacgaaattactgagaaatctactgaagaaactgagaaacttaaaaatgaccagcaggccaagataccactaaaaaaacgagaaattaaactgagtgatgattttgacagtccagtcaagggacctttgtgtaaatcagttactccaacaaaagagtttttgaaagatgaaataaaacaagaggaagagacttgtaaaaggatctctacaatcactgctttgggtcatgaagggaaacagctggtaaatggagaagttagtgatgaaagggtagctccaaattttaagacagaaccaatagagacaaagttttatgagacaaaggaagagagctatagcccctctaaggacagaaatatcatcacggagggaaatggaacagagtccttaaattctgtcataacaagtatgaaaacaggtgagcttgagaaagaaacagcccctttgaggaaagatgcagatagttcaatatcagtcttagagatccatagtcaaaaagcacaaatagaggaacccgatcctccagaaatggaaacttctcttgattcttctgagatggcaaaagatctctcttcaaaaactgctttatcttccaccgagtcgtgtaccatgaaaggtgaagagaagtctcccaaaactaagaaggataagcgcccaccaatcctagaatgtcttgaaaagttagagaagtccaaaaagacttttcttgataaggacgcacaaagattgagtccaataccagaagaagttccaaagagtactctagagtcagaaaagcctggctctcctgaggcagctgaaacttctccaccatctaatatcattgaccactgtgagaaactagcctcagaaaaagaagtggtagaatgccagagtacaagtactgttggtggccagtctgtgaaaaaagtagacctagaaaccctaaaagaggattctgagttcacaaaggtagaaatggataatctggacaatgcccagacctctggcatagaggagccttctgagacaaagggttctatgcaaaaaagcaaattcaaatataagttggttcctgaagaagaaaccactgcctcagaaaatacagagataacctctgaaaggcagaaagagggcatcaaattaacaatcaggatatcaagtcggaaaaagaagcccgattctccccccaaagttctagaaccagaaaacaagcaagagaagacagaaaaggaagaggagaaaacaaatgtgggtcgtactttaagaagatctccaagaatatctagacccactgcaaaagtggctgagatcagagatcagaaagctgataaaaaaagaggggaaggagaagatgaggtggaagaagagtcaacagctttgcaaaaaactgacaaaaaggaaattttgaaaaaatcagagaaagatacaaattctaaagtaagcaaggtaaaacccaaaggcaaagttcgatggactggttctcggacacgtggcagatggaaatattccagcaatgatgaaagtgaagggtctggcagtgaaaaatcatctgcagcttcagaagaggaggaagaaaaggaaagtgaagaagccatcctagcagatgatgatgaaccatgcaaaaaatgtggccttccaaaccatcctgagctaattcttctgtgtgactcttgcgatagtggataccatactgcctgccttcgccctcctctgatgatcatcccagatggagaatggttctgcccaccttgccaacataaactgctctgtgaaaaattagaggaacagttgcaggatttggatgttgccttaaagaagaaagagcgtgccgaacgaagaaaagaacgcttggtgtatgttggtatcagtattgaaaacatcattcctccacaagagccagacttttctgaagatcaagaagaaaagaaaaaagattcaaaaaaatccaaagcaaacttgcttgaaaggaggtcaacaagaacaaggaaatgtataagctacagatttgatgagtttgatgaagcaattgatgaagctattgaagatgacatcaaagaagccgatggaggaggagttggccgaggaaaagatatctccaccatcacaggtcatcgtgggaaagacatctctactattttggatgaagaaagaaaagaaaataaacgaccccagagggcagctgctgctcgaaggaagaaacgccggcgattaaatgatctggacagtgatagcaacctggatgaagaagagagcgaggatgaattcaagatcagtgatggatctcaagatgagtttgttgtgtctgatgaaaacccagatgaaagtgaagaagatccgccatctaatgatgacagtgacactgacttttgtagccgtagactgaggcgacacccctctcggccaatgaggcagagcaggcgtttgcgaagaaagaccccaaagaaaaaatattccgatgatgatgaagaggaggaatctgaggagaatagtagagactctgaaagtgacttcagtgatgattttagtgatgattttgtagaaactcggcgaaggcggtcaaggagaaatcagaaaagacaaattaactacaaagaagactcagaaagtgacggttcccagaagagtttgcgacgtggtaaagaaataaggcgagtacacaagcgaagactttccagctcagagagtgaagagagctatttgtccaagaactctgaagatgatgagctagctaaagaatcaaagcggtcagttcgaaagcggggccgaagcacagacgagtattcagaagcagatgaggaggaggaggaagaggaaggcaaaccatcccgcaaacggctacaccggattgagacggatgaggaggagagttgtgacaatgctcatggagatgcaaatcagcctgcccgtgacagccagcctagggtcctgccctcagaacaagagagcaccaagaagccctaccggatagaaagtgatgaggaagaggactttgaaaatgtaggcaaagtggggagcccattggactatagcttagtggacttaccttcaaccaatggacagagccctggcaaagccattgagaacttgattggcaagcctactgagaagtctcagacccccaaggacaacagcacagccagtgcaagcctagcctccaatgggacaagtggtgggcaggaggcaggagcaccagaagaggaggaagatgagcttttgagagtgactgaccttgttgattatgtctgtaacagtgaacagttataagactttttttccatttttgtgctaatttattccacggtagctctcacaccagcgggccagttattaaaagctgtttaatttttcctagaaaactccactacagaatgacttttagaagaaaaatttcaacaaatcctgaagtctttctgtgaagtgaccagttctgaactttgaagataaataattgctgtaaattccttttgattttctttttccaggttcatggtccttggtaatttcattcatggaaaaaaatcttattataataacaacaaagatttgtatatttttgactttatatttcctgagctctcctgactttgtgaaaaagggtggatgaaaatgcattccgaatctgtgagggcccaaaacagaatttaggggtgggtgaaagcacttgtgctttagctttttcatattaaatatatattatatttaaacattcatggcatagatgatgatttacagacaatttaaaagttcaagtctgtactgttacagtttgagaattgtagataacatcatacataagtcatttagtaacagcctttgtgaaatgaacttgtttactattggagataaccacacttaataaagaagagacagtgaaagtaccatcataattaacctaaatttttgttatagcagagtttcttgtttaaaaaaaaataaaatcatctgaaaagcaaaaa

SEQ ID NO: 13504 - DNA, 2352 bp, Homo sapiens
ctttttgcacacacacgaatacaaagagccatacgaccttcggatgccggaaggtccttctgaatcccttccctgttccttaggttgcactagtcgggggttccatgctggggggcagaaggaatgctctctaccgtctgaaaccgttcatcaggaaggccttgatttgtgatgtgctaggagagcacaggatctgcaaatagaaggcacctgtctcccttctgcaggccgaggagaggccgccatggactgtgtgcttcttcatggcttgtttactcttctttcacagaccctacagcttggggcctgggctcctctgaccatcctcattgagaaaggaaagtgagtccagagaagttgatgcttcctacctgttggagcggcccagcagtgtaagcgtggttgttactgccccatccgccatgtccttcagtgccaccattctcttctcccctcccagtggcagcgaggccagatgctgctgctgcgcctgtaagagtgagactaatggaggcaacacaggctcccagggtgggaatcctcctcccagcacccccatcacagtgactggacatggcttggctgttcagagctcagagcagctcctgcatgttatctaccagcgggtcgataaggcagtgggtttggctgaagctgctctgggtcttgccagggccaacaatgagttgttaaaacgtctccaggaggaagtgggtgacctgaggcaagggaaagtgtccatccctgatgaagatggggaaagccgggcacatagttccccacctgaggagcctgggcctctcaaggaaagtcccggggaagcctttaaggctctgtctgccgtggaagaggagtgtgacagcgtgggcagcggcgtgcaggtggtgattgaggagctgcggcagctgggagcagcctcagtggggcctgggcctttgggcttcccagcaactcagagggacatgcggctcccagggtgcacgctggctgccagcgaggcggcccccctgctcaatcctctggtggatgattacgtggcctctgagggtgcagtacagcgagttctggtccctgcttatgccaagcaactctcaccagccacacaactggcaatccagcgggcaaccccagagacaggaccagaaaatggaaccaagctgccaccaccccgccctgaggacatgctcaatgccgctgctgcgctggacagtgccttggaagagtcaggccctgggagcactggggagctgagacactctctagggctgaccgtttccccatgcaggaccagaggaagtgggcagaagaactccaggcgcaagcgggatcttgtactctctaaactggtccacaatgtgcataaccacatcaccaatgacaagagattcaatgggtctgaaagcatcaagtcctcttggaatatttcagtagtgaagtttcttctggaaaagctcaagcaagagctggtgaccagtccccacaattacactgataaggagctaaaaggagcctgtgtggcctacttccttactaagaggcgtgagtaccgcaactccctgaacccctttaaaggcctgaaggaaaaagaggagaagaaacttcgaagtcgccgatatcggctttttgccaaccgatccagtatcatgaggcattttggacctgaggaccaacgtctgtggaatgatgtgacagaggaactgatgtcagatgaagaggacagtcttaacgagccaagtgtgtgggtggcccgccctccccgtttccgggcccagcgcctcacagagctctgctaccacctggatgctaactctaagcatggcaccaaagccaaccgtgtgtatgggcctccctcagacagactgccttctgctgaagcccagctccttccaccagaactttacaatcctaatttccaagaagaggaagatgagggaggggatgagaatgcacctggctccccatcttttgaccaaccccacaaaacctgctgtcctgacttgaactcattcattgaaatcaaggtggaaaaggatgaataaaatctacagccaagaataactctggcttccgccatgccccatgtctcagaaataggtggccatggggcttcacaaaataatgagatgctctgtgcagtctgagaaagcaaatttgcctcttttcttaacacagtctctactggggaagcagaacactggtgggataaaaacttatctagaaggggagaaactccctccactgtgaacagtaagccagaatatgcttattcctcagcataaacagtatctcggagaagcctgggatgagaaaatgaggaggatgggtccaagaaacatgaggccttcttgacat

SEQ ID NO: 13505 - DNA, 3383 bp, Homo sapiens
gctgcgcgcaggccgggaacacgaggccaagagccgcagccccagccgccttggtgcagcgtacaccggcactagcccgcttgcagccccaggattagacagaagacgcgtcctcggcgcggtcgccgcccagccgtagtcacctggattacctacagcggcagctgcagcggagccagcgagaaggccaaaggggagcagcgtcccgagaggagcgcctcttttcagggaccccgccggctggcggacgcgcgggaaagcggcgtcgcgaacagagccagattgagggcccgcgggtggagagagcgacgcccgaggggatggcggcagcgtcccggagcgcctctggctgggcgctactgctgctggtggcactttggcagcagcgcgcggccggctccggcgtcttccagctgcagctgcaggagttcatcaacgagcgcggcgtactggccagtgggcggccttgcgagcccggctgccggactttcttccgcgtctgccttaagcacttccaggcggtcgtctcgcccggaccctgcaccttcgggaccgtctccacgccggtattgggcaccaactccttcgctgtccgggacgacagtagcggcggggggcgcaaccctctccaactgcccttcaatttcacctggccgggtaccttctcgctcatcatcgaagcttggcacgcgccaggagacgacctgcggccagaggccttgccaccagatgcactcatcagcaagatcgccatccagggctccctagctgtgggtcagaactggttattggatgagcaaaccagcaccctcacaaggctgcgctactcttaccgggtcatctgcagtgacaactactatggagacaactgctcccgcctgtgcaagaagcgcaatgaccacttcggccactatgtgtgccagccagatggcaacttgtcctgcctgcccggttggactggggaatattgccaacagcctatctgtctttcgggctgtcatgaacagaatggctactgcagcaagccagcagagtgcctctgccgcccaggctggcagggccggctgtgtaacgaatgcatcccccacaatggctgtcgccacggcacctgcagcactccctggcaatgtacttgtgatgagggctggggaggcctgttttgtgaccaagatctcaactactgcacccaccactccccatgcaagaatggggcaacgtgctccaacagtgggcagcgaagctacacctgcacctgtcgcccaggctacactggtgtggactgtgagctggagctcagcgagtgtgacagcaacccctgtcgcaatggaggcagctgtaaggaccaggaggatggctaccactgcctgtgtcctccgggctactatggcctgcattgtgaacacagcaccttgagctgcgccgactccccctgcttcaatgggggctcctgccgggagcgcaaccagggggccaactatgcttgtgaatgtccccccaacttcaccggctccaactgcgagaagaaagtggacaggtgcaccagcaacccctgtgccaacgggggacagtgcctgaaccgaggtccaagccgcatgtgccgctgccgtcctggattcacgggcacctactgtgaactccacgtcagcgactgtgcccgtaacccttgcgcccacggtggcacttgccatgacctggagaatgggctcatgtgcacctgccctgccggcttctctggccgacgctgtgaggtgcggacatccatcgatgcctgtgcctcgagtccctgcttcaacagggccacctgctacaccgacctctccacagacacctttgtgtgcaactgcccttatggctttgtgggcagccgctgcgagttccccgtgggcttgccgcccagcttcccctgggtggccgtctcgctgggtgtggggctggcagtgctgctggtactgctgggcatggtggcagtggctgtgcggcagctgcggcttcgacggccggacgacggcagcagggaagccatgaacaacttgtcggacttccagaaggacaacctgattcctgccgcccagcttaaaaacacaaaccagaagaaggagctggaagtggactgtggcctggacaagtccaactgtggcaaacagcaaaaccacacattggactataatctggccccagggcccctggggcgggggaccatgccaggaaagtttccccacagtgacaagagcttaggagagaaggcgccactgcggttacacagtgaaaagccagagtgtcggatatcagcgatatgctcccccagggactccatgtaccagtctgtgtgtttgatatcagaggagaggaatgaatgtgtcattgccacggaggtataaggcaggagcctacctggacatccctgctcagccccgcggctggaccttccttctgcattgtttacattgcatcctggatgggacgtttttcatatgcaacgtgctgctctcaggaggaggagggaatggcaggaaccggacagactgtgaacttgccaagagatgcaatacccttccacacctttgggtgtctgtctggcatcagattggcagctgcaccaaccagaggaacagaagagaagagagatgccactgggcactgccctgccagtagtggccttcagggggctccttccggggctccggcctgttttccagagagagtggcagtagccccatggggcccggagctgctgtggcctccactggcatccgtgtttccaaaagtgcctttggcccaggctccacggcgacagttgggcccaaatcagaaaggagagagggggccaatgagggcagggcctcctgtgggctggaaaaccactgggtgcgtctcttgctggggtttgccctggaggtgaggtgagtgctcgagggaggggagtgctttctgccccatgcctccaactactgtatgcaggcctggctctctggtctaggccctttgggcaagaatgtccgtctacccggcttccaccaccctctggccctgggcttctgtaagcagacaggcagagggcctgcccctcccaccagccaagggtgccaggcctaactggggcactcagggcagtgtgttggaaattccactgagggggaaatcaggtgctgcggccgcctgggccctttcctccctcaagcccatctccacaacctcgagcctgggctctggtccactactgccccagaccaccctcaaagctggtcttcagaaatcaataatatgagtttttattttgtttttttttttttttttgtagtttattttggagtctagtatttcaataatttaagaatcagaagcactgacctttctacattttataacattattttgtatataat

SEQ ID NO: 13506 - DNA, 5418 bp, Homo sapiens
aaagcaaaagaattcgctgcgtttccatgaaatcctgcggagtgtcgctcgctaccgccgccgctgccgccgccgctttcggtgatgaggaaaagaaaatggcggcgggaaaagcgagcggcgagagcgaggaggcgtcccccagcctgacagccgaggagagggaggcgctcggcggactggacagccgcctctttgggttcgtgagatttcatgaagatggcgccaggacgaaggccctactgggcaaggctgttcgctgctatgaatctctaatcttaaaagctgaaggaaaagtggagtctgatttcttttgtcaattaggtcacttcaacctcttattggaagattatccaaaagcattatctgcataccagaggtactacagtttacagtctgactactggaagaatgctgcctttttatatggtcttggtttggtctacttccattataatgcatttcagtgggcaattaaagcatttcaggaggtgctttatgttgatcccagcttttgtcgagccaaggaaattcatttacgagttgggcttatgttcaaagtgaacacagactatgagtctagtttaaagcattttcagttagctttggttgactgtaatccctgcactttgtccaatgctgaaattcaatttcacattgcccacttatatgaaacccagaggaaatatcattctgcaaaagaagcttatgaacaacttttgcagacagagaatctttctgcacaagtaaaagcaactgtcttacaacagttaggttggatgcatcacactgtagatctcctgggagataaagccaccaaggaaagctatgctattcagtatctccaaaagtccttggaagcagatcctaattctggccagtcctggtatttcctcggaaggtgctattcaagtattgggaaagttcaggatgcctttatatcttacaggcagtctattgataaatcagaagcaagtgcagatacatggtgttcaataggtgtgctatatcagcagcaaaatcagcccatggatgctttacaggcctatatttgtgctgtacaattggaccatggccatgctgcagcctggatggacctaggcactctctatgaatcctgcaaccagcctcaggatgccattaaatgctacttaaatgcaactagaagcaaaagttgtagtaatacctctgcacttgcagcacgaattaagtatttacaggctcagttgtgtaaccttccacaaggtagtctacagaataaaactaaattacttcctagtattgaggaggcgtggagcctaccaattcccgcagagcttacctccaggcagggtgccatgaacacagcacagcagaatacttctgacaattggagtggtggacatgctgtgtcacatcctccagtacagcaacaagctcattcatggtgtttgacaccacagaaattacagcatttggaacagctccgcgcaaatagaaataatttaaatccagcacagaaactgatgctggaacagctggaaagtcagtttgtcttaatgcaacaacaccaaatgagaccaacaggagttgcacaggtacgatctactggaattcctaatgggccaacagctgactcatcactgcctacaaactcagtctctggccagcagccacagcttgctctgaccagagtgcctagcgtctctcagcctggagtccgtcctgcctgccctgggcagcctttggccaatggacccttttctgcaggccatgttccctgtagcacatcaagaacgcggggaagtacagacactattttgataggcaataatcatataacaggaaatggaagtaatggaaacgtgccttacctgcagcgaaacgcactcactctacctcataaccgcacaaacctgaccagcagcgcaaaggagccgtggaaaaaccaactatctaactccactcaggggcttcacaaaggtcagagttcacattcggcaggtcctaatggtgaacgacctctctcttccactgggccttcccagcatctccaggcagctggctctggtattcagaatcagaacggacatcccaccctgcctagcaattcagtaacacagggggctgctctcaatcacctctcctctcacactgctacctcaggtggacaacaaggcattaccttaaccaaagagagcaagccttcaggaaacatattgacggtgcctgaaacaagcaggcacactggagagacacctaacagcactgccagtgtcgagggacttcctaatcatgtccatcagatgacggcagatgctgtttgcagtcctagccatggagattctaagtcaccaggtttactaagttcagacaatcctcagctctctgccttgttgatgggaaaagccaataacaatgtgggtactggaacctgtgacaaagtcaataacatccacccagctgttcatacaaagactgataactctgttgcctcttcaccatcttcagccatttcaacagcaacaccttctccaaaatccactgagcagacaaccacaaacagtgttaccagccttaacagccctcacagtgggctacacacaattaatggagaagggatggaagaatctcagagccccatgaaaacagatctgcttctggttaaccacaaacctagtccacagatcataccatcaatgtctgtgtccatataccccagctcagcagaagttctgaaggcatgcaggaatctaggtaaaaatggcttatctaacagtagcattttgttggataaatgtccacctccaagaccaccatcttcaccataccctcccttgccaaaggacaagttgaatccacctacacctagtatttacttggaaaataaacgtgatgctttctttcctccattacatcaattttgtacaaatccgaacaaccctgttacagtaatacgtggccttgctggagctcttaagttagacctgggacttttctctactaaaactttggtggaagctaacaatgaacatatggtagaagtgaggacacagttgttgcagccagcagatgaaaactgggatcccactggaacaaagaaaatctggcattgtgaaagtaatagatctcatactacaattgctaaatatgcacagtaccaggcctcctcattccaggaatcattgagagaagaaaatgaaaaaagaagtcatcataaagaccactcagatagtgaatctacatcgtcagataattctgggaggaggaggaaaggaccctttaaaaccataaagtttgggaccaatattgacctatctgatgacaaaaagtggaagttgcagctacatgagctgactaaacttcctgcttttgtgcgtgtcgtatcagcaggaaatcttctaagccatgttggtcataccatattgggcatgaacacagttcaactatacatgaaagttccagggagcagaacaccaggtcatcaggaaaataacaacttctgttcagttaacataaatattggcccaggtgactgtgaatggtttgttgttcctgaaggttactggggtgttttgaatgacttctgtgaaaaaaataatttgaatttcctaatgggttcttggtggcccaatcttgaagatctttatgaagcaaatgttccagtgtataggtttattcagcgacctggagatttggtctggataaatgcaggcactgttcattgggttcaggctattggctggtgcaacaacattgcttggaatgttggtccacttacagcctgccagtataaattggcagtggaacggtacgaatggaacaaattgcaaagtgtgaagtcaatagtacccatggttcatctttcctggaatatggcacgaaatatcaaggtctcagatccaaagctttttgaaatgattaagtattgtcttctaagaactctgaagcaatgtcagacattgagggaagctctcattgctgcaggaaaagagattatatggcatgggcggacaaaagaagaaccagctcattactgtagcatttgtgaagtggaggtttttgatctgctttttgtcactaatgagagtaattcacgaaagacctacatagtacattgccaagattgtgcacgaaaaacaagcggaaacttggaaaactttgtggtgctagaacagtacaaaatggaggacctgatgcaagtctatgaccaatttacattagctcctccattaccatccgcctcatcttgatattgttccatggacattaaatgagaccttttctgctattcaggaaataacccagttctgcaccactggtttttgtagctatctcgtaaggctgctggctgaaaactgtgtctatgcaaccttccaagtgcggagtgtcaaccaactggacgggagagagtactgctcctactccaggactctcacaaagctgatgagctgtacttcagaaaaaaataataatttccatgttttgtatatatctgacaaaactggcaacatcttacagactactgacttgaagacaacctcttttatatttctctatttctgggctgatgaatttgttttcatctgtcttttcccccttcagaattttccttggaaaaaaaatactagcctagctggtcatttctttgtaaggtagttagcaattttaagtctttctttggtcaacttttttttaatgtgaaaagttaggtaagacacttttttactgcttttatgtttttctgtcttgttttgagaccatgatggttacacttttggttcctaaataaaatttaaaaaattaacagccaagtcacaaaggtaatggattgcacatagactaaggaataaacttcagatttgtgatttttgtttctaatcttgatgtaaatttacactattataatacatatttattgcttgaaaatatttgtgaatggaatgctgttattttttccagatttacctgccattgaaattttaaggagttctgtaatttcaaacactactcctattacattttctatgtgtaaataaaactgcttagcattgtacagaaacttttattaaaattgtttaatgtttaaagagtttctattgtttgagtttaaaaaagactttatgtacagtgcccagttttgttcattttgaaatctgataaatatatttatatatacttatgtatgtatatataatatatatagaaatctggatatatatgtataaatctttagaacttaaatttttctcgtttagttcacatctatggtagatttttgaggtgtctactgtaaagtattgcttacaaaaagtatgattatttttaaagaaatatatatggtatgtatcctcaagacctaaaatgtcagactggtttattgttaagttgcaattactgcaatgacagaccaataaacaattgctgccaaaaaaaaaa

SEQ ID NO: 13507 - DNA, 2161 bp, Homo sapiens
ggaggagctgttttgcggcgggcggagctgcaggctgggcagggcttagcctgtgcgcttctgctggcctccttttcgccctcccacccgcactgcagtctccagcctgagccatgggccgccgagccctcctgctcctgcttctgtcttttctggcgccctgggccaccatagccctccggccggccttaagggccctcggcagcctacacttgccaaccaaccccacatccctcccggctgtagccaagaactattcggttctctacttccaacagaaggttgatcattttggatttaatactgtgaaaacttttaatcagcggtacctagtagctgataaatactggaagaaaaatggtggatcaatacttttctacactggtaatgaaggggacattatctggttttgtaataacacggggttcatgtgggatgtggctgaggaactgaaagctatgttggtgtttgctgaacatcgatactatggagagtctctcccctttggtgacaactcattcaaggattccagacacttgaatttcctgacatcagaacaagctctggctgattttgcagagttaatcaaacacttgaaaagaacaatcccaggagctgaaaatcaacctgtcattgccataggaggctcctatggtggcatgcttgccgcctggtttaggatgaaatatcctcatatggtagttggagctcttgcagcttctgcccctatctggcagtttgaggatttagtaccttgtggtgtatttatgaagatcgtaactacagattttaggaaaagcggtccacattgttcagagagcatccacaggtcctgggatgccattaatcgactctcaaatactggcagtggtttgcagtggcttactggagcccttcacttatgcagcccattaacttctcaggacatccaacatttgaaagactggatctctgaaacctgggtgaatctggcaatggtggactatccttatgcctctaactttttacagcctttgcctgcttggcctatcaaggtagtgtgccagtatttgaaaaatcccaatgtatctgattcactgctgctgcagaatattttccaagctctgaatgtatattacaattattcgggccaggtgaaatgcctgaatatttcagagacagcaactagcagtctgggaacactgggttggagctatcaggcctgcacagaagtagtcatgcccttttgtactaatggtgtcgatgacatgtttgaacctcactcatggaacttaaaggaactttctgatgactgttttcaacagtggggtgtgagaccaaggccctcctggatcactactatgtatggaggcaaaaacattagttcacacacaaacattgttttcagcaatggtgaactagacccctggtcaggaggtggagtaactaaggatatcacagacactctggttgcagtcaccatctcagagggggcccaccacttagatctccgcaccaagaatgccttggatcctatgtctgtgctgttagcccgctccttggaagttagacatatgaagaattggatcagagatttctatgacagtgcgggaaagcagcactgagaaacttttgattgttttcaatttcttcttttatgttcacaccaccacattcccattcactttgattttctacatgtaattaccttcttttgtttatcattagatttgatggggccaaagttgagatagaatagagggtgatgacggtaagagcaagtgtcccatgaatgtgatttcctgggttctcactgtctttgcaccacgtctaggaagaatcttcttgatagctctcccacaccatcagtggccctcataactggagtagagttcctggttgcttttcataagagggagagttactttctttgtatctctgcaagcagagatttctctttggttttgaggttgaagtgtctttggcccatttgtaagtccccatccctaccctacacaaagtaaaagcagaagatagataaaaaatgatgtaattgcagctggtaggatgtctggtgccaatccaggaagtgagagccatttcttttgtaccggatttaatgactttgaactgtgctgtaaataaataatacagctggaccttaaaaaaaaaaaaaaaaaaa

SEQ ID NO: 13508 - DNA, 11185 bp, Homo sapiens
gctgccccgagcctttctggggaagaactccaggcgtgcggacgcaacagccgagaacattaggtgttgtggacaggagctgggaccaagatcttcggccagccccgcatcctcccgcatcttccagcaccgtcccgcaccctccgcatccttccccgggccaccacgcttcctatgtgacccgcctgggcaacgccgaacccagtcgcgcagcgctgcagtgaattttccccccaaactgcaataagccgccttccaaggccaagatgttcataaatataaagagcatcttatggatgtgttcaaccttaatagtaacccatgcgctacataaagtcaaagtgggaaaaagcccaccggtgaggggctccctctctggaaaagtcagcctaccttgtcatttttcaacgatgcctactttgccacccagttacaacaccagtgaatttctccgcatcaaatggtctaagattgaagtggacaaaaatggaaaagatttgaaagagactactgtccttgtggcccaaaatggaaatatcaagattggtcaggactacaaagggagagtgtctgtgcccacacatcccgaggctgtgggcgatgcctccctcactgtggtcaagctgctggcaagtgatgcgggtctttaccgctgtgacgtcatgtacgggattgaagacacacaagacacggtgtcactgactgtggatggggttgtgtttcactacagggcggcaaccagcaggtacacactgaattttgaggctgctcagaaggcttgtttggacgttggggcagtcatagcaactccagagcagctctttgctgcctatgaagatggatttgagcagtgtgacgcaggctggctggctgatcagactgtcagatatcccatccgggctcccagagtaggctgttatggagataagatgggaaaggcaggagtcaggacttatggattccgttctccccaggaaacttacgatgtgtattgttatgtggatcatctggatggtgatgtgttccacctcactgtccccagtaaattcaccttcgaggaggctgcaaaagagtgtgaaaaccaggatgccaggctggcaacagtgggggaactccaggcggcatggaggaacggctttgaccagtgcgattacgggtggctgtcggatgccagcgtgcgccaccctgtgactgtggccagggcccagtgtggaggtggtctacttggggtgagaaccctgtatcgttttgagaaccagacaggcttccctccccctgatagcagatttgatgcctactgctttaaacctaaagaggctacaaccatcgatttgagtatcctcgcagaaactgcatcacccagtttatccaaagaaccacaaatggtttctgatagaactacaccaatcatccctttagttgatgaattacctgtcattccaacagagttccctcccgtgggaaatattgtcagttttgaacagaaagccacagtccaacctcaggctatcacagatagtttagccaccaaattacccacacctactggcagtaccaagaagccctgggatatggatgactactcaccttctgcttcaggacctcttggaaagctagacatatcagaaattaaggaagaagtgctccagagtacaactggcgtctctcattatgctacggattcatgggatggtgtcgtggaagataaacaaacacaagaatcggttacacagattgaacaaatagaagtgggtcctttggtaacatctatggaaatcttaaagcacattccttccaaggaattccctgtaactgaaacaccattggtaactgcaagaatgatcctggaatccaaaactgaaaagaaaatggtaagcactgtttctgaattggtaaccacaggtcactatggattcaccttgggagaagaggatgatgaagacagaacacttacagttggatctgatgagagcaccttgatctttgaccaaattcctgaagtcattacggtgtcaaagacttcagaagacaccatccacactcatttagaagacttggagtcagtctcagcatccacaactgtttcccctttaattatgcctgataataatggatcatccatggatgactgggaagagagacaaactagtggtaggataacggaagagtttcttggcaaatatctgtctactacaccttttccatcacagcatcgtacagaaatagaattgtttccttattctggtgataaaatattagtagagggaatttccacagttatttatccttctctacaaacagaaatgacacatagaagagaaagaacagaaacactaataccagagatgagaacagatacttatacagatgaaatacaagaagagatcactaaaagtccatttatgggaaaaacagaagaagaagtcttctctgggatgaaactctctacatctctctcagagccaattcatgttacagagtcttctgtggaaatgaccaagtcttttgatttcccaacattgataacaaagttaagtgcagagccaacagaagtaagagatatggaggaagactttacagcaactccaggtactacaaaatatgatgaaaatattacaacagtgcttttggcccatggtactttaagtgttgaagcagccactgtatcaaaatggtcatgggatgaagataatacaacatccaagcctttagagtctacagaaccttcagcctcttcaaaattgccccctgccttactcacaactgtggggatgaatggaaaggataaagacatcccaagtttcactgaagatggagcagatgaatttactcttattccagatagtactcaaaagcagttagaggaggttactgatgaagacatagcagcccatggaaaattcacaattagatttcagccaactacatcaactggtattgcagaaaagtcaactttgagagattctacaactgaagaaaaagttccacctatcacaagcactgaaggccaagtttatgcaaccatggaaggaagtgctttgggtgaagtagaagatgtggacctctctaagccagtatctactgttccccaatttgcacacacttcagaggtggaaggattagcatttgttagttatagtagcacccaagagcctactacttatgtagactcttcccataccattcctctttctgtaattcccaagacagactggggagtgttagtaccttctgttccatcagaagatgaagttctaggtgaaccctctcaagacatacttgtcattgatcagactcgccttgaagcgactatttctccagaaactatgagaacaacaaaaatcacagagggaacaactcaggaagaattcccttggaaagaacagactgcagagaaaccagttcctgctctcagttctacagcttggactcccaaggaggcagtaacaccactggatgaacaagagggcgatggatcagcatatacagtctctgaagatgaattgttgacaggttctgagagggtcccagttttagaaacaactccagttggaaaaattgatcacagtgtgtcttatccaccaggtgctgtaactgagcacaaagtgaaaacagatgaagtggtaacactaacaccacgcattgggccaaaagtatctttaagtccagggcctgaacaaaaatatgaaacagaaggtagtagtacaacaggatttacatcatctttgagtccttttagtacccacattacccagcttatggaagaaaccactactgagaaaacatccctagaggatattgatttaggctcaggattatttgaaaagcccaaagccacagaactcatagaattttcaacaatcaaagtcacagttccaagtgatattaccactgccttcagttcagtagacagacttcacacaacttcagcattcaagccatcttccgcgatcactaagaaaccacctctcatcgacagggaacctggtgaagaaacaaccagtgacatggtaatcattggagaatcaacatctcatgttcctcccactacccttgaagatattgtagccaaggaaacagaaaccgatattgatagagagtatttcacgacttcaagtcctcctgctacacagccaacaagaccacccactgtggaagacaaagaggcctttggacctcaggcgctttctacgccacagcccccagcaagcacaaaatttcaccctgacattaatgtttatattattgaggtcagagaaaataagacaggtcgaatgagtgatttgagtgtaattggtcatccaatagattcagaatctaaagaagatgaaccttgtagtgaagaaacagatccagtgcatgatctaatggctgaaattttacctgaattccctgacataattgaaatagacctataccacagtgaagaaaatgaagaagaagaagaagagtgtgcaaatgctactgatgtgacaaccaccccatctgtgcagtacataaatgggaagcatctcgttaccactgtgcccaaggacccagaagctgcagaagctaggcgtggccagtttgaaagtgttgcaccttctcagaatttctcggacagctctgaaagtgatactcatccatttgtaatagccaaaacggaattgtctactgctgtgcaacctaatgaatctacagaaacaactgagtctcttgaagttacatggaagcctgagacttaccctgaaacatcagaacatttttcaggtggtgagcctgatgttttccccacagtcccattccatgaggaatttgaaagtggaacagccaaaaaaggggcagaatcagtcacagagagagatactgaagttggtcatcaggcacatgaacatactgaacctgtatctctgtttcctgaagagtcttcaggagagattgccattgaccaagaatctcagaaaatagcctttgcaagggctacagaagtaacatttggtgaagaggtagaaaaaagtacttctgtcacatacactcccactatagttccaagttctgcatcagcatatgtttcagaggaagaagcagttaccctaataggaaatccttggccagatgacctgttgtctaccaaagaaagctgggtagaagcaactcctagacaagttgtagagctctcagggagttcttcgattccaattacagaaggctctggagaagcagaagaagatgaagatacaatgttcaccatggtaactgatttatcacagagaaatactactgatacactcattactttagacactagcaggataatcacagaaagcttttttgaggttcctgcaaccaccatttatccagtttctgaacaaccttctgcaaaagtggtgcctaccaagtttgtaagtgaaacagacacttctgagtggatttccagtaccactgttgaggaaaagaaaaggaaggaggaggagggaactacaggtacggcttctacatttgaggtatattcatctacacagagatcggatcaattaattttaccctttgaattagaaagtccaaatgtagctacatctagtgattcaggtaccaggaaaagttttatgtccttgacaacaccaacacagtctgaaagggaaatgacagattctactcctgtctttacagaaacaaatacattagaaaatttgggggcacagaccactgagcacagcagtatccatcaacctggggttcaggaagggctgaccactctcccacgtagtcctgcctctgtctttatggagcagggctctggagaagctgctgccgacccagaaaccaccactgtttcttcattttcattaaacgtagagtatgcaattcaagccgaaaaggaagtagctggcactttgtctccgcatgtggaaactacattctccactgagccaacaggactggttttgagtacagtaatggacagagtagttgctgaaaatataacccaaacatccagggaaatagtgatttcagagcgattaggagaaccaaattatggggcagaaataaggggcttttccacaggttttcctttggaggaagatttcagtggtgactttagagaatactcaacagtgtctcatcccatagcaaaagaagaaacggtaatgatggaaggctctggagatgcagcatttagggacacccagacttcaccatctacagtacctacttcagttcacatcagtcacatatctgactcagaaggacccagtagcaccatggtcagcacttcagccttcccctgggaagagtttacatcctcagctgagggctcaggtgagcaactggtcacagtcagcagctctgttgttccagtgcttcccagtgctgtgcaaaagttttctggtacagcttcctccattatcgacgaaggattgggagaagtgggtactgtcaatgaaattgatagaagatccaccattttaccaacagcagaagtggaaggtacgaaagctccagtagagaaggaggaagtaaaggtcagtggcacagtttcaacaaactttccccaaactatagagccagccaaattatggtctaggcaagaagtcaaccctgtaagacaagaaattgaaagtgaaacaacatcagaggaacaaattcaagaagaaaagtcatttgaatcccctcaaaactctcctgcaacagaacaaacaatctttgattcacagacatttactgaaactgaactcaaaaccacagattattctgtactaacaacaaagaaaacttacagtgatgataaagaaatgaaggaggaagacacttctttagttaacatgtctactccagatccagatgcaaatggcttggaatcttacacaactctccctgaagctactgaaaagtcacattttttcttagctactgcattagtaactgaatctataccagctgaacatgtagtcacagattcaccaatcaaaaaggaagaaagtacaaaacattttccgaaaggcatgagaccaacaattcaagagtcagatactgagctcttattctctggactgggatcaggagaagaagttttacctactctaccaacagagtcagtgaattttactgaagtggaacaaatcaataacacattatatccccacacttctcaagtggaaagtacctcaagtgacaaaattgaagactttaacagaatggaaaatgtggcaaaagaagttggaccactcgtatctcaaacagacatctttgaaggtagtgggtcagtaaccagcacaacattaatagaaattttaagtgacactggagcagaaggacccacggtggcacctctccctttctccacggacatcggacatcctcaaaatcagactgtcaggtgggcagaagaaatccagactagtagaccacaaaccataactgaacaagactctaacaagaattcttcaacagcagaaattaacgaaacaacaacctcatctactgattttctggctagagcttatggttttgaaatggccaaagaatttgttacatcagcaccaaaaccatctgacttgtattatgaaccttctggagaaggatctggagaagtggatattgttgattcatttcacacttctgcaactactcaggcaaccagacaagaaagcagcaccacatttgtttctgatgggtccctggaaaaacatcctgaggtgccaagcgctaaagctgttactgctgatggattcccaacagtttcagtgatgctgcctcttcattcagagcagaacaaaagctcccctgatccaactagcacactgtcaaatacagtgtcatatgagaggtccacagacggtagtttccaagaccgtttcagggaattcgaggattccaccttaaaacctaacagaaaaaaacccactgaaaatattatcatagacctggacaaagaggacaaggatttaatattgacaattacagagagtaccatccttgaaattctacctgagctgacatcggataaaaatactatcatagatattgatcatactaaacctgtgtatgaagacattcttggaatgcaaacagatatagatacagaggtaccatcagaaccacatgacagtaatgatgaaagtaatgatgacagcactcaagttcaagagatctatgaggcagctgtcaacctttctttaactgaggaaacatttgagggctctgctgatgttctggctagctacactcaggcaacacatgatgaatcaatgacttatgaagatagaagccaactagatcacatgggctttcacttcacaactgggatccctgctcctagcacagaaacagaattagacgttttacttcccacggcaacatccctgccaattcctcgtaagtctgccacagttattccagagattgaaggaataaaagctgaagcaaaagccctggatgacatgtttgaatcaagcactttgtctgatggtcaagctattgcagaccaaagtgaaataataccaacattgggccaatttgaaaggactcaggaggagtatgaagacaaaaaacatgctggtccttcttttcagccagaattctcttcaggagctgaggaggcattagtagaccatactccctatctaagtattgctactacccaccttatggatcagagtgtaacagaggtgcctgatgtgatggaaggatccaatcccccatattacactgatacaacattagcagtttcaacatttgcgaagttgtcttctcagacaccatcatctcccctcactatctactcaggcagtgaagcctctggacacacagagatcccccagcccagtgctctgccaggaatagacgtcggctcatctgtaatgtccccacaggattcttttaaggaaattcatgtaaatattgaagcaactttcaaaccatcaagtgaggaataccttcacataactgagcctccctctttatctcctgacacaaaattagaaccttcagaagatgatggtaaacctgagttattagaagaaatggaagcttctcccacagaacttattgctgtggaaggaactgagattctccaagatttccaaaacaaaaccgatggtcaagtttctggagaagcaatcaagatgtttcccaccattaaaacacctgaggctggaactgttattacaactgccgatgaaattgaattagaaggtgctacacagtggccacactctacttctgcttctgccacctatggggtcgaggcaggtgtggtgccttggctaagtccacagacttctgagaggcccacgctttcttcttctccagaaataaaccctgaaactcaagcagctttaatcagagggcaggattccacgatagcagcatcagaacagcaagtggcagcgagaattcttgattccaatgatcaggcaacagtaaaccctgtggaatttaatactgaggttgcaacaccaccattttcccttctggagacttctaatgaaacagatttcctgattggcattaatgaagagtcagtggaaggcacggcaatctatttaccaggacctgatcgctgcaaaatgaacccgtgccttaacggaggcacctgttatcctactgaaacttcctacgtatgcacctgtgtgccaggatacagcggagaccagtgtgaacttgattttgatgaatgtcactctaatccctgtcgtaatggagccacttgtgttgatggttttaacacattcaggtgcctctgccttccaagttatgttggtgcactttgtgagcaagataccgagacatgtgactatggctggcacaaattccaagggcagtgctacaaatactttgcccatcgacgcacatgggatgcagctgaacgggaatgccgtctgcagggtgcccatctcacaagcatcctgtctcacgaagaacaaatgtttgttaatcgtgtgggccatgattatcagtggataggcctcaatgacaagatgtttgagcatgacttccgttggactgatggcagcacactgcaatacgagaattggagacccaaccagccagacagcttcttttctgctggagaagactgtgttgtaatcatttggcatgagaatggccagtggaatgatgttccctgcaattaccatctcacctatacgtgcaagaaaggaacagttgcttgcggccagccccctgttgtagaaaatgccaagacctttggaaagatgaaacctcgttatgaaatcaactccctgattagataccactgcaaagatggtttcattcaacgtcaccttccaactatccggtgcttaggaaatggaagatgggctatacctaaaattacctgcatgaacccatctgcataccaaaggacttattctatgaaatactttaaaaattcctcatcagcaaaggacaattcaataaatacatccaaacatgatcatcgttggagccggaggtggcaggagtcgaggcgctgatccctaaaatggcgaacatgtgttttcatcatttcagccaaagtcctaacttcctgtgcctttcctatcacctcgagaagtaattatcagttggtttggatttttggaccaccgttcagtcattttgggttgccgtgctcccaaaacattttaaatgaaagtattggcattcaaaaagacagcagacaaaatgaaagaaaatgagagcagaaagtaagcatttccagcctatctaatttctttagttttctatttgcctccagtgcagtccatttcctaatgtataccagcctactgtactatttaaaatgctcaatttcagcaccgatggccatgtaaataagatgatttaatgttgattttaatcctgtatataaaataaaaagtcacaatgagtttgggcatatttaatgatgattatggagccttagaggtctttaatcattggttcggctgcttttatgtagtttaggctggaaatggtttcacttgctctttgactgtcagcaagactgaagatggcttttcctggacagctagaaaacacaaaatcttgtaggtcattgcacctatctcagccataggtgcagtttgcttctacatgatgctaaaggctgcgaatgggatcctgatggaactaaggactccaatgtcgaactcttctttgctgcattcctttttcttcacttacaagaaaggcctgaatggaggacttttctgtaaccagg

SEQ ID NO: 13509 - DNA, 4723 bp, Homo sapiens
atatgacttgcccatttgtgaatttggctccccaactcctcgcttcacttcacctgtgcctccctggtccgcgcacttcgcaggcgcccgcccgcctctcggccacctctgcagcctgccaggcacctcctcttgcgctctcgctgatttcgcccacccacctccctccaccccgtgccacgttggtttgggtggctgctccgcaccgggttcctcctcctctcctctttccctccagtccttcttattctcttcctctggctgcggtggctgctgctgctgctggttttcatccagttgggaaacccaggaagccggcggctgctccgtggcgctagtccagcacgcccagggttaaaagcctcgcgcccttccgcggagactcccaggaacacccgaagaactcttccacctgcagcccccttttgcctggcagttctgcattgcatctcatggaagtggaaacaggaaaataaaaatgttcaaactccttggatgttgggataaactcacctgaacccacttgggttcgggctgcctccttctcttccttcattgccacctttcctctgtgtggctcccgggagtgtgcggttaagtcatcagactcgaagtgcctagagatccggaggaagccgcgccggtcttcccctgacatgcgtggcatgccggggctccgtaggaggtttgctatacctgggaggaccctggcattctaaatttcagctccgggaaagagaaggggctttttgccttttatcttttttttttctttctttaagtagtaattttttaactgattcattgtttggaaagcgcatattgcttccctcttccccgaattctggcaactcttcctcctgctatgatgggcccttgggcatcatgaacttcattactcctcactggctggaattcaaactgcccatctgtagtggtcccgtgcgttgaccatgcacctgagaatccacgcgagacggagccctcctcgccggccggcctggacgcttgggatctggttcctgttctggggatgtatcgtcagctctgtatggagttcttctaatgtagcttcctcctcctccacctcttcctcgccggggtctcactctcagcacgagcaccatttccatggcagcaagcatcactcagtgcctatttctatctatcgttcccctgtttcccttcgaggaggacacgctggcgctacgtacatctttgggaaaagtggtgggcttatcctctacacctggccagccaatgacaggcccagcacgcggtctgaccgccttgccgtgggcttcagcaccactgtgaaggatggcatcttggtccgcatcgacagtgctccaggacttggtgacttcctccagcttcacatagaacaggggaaaattggagttgtcttcaacattggcacagttgacatctccatcaaagaggagagaacccctgtaaatgacggcaaataccatgtggtacgcttcaccaggaacggcggcaacgccaccctgcaggtggacaactggccagtgaatgaacattatcctacaggccggcagttaaccatcttcaacactcaggcgcaaatagccattggtggaaaggacaaaggacgcctcttccaaggccaactctctgggctctattatgatggtttgaaagtactgaacatggcggctgagaacaaccccaatattaaaatcaatggaagtgttcggctggttggagaagtcccatcaattttgggaacaacacagacgacctccatgccaccagaaatgtctactactgtcatggaaaccactactacaatggcgactaccacaacccgtaagaatcgctctacagccagcattcagccaacatcagatgatcttgtttcatctgctgaatgttcaagtgatgatgaagactttgttgaatgtgagccgagtacaggtaggtcagcaaaccccacggagccgggaatcagacgggttccgggggcctcagaggtgatccgggagtcgagcagcacaacagggatggtcgtcggcattgtggctgctgccgccctctgcatcttgatcctcctgtacgccatgtacaagtacaggaacagggacgaggggtcctatcaagtggacgagacgcggaactacatcagcaactccgcccagagcaacggcacgctcatgaaggagaagcagcagagctcgaagagcggccacaagaaacagaaaaacaaggacagggagtattacgtgtaaacatgcgaacactgctcacacgcgagttttcacagttatttctatccacgcctatgaatctttggacggtgagatctcacagatgtcagaactgctggaactatgaaatggggtatataaccacgactctggtggggaaaaccgttttttaaaggacacacacacacacagcgatgcatctctctctaaagctcagccacggctgcggcaaggtcccagcggtcgctgggagacagaaggttttgtgccctgctgtatcataaagcacacacttagcgctctggagccggacggtggctccaccacttccgcaggcctggaaacttccttctccggaggaccttttactaaaaggtagaagacttcatggcttacttgttccataactccaagtgagtctgtaatgtttgtgaagcttgactgtaaccatgttttttctgtttaattatgtaaaaaacaaaactacaacaacaaaaaaagaaaaaagttaaaaaagaaaaaaacaccaaaaaacaaaaacaaacaaaaaaaaaaacccacaacccttatctggttctgaccagtgtgcgtgtaactttatgatctgaggggaaaaatggcttttgggtttttgtttatttttttgataatgactggacatcagaagaggaaaaaaactcaaaacaaaagcgagagagactattgccatatgaactcaaaagctatcatggtgttcactctacatatcaggttatggtgtctctagaatctgttgtttgtttcctataagatgctttgctgaacacatagcaaaattcatgtgacggatgataaattgattcgaaaagctggtcccccaggatctaatttcagaatttaccacccaaacccggaacagatgggtttagggctggtgttatcagagctattggctttacgtaacaatattgttcctgtccattcacccagccaaattgtgttaaagaggaaagccccacaaactaaaacagcctttcctagggaagaggaaggggaggtgggctggatctgtgactgattgaaatgcatgcaaataaaaaagacaatattaaagtctgttatcaaaccagacagtaggggagttcaactcgtgatggaaccacaaaaggtcacacaagccaaccatgtcatgccagagtacaaaacacatagttctttccccgccccgaatgtgacaatggttttcatagtggtttaattttgtagcctgacatttatggataactctgtccttccatttgctcacttctctcttcacccatcttttttaaaaacaaataaatgaataaagctgctgtgacacacacacaaaaggaatttaatagtataatatatatataaataaatatatatacagatatatttatcatggtatgtttgatgggatgactgacacaggaaatctgttaaagtcttaaaatggaatgagaatgttgttttaaaagaaaatagcaaaacaacaaaaaagcaaaccttaaaatgtgaagaaagtgtgaattttagttttgtcacagttaactgtgtcaaagagaattaaaaaaaaaaacttcagattttgtttacatattttactacatttttgctggtataattccttagccacctatgtacatactgctttaagaaatgtttttttcctgtttatttctgtttggtttatattctggttgtctttttctttttgtaaagaggaaacaatgtacagaaaaacaataaactggttgtatggccatagctatccgaaaagcaagagacaaagcaagacaaatattcacacaaaaatgaagtgtgtcctctggagggtcatatatacaatttcttttgtacagatgaaaatcaatcagctgcttagatttagaaatctactcttgctggtctttgtaagttgcatgaatatttgactttgaaaaaatatcttaacgacatggggcaaaaagtgcaatctaaatggtagcctttactaatgtgtgtggaaagaggtgttcctcattatctaatatttcaatgtgttaagagtttaatttttttgttatcattaaaaaagacaggattataaagagatatcaaagcacgattttagataacctaaacggcccagcctatacgaagttgattatatctcgatgtctgtaaaagattgctgttcttggagtcttgaggtcttgtgaattgatttcctgctttctttcatttttttcaatttaagtaataatacatttgttatattcctttcagtgtaagtttctatttggacaattttatgggaacatgtgcattctctatgtgagcttctatcatattcctgttttattagcagaacctaaaggaatttatttaatgatgttgtgacattactgctttttcttttttcttttcttagttcatatttgcattttcgttcaaggatatgcttagcaataaaatgttcttcccaaaaaaaaaaaaaaaaaaaa

SEQ ID NO: 13510 - DNA, 6148 bp, Homo sapiens
caggactggagggcttgaggaatgtggtggtccctctcttcgttgtttctgccccctgaggttgtgctttctcagggatatgcactctgcacttccattcctgcagtgaaattaactcgagcttggcagctcgagaggagaatgtggccactttccgaggctcagagtatctgtgctacgacctgtctcagaacccgatccagagcagcagtgatgaaatcaccctctcctttaagacctggcagcgtaacggcctcatcctgcacacgggcaagtcggctgactatgtcaacctggctctgaaggatggtgcggtctccttggtcattaacctggggtccggggcctttgaggccattgtggagccagtgaatggaaaattcaacgacaacgcctggcatgatgtcaaagtgacacgcaacctccggcaggtgacaatctctgtggatggcattcttaccacgacgggctacactcaagaggactataccatgctgggctcggacgacttcttctatgtaggaggaagcccaagtaccgctgacttgcctggctcccctgtcagcaacaacttcatgggctgccttaaagaggttgtttataagaataatgacatccgtctggagctgtctcgcctggcccggattgcggacaccaagatgaaaatctatggcgaagttgtgtttaagtgtgagaatgtggccacactggaccccatcaactttgagaccccagaggcttacatcagcttgcccaagtggaacactaaacgtatgggctccatctcctttgacttccgcaccacagagcccaatggcctgatcctcttcactcatggaaagccccaagagaggaaggatgctcggagccagaagaatacaaaagtagacttctttgccgtggaactcctcgatggcaacctgtacttgctgcttgacatgggctctggcaccatcaaagtgaaagccactcagaagaaagccaatgatggggaatggtaccatgtggacattcagcgagatggcagatcaggtactatatcagtgaacagcaggcgcacgccattcaccgccagtggggagagcgagatcctggacctggaaggagacatgtacctgggagggctgccggagaaccgtgctggccttattctccccaccgagctgtggactgccatgctcaactatggctacgtgggctgcatccgcgacctattcattgatgggcgcagcaagaacattcgacagctggcagagatgcagaatgctgcgggtgtcaagtcctcctgttcacggatgagtgccaagcagtgtgacagctacccctgcaagaataatgctgtgtgcaaggacggctggaaccgcttcatctgcgactgcaccggcaccggatactggggaagaacctgcgaaagggaggcatccatcctgagctatgatggtagcatgtacatgaagatcatcatgcccatggtcatgcatactgaggcagaggatgtgtccttccgcttcatgtcccagcgagcttatgggctgctggtggctacgacctccagggactctgccgacaccctgcgtctggagctggatggggggcgtgtcaagctcatggttaacttagactgtatcaggataaactgtaactccagcaaaggaccagagaccttgtatgcagggcagaagctcaatgacaacgagtggcacaccgttcgggtggtgcggagaggaaaaagccttaagttaaccgtggatgatgatgtggctgagggtacaatggtgggagaccatacccgtttggagttccacaacattgaaacgggaatcatgactgagaaacgctacatctccgttgtcccctccagctttattggccatctgcagagcctcatgtttaatggccttctctacattgacttgtgcaaaaatggtgacattgattattgtgagctgaaggctcgttttggactgaggaacatcatcgctgaccctgtcacctttaagaccaagagcagctacctgagccttgccactcttcaggcttacacctccatgcacctcttcttccagttcaagaccacctcaccagatggcttcattctcttcaatagtggtgatggcaatgacttcattgcagtcgagcttgtcaaggggtatatacactacgtttttgacctcggaaacggtcccaatgtgatcaaaggcaacagtgaccgccccctgaatgacaaccagtggcacaatgtcgtcatcactcgggacaatagtaacactcatagcctgaaagtggacaccaaagtggtcactcaggttatcaatggtgccaaaaatctggatttgaaaggtgatctctatatggctggtctggcccaaggcatgtacagcaacctcccaaagctcgtggcctctcgagatggctttcagggctgtctagcatcagtggacttgaatggacgcctgccagacctcatcaatgatgctcttcatcggagcggacagatcgagcgtggctgtgaaggacccagtaccacctgccaggaagattcatgtgccaaccagggggtctgcatgcaacaatgggagggcttcacctgtgattgttctatgacctcttattctggaaaccagtgcaatgatcctggcgctacgtacatctttgggaaaagtggtgggcttatcctctacacctggccagccaatgacaggcccagcacgcggtctgaccgccttgccgtgggcttcagcaccactgtgaaggatggcatcttggtccgcatcgacagtgctccaggacttggtgacttcctccagcttcacatagaacaggggaaaattggagttgtcttcaacattggcacagttgacatctccatcaaagaggagagaacccctgtaaatgacggcaaataccatgtggtacgcttcaccaggaacggcggcaacgccaccctgcaggtggacaactggccagtgaatgaacattatcctacaggccggcagttaaccatcttcaacactcaggcgcaaatagccattggtggaaaggacaaaggacgcctcttccaaggccaactctctgggctctattatgatggtttgaaagtactgaacatggcggctgagaacaaccccaatattaaaatcaatggaagtgttcggctggttggagaagtcccatcaattttgggaacaacacagacgacctccatgccaccagaaatgtctactactgtcatggaaaccactactacaatggcgactaccacaacccgtaagaatcgctctacagccagcattcagccaacatcagatgatcttgtttcatctgctgaatgttcaagtgatgatgaagactttgttgaatgtgagccgagtacagcaaaccccacggagccgggaatcagacgggttccgggggcctcagaggtgatccgggagtcgagcagcacaacagggatggtcgtcggcattgtggctgctgccgccctctgcatcttgatcctcctgtacgccatgtacaagtacaggaacagggacgaggggtcctatcaagtggacgagacgcggaactacatcagcaactccgcccagagcaacggcacgctcatgaaggagaagcagcagagctcgaagagcggccacaagaaacagaaaaacaaggacagggagtattacgtgtaaacatgcgaacactgctcacacgcgagttttcacagttatttctatccacgcctatgaatctttggacggtgagatctcacagatgtcagaactgctggaactatgaaatggggtatataaccacgactctggtggggaaaaccgttttttaaaggacacacacacacacagcgatgcatctctctctaaagctcagccacggctgcggcaaggtcccagcggtcgctgggagacagaaggttttgtgccctgctgtatcataaagcacacacttagcgctctggagccggacggtggctccaccacttccgcaggcctggaaacttccttctccggaggaccttttactaaaaggtagaagacttcatggcttacttgttccataactccaagtgagtctgtaatgtttgtgaagcttgactgtaaccatgttttttctgtttaattatgtaaaaaacaaaactacaacaacaaaaaaagaaaaaagttaaaaaagaaaaaaacaccaaaaaacaaaaacaaacaaaaaaaaaaacccacaacccttatctggttctgaccagtgtgcgtgtaactttatgatctgaggggaaaaatggcttttgggtttttgtttatttttttgataatgactggacatcagaagaggaaaaaaactcaaaacaaaagcgagagagactattgccatatgaactcaaaagctatcatggtgttcactctacatatcaggttatggtgtctctagaatctgttgtttgtttcctataagatgctttgctgaacacatagcaaaattcatgtgacggatgataaattgattcgaaaagctggtcccccaggatctaatttcagaatttaccacccaaacccggaacagatgggtttagggctggtgttatcagagctattggctttacgtaacaatattgttcctgtccattcacccagccaaattgtgttaaagaggaaagccccacaaactaaaacagcctttcctagggaagaggaaggggaggtgggctggatctgtgactgattgaaatgcatgcaaataaaaaagacaatattaaagtctgttatcaaaccagacagtaggggagttcaactcgtgatggaaccacaaaaggtcacacaagccaaccatgtcatgccagagtacaaaacacatagttctttccccgccccgaatgtgacaatggttttcatagtggtttaattttgtagcctgacatttatggataactctgtccttccatttgctcacttctctcttcacccatcttttttaaaaacaaataaatgaataaagctgctgtgacacacacacaaaaggaatttaatagtataatatatatataaataaatatatatacagatatatttatcatggtatgtttgatgggatgactgacacaggaaatctgttaaagtcttaaaatggaatgagaatgttgttttaaaagaaaatagcaaaacaacaaaaaagcaaaccttaaaatgtgaagaaagtgtgaattttagttttgtcacagttaactgtgtcaaagagaattaaaaaaaaaaacttcagattttgtttacatattttactacatttttgctggtataattccttagccacctatgtacatactgctttaagaaatgtttttttcctgtttatttctgtttggtttatattctggttgtctttttctttttgtaaagaggaaacaatgtacagaaaaacaataaactggttgtatggccatagctatccgaaaagcaagagacaaagcaagacaaatattcacacaaaaatgaagtgtgtcctctggagggtcatatatacaatttcttttgtacagatgaaaatcaatcagctgcttagatttagaaatctactcttgctggtctttgtaagttgcatgaatatttgactttgaaaaaatatcttaacgacatggggcaaaaagtgcaatctaaatggtagcctttactaatgtgtgtggaaagaggtgttcctcattatctaatatttcaatgtgttaagagtttaatttttttgttatcattaaaaaagacaggattataaagagatatcaaagcacgattttagataacctaaacggcccagcctatacgaagttgattatatctcgatgtctgtaaaagattgctgttcttggagtcttgaggtcttgtgaattgatttcctgctttctttcatttttttcaatttaagtaataatacatttgttatattcctttcagtgtaagtttctatttggacaattttatgggaacatgtgcattctctatgtgagcttctatcatattcctgttttattagcagaacctaaaggaatttatttaatgatgttgtgacattactgctttttcttttttcttttcttagttcatatttgcattttcgttcaaggatatgcttagcaataaaatgttcttcccaaaaaaaaaaaaaaaaaaaa

SEQ ID NO: 13511 - DNA, 1903 bp, Homo sapiens
atggacttcaagaggcactgtgatgttataaaaggcttacaaaagcaagcagagaaaaattttacagatgaaggagaccagctatttaagatgggcatcaaggttctccagcagtctaaaagccaaaaacaaaaagaagaagcctacctactttttgccaaagcagctgacatgggaaacttgaaagctatggagaaaatggctgacgctttgctatttggaaattttggcgtgcaaaatataacagcagctatccaattatatgagtccttggctaaagaaggatcatgtaaagcccaaaacgcattaggatttttgtcttcttatggaataggaatggaatatgatcaagctaaggcactgatatattacacctttggaagtgctggaggaaacatgatgtcccagatgattttggggtacagatatttgtcgggaatcaatgttctacagaattgtgaagttgccctaagttattacaagaaagtggcagattatattgctgacacatttgaaaaaagtgaaggtgttccagtggaaaaagtgagactaacggaaagacctgaaaatctgagttctaacagtgagattttggattgggacatataccaatactataaatttttggcagaaagaggagatgttcagatacaagtctctcttggacaattacatctaattggcaggaaaggtctagatcaggattactacaaagcattacactacttcttaaaggcagcaaaggccgggagtgcaaatgccatggcatttataggaaagatgtatttagaggggaatgctgccgtgccgcaaaataacgctactgccttcaagtacttttccatggcagccagtaagggcaatgcaatcggccttcatgggcttggtcttctttactttcatggaaaaggagttcccctgaattatgccgaagcacttaaatactttcagaaagctgcggaaaaagggtggcccgacgcacagttccagttaggcttcatgtactactctggctctggaatatggaaggattataaacttgccttcaaatatttttacctggcatctcagagtgggcagccccttgccatttattatctggccaagatgtatgcaacaggaacaggagtagtaagatcatgcagaactgctgtggagctttataaaggtgtctgtgaactaggccactgggctgagaaattcctgacagcttactttgcctataaggatggtgatatagattcttctcttgttcagtatgcactgcttgcagaaatggggtatgaagtagctcaaagcaattcagcattcattttggaatctaaaaaggctaacattcttgaaaaagagaagatgtatccaatggcgcttctcctatggaatcgagctgccattcaaggcaatgcatttgctagagtaaaaattggagattaccattactatggctatgggactaagaaagactatcaaacagcagccacacactacagcattgcagccaacaaataccacaacgcgcaagccatgttcaatctggcttatatgtatgaacacggcttaggcatcacaaaggacattcacttggccagaagattgtacgacatggctgctcaaacgagtccagatgcccacatacctgtgctctttgccgtcatgaaactggaaactacgcatttgctccgggatatcctgttttttaatttcacaacgagatggaactggctgaaactggacaacaccattggaccacactgggacttatttgtgattggcctcattgttcctgggctgattttgttgcttagaaatcaccatgggtaggatgcggatcacaggaaaacctgctcacgggaatcagttcactccaaggtatccccactaaataaacagtttcccatccaaa

SEQ ID NO: 13512 - DNA, 3371 bp, Homo sapiens
agcgggttccattcccgggggattggagtagcgttggagtcaccgacgccatcccctcccgcctctggcgtagcaggagcatgcgcttccttcctcacttcctctccaggagggagcgagagtaaagctacgccctggcgcgcagtctccgcgtcacaggaacttcagcacccacagggcggacagcgctcccctctacctggagacttgactcccgcgcgccccaaccctgcttatcccttgaccgtcgagtgtcagagatcctgcagccgcccagtcccggcccctctcccgccccacacccaccctcctggctcttcctgtttttactcctccttttcattcataacaaaagctacagctccaggagcccagcgccgggctgtgacccaagccgagcgtggaagaatggggttcctcgggaccggcacttggattctggtgttagtgctcccgattcaagctttccccaaacctggaggaagccaagacaaatctctacataatagagaattaagtgcagaaagacctttgaatgaacagattgctgaagcagaagaagacaagattaaaaaaacatatcctccagaaaacaagccaggtcagagcaactattcttttgttgataacttgaacctgctaaaggcaataacagaaaaggaaaaaattgagaaagaaagacaatctataagaagctccccacttgataataagttgaatgtggaagatgttgattcaaccaagaatcgaaaactgatcgatgattatgactctactaagagtggattggatcataaatttcaagatgatccagatggtcttcatcaactagacgggactcctttaaccgctgaagacattgtccataaaatcgctgccaggatttatgaagaaaatgacagagccgtgtttgacaagattgtttctaaactacttaatctcggccttatcacagaaagccaagcacatacactggaagatgaagtagcagaggttttacaaaaattaatctcaaaggaagccaacaattatgaggaggatcccaataagcccacaagctggactgagaatcaggctggaaaaataccagagaaagtgactccaatggcagcaattcaagatggtcttgctaagggagaaaacgatgaaacagtatctaacacattaaccttgacaaatggcttggaaaggagaactaaaacctacagtgaagacaactttgaggaactccaatatttcccaaatttctatgcgctactgaaaagtattgattcagaaaaagaagcaaaagagaaagaaacactgattactatcatgaaaacactgattgactttgtgaagatgatggtgaaatatggaacaatatctccagaagaaggtgtttcctaccttgaaaacttggatgaaatgattgctcttcagaccaaaaacaagctagaaaaaaatgctactgacaatataagcaagcttttcccagcaccatcagagaagagtcatgaagaaacagacagtaccaaggaagaagcagctaagatggaaaaggaatatggaagcttgaaggattccacaaaagatgataactccaacccaggaggaaagacagatgaacccaaaggaaaaacagaagcctatttggaagccatcagaaaaaatattgaatggttgaagaaacatgacaaaaagggaaataaagaagattatgacctttcaaagatgagagacttcatcaataaacaagctgatgcttatgtggagaaaggcatccttgacaaggaagaagccgaggccatcaagcgcatttatagcagcctgtaaaaatggcaaaagatccaggagtctttcaactgtttcagaaaacataatatagcttaaaacacttctaattctgtgattaaaattttttgacccaagggttattagaaagtgctgaatttacagtagttaaccttttacaagtggttaaaacatagctttcttcccgtaaaaactatctgaaagtaaagttgtatgtaagctgagattttgtatacagaatccttatttcctcatagacttatattttataatcagaatatgttgctttgaaaaagcctctaatggactgaccttaaaactcatccttcttccactgtctcatccacataagcactccccgaagaattaagggggttctgttttcaaggcatgccaagtactaaagcaccttgcagagcgtgtctattacaagatgtcatttccaccagcagttcccttaggggagctgaaataaattcacattttctcaaagtctcatagctttggaggagccatctgcttttttggctgctctttttagctggctttttattaggctcagtgacataaaaaggatccaggtaaatgggtataggatttgctggatttactaacaatttccccctgttcttaacacttcctattagtgacttttcagacattgagtttacttataaagagagatatttatgtactctctaagaagacaaatgaggtcataaacactgcataaagcaaggcaaaaatgtatgccacatctcagttatctaaactagattagatccaagccaagttttctcaacagagagcaaagggccaggcagtaaggtagaaatagagataaaaatcattccttccttgtgatccaaagctggtcgagcagctttcctggaggaaaaggttaatgaacttcaggtccctgcaactcagcccccaccacaaacacagccctggaaacatacagtggcgcaaggtcctcttgaaatgttaatggttaatgttcccaaaccagagaatgctttgaaaatgtatcattcagtgtaaattaattacatacatatttttctatatatttgtttcaaactgtaaaaataacataatatgtaatttgtgtattagtgagaggtgaagccagctggacttcctgggtcgagtggggccttggagaacttttctgtcttacaagaggattgtaaaatgcacccatcagtgctctgtaaaacacaccaatcagcgctctgtagctagcaataggtttgtaaaatgcacccatcagcactctgtaaaacgcaccaatcagcactctgtaaaatgcaccaatcagcaggattctaaaagtagacaatcacagggaggattgaaaaaaagggcactctgatagggcaaaaacggaacatgggaggggacaaataagggaataaaatctggccaccccagccagcagcagcaacctgttcaggtcgcctgccgctgtggaagctttgtccttttgctcttcataataaaccttgctactgttcaaaaaaaaaaaaaaaaaaaaaaaaaaaaaaaaaaaaaaaaaaaaaaaaaaaaaaaaa

SEQ ID NO: 13513 - DNA, 3420 bp, Homo sapiens
atgggcctgctggccagtgctggtttgttgctgttgctggtcatcggccaccccagaagcctaggactgaagtgtggaattcgcatggtcaacatgaaaagtaaggaacctgccgtgggatctagattcttctctagaattagtagttggagaaattcaacagtgactggacatccatggcaggtctccctaaaatcagatgagcaccacttctgtggaggaagcttgattcaagaagatcgggttgttacagcagcacactgcctggacagcctcagtgagaagcagctgaagaatataactgtgacttctggggagtacagcctctttcagaaggataagcaagaacagaatattcctgtctcaaaaattattacccatcctgaatacaacagccgtgaatatatgagtcctgatattgcactgctgtatctaaaacacaaagtcaagtttggaaatgctgttcagccaatctgtcttcctgacagcgatgataaagttgaaccaggaattctttgcttatccagtggatggggcaagatttccaaaacatcagaatattcaaatgtcctacaagaaatggaacttcccatcatggatgacagagcgtgtaatactgtgctcaagagcatgaacctccctcccctgggaaggaccatgctgtgtgctggcttccctgattggggaatggacgcctgccagggggactctggaggaccactggtttgtagaagaggtggtggaatctggattcttgctgggataacttcctgggtagctggttgtgctggaggttcagttcccgtaagaaacaaccatgtgaaggcatcacttggcattttctccaaagtgtctgagttgatggattttatcactcaaaacctgttcacaggtttggatcggggccaacccctctcaaaagtgggctcaaggtatataacaaaggccctgagttctgtccaagaagtgaatggaagccagagaggaaagggtattttagacatggaaaagcaagttggatgtgatcatgactatgtatctttacgatcaagcagtggagtgctttttaatcagagatctctcatggaagacgatggaaaacaaaacaaacgtgtctgtggaaaaatattgccttcaccattgctggcagagaccagtgaggccatggttccatttgtttctgatacagaagacagtggcagtggctttgagcttaccgttactgctgtacagaagtcagaagcagggtcaggttgtgggagtctggctatattggtagaagaagggacaaatcactctgccaagtatcctgatttgtatcccagtaacacaaggtgtcattggttcatttgtgctccagagaagcacattataaagttgacatttgaggactttgctgtcaaatttagtccaaactgtatttatgatgctgttgtgatttacggtgattctgaagaaaagcacaagttagctaaactttgtggaatgttgaccatcacttcaatattcagttctagtaacatgacggtgatatactttaaaagtgatggtaaaaatcgtttacaaggcttcaaggccagatttaccattttgccctcagagtctttaaacaaatttgaaccaaagttacctccccaaaacaatcctgtatctaccgtaaaagctattctgcatgatgtctgtggcatccctccatttagtccccagtggctttccagaagaatcgcaggaggggaagaagcctgcccccactgttggccatggcaggtgggtctgaggtttctaggcgattaccaatgtggaggtgccatcatcaacccagtgtggattctgaccgcagcccactgtgtgcaattgaagaataatccactctcctggactattattgctggggaccatgacagaaacctgaaggaatcaacagagcaggtgagaagggccaaacacataatagtgcatgaagactttaacacactaagttatgactctgacattgccctaatacaactaagctctcctctggagtacaactcggtggtgaggccagtatgtctcccacacagcgcagagcctctattttcctcggagatctgtgctgtgaccggatggggaagcatcagtgcagatggtggcctagcaagtcgcctacagcagattcaagtgcatgtgttagaaagagaggtctgtgaacacacttactattctgcccatccaggagggatcacagagaagatgatctgtgctggctttgcagcatctggagagaaagatttctgccagggagactctggtgggccactagtatgtagacatgaaaatggtccctttgtcctctatggcattgtcagctggggagctggctgtgtccagccatggaagccgggtgtatttgccagagtgatgatcttcttggactggatccaatcaaaaatcaatggtcctgcttcacttcagacaaataataaatgcaaaaccttaaaacaacaattgccaccacccacaccttcaccagacagtgcatcttggccaggttgttgctctgaagcagagctagaaaagcctagaggcttttttcccacaccacggtatctactggattatagaggaagactggaatgttcttgggtgctcagagtttcagcaagcagtatggcaaaatttaccattgagtatctgtcactcctggggtctcctgtgtgtcaagactcagttctaattatttatgaagaaagacacagtaagagaaagacggcaggtggattacatggaagaagactttactcaatgactttcatgagtcctggaccgctggtgagggtgacattccatgcccttgtacgaggtgcatttggtataagctatattgacttgaaagtcctaggtccaaaggacagtaaaataaccagactttcccaaagttcaaacagagagcacttggtcccttgtgaggatgttcttctgaccaagccagaagggatcatgcagatcccaagaaattctcacagaactactatggggtgccaatggagattagtagcccctttaaatcacatcattcagcttaatattattaacttcccgatgaagccaacaacttttgtctgtcatggtcatctgcgtgtttacgaaggatttggaccaggaaaaaaattaatagcttcattcgctggaactctggcaatgatactgacaaaagacatattaaaaagagaaaaactgaattttattaacacatatatcatgcatatatgggaaaattcagtgtatgataatgtaagaagtgttggaaaaagaaaacagaagaaatttgcatcaaatttaagttatagtatggaggctgagaagtccaggatccaggtgccagcagatttggtgcctgctaagggctcactttctggttcttaggcacagcccattctc

SEQ ID NO: 13514 - DNA, 6296 bp, Homo sapiens
cgcgcgggcgcgggggacggcgcaggggccgcctggctggagcagccagaggggatagcttcgtcgagaacggaggacaccggcggtccagggtcctgggcagtcgcgccagagctgagcggagggcgcggcgcgagaacgaatctttgtgacattctctctcagcattctttatcccctgtttgctgaagacttcgacaaaagctggtcttagctgttggcattctcctgagaaaaggatagcttcagaaatcagaaaaacatttgggaggtgtctagcccagtggaccttctgaagagcaatgctaagaagacgtttggtttaaagaattaaaaggaagaacaacttaagagcttcttcaaagtttcccgcatgaaaattacttaaacgttgcacacaacgtttcacaaaatcttttgtgaaagaagaaaaggaaattcagtgtgtgagtctcagcaggagttaagctaatgcagcttaaaataatgccgaaaaagaagcgcttatctgcgggcagagtgcccctgattctcttcctgtgccagatgattagtgcactggaagtacctcttgatctggtacagcctccaaccatcacccaacagtctccaaaagattacattattgaccctcgggagaatattgtaatccagtgtgaagccaaagggaaaccgcccccaagcttttcctggacccgtaatgggactcattttgacatcgataaagaccctctggtcaccatgaagcctggcacaggaacgctcataattaacatcatgagcgaagggaaagctgagacctatgaaggagtctatcagtgtacagcaaggaacgaacgcggagctgcagtttctaataacattgttgtccgcccatccagatcaccattgtggaccaaagaaaaacttgaaccaatcacacttcaaagtggtcagtctttagtacttccctgcagacccccaattggattaccaccacctataatattttggatggataattcctttcaaagacttccacaaagtgagagagtttctcaaggtttgaatggggacctttatttttccaatgtcctcccagaggacacccgcgaagactatatctgttatgctagatttaatcatactcaaaccatacagcagaagcaacctatttctgtgaaggtgatttcagtggatgaattgaatgacactatagctgctaatttgagtgacactgagttttatggtgctaaatcaagtagagagaggccaccaacatttttaactccagaaggcaatgcaagtaacaaagaggaattaagaggaaatgtgctttcactggagtgcattgcagaaggactgcctaccccaattatttactgggcaaaggaagatggaatgctacccaaaaacaggacagtttataagaactttgagaaaaccttgcagatcattcatgtttcagaagcagactctggaaattaccaatgtatagcaaaaaacgcattaggagccatccaccataccatttctgttagagttaaagcggctccatactggatcacagcccctcaaaatcttgtgctgtccccaggagaggatgggaccttgatctgcagagctaatggcaaccccaaacccagaattagctggttaacaaatggagtcccaatagaaattgcccctgatgaccccagcagaaaaatagatggcgataccattattttttcaaatgttcaagaaagatcaagtgcagtctatcagtgcaatgcctctaatgaatatggatatttactggcaaacgcatttgtaaatgtgctggctgagccaccacgaatcctcacacctgcaaacacactctaccaggtcattgcaaacaggcctgctttactagactgtgccttctttgggtctcctctcccaaccatcgagtggtttaaaggagctaaaggaagtgctcttcatgaagatatttatgttttacatgaaaatggaactttggaaattcctgtggcccaaaaggacagtacaggaacttatacgtgtgttgcaaggaataaattagggatggcgaagaatgaagttcacttagaaatcaaagatcctacatggatcgttaaacagcccgaatatgcagttgtgcaaagagggagcatggtgtcctttgaatgcaaagtgaaacatgatcacaccttatccctcactgtcctgtggctgaaggacaacagggaactgcccagtgatgaaaggttcactgttgacaaggatcatctagtggtagctgatgtcagtgacgatgacagcgggacctacacgtgtgtggccaacaccactctggacagcgtctccgccagcgctgtgcttagcgttgttgatgtcccaaatcctccctttgacttagaactgacagatcaacttgacaaaagtgttcagctgtcatggaccccaggcgatgacaacaatagccccattacaaaattcatcatcgaatatgaagatgcaatgcacaagccagggctgtggcaccaccaaactgaagtttctggaacacagaccacagcccagctgaagctgtctccttacgtgaactactccttccgcgtgatggcagtgaacagcattgggaagagcttgcccagcgaggcgtctgagcagtatttgacgaaagcctcagaaccagataaaaaccccacagctgtggaaggactgggatcagagcctgataatttggtgattacgtggaagcccttgaatggtttcgaatctaatgggccaggccttcagtacaaagttagctggcgccagaaagatggtgatgatgaatggacatctgtggttgtggcaaatgtatccaaatatattgtctcaggcacgccaacctttgttccatacctgatcaaagttcaggccctgaatgacatggggtttgcccccgagccagctgtagtcatgggacattctggagaagacctcccaatggtggctcctgggaacgtgcgtgtgaatgtggtgaacagtaccttagccgaggtgcactgggacccagtacctctgaaaagcatccgaggacacctacaaggctatcggatttactattggaagacccagagttcatctaaaagaaacagacgtcacattgagaaaaagatcctcaccttccaaggcagcaagactcatggcatgttgccggggctagagccctttagccactacacactgaatgtccgagtggtcaatgggaaaggggagggcccagccagccctgacagagtctttaatactccagaaggagtccccagtgctccctcgtctttgaagattgtgaatccaacactggactctctcactttggaatgggatccaccgagccacccgaatggcattttgacagagtacaccttaaagtatcagccaattaacagcacacatgaattaggccctctggtagatttgaaaattcctgccaacaagacacggtggactttaaaaaatttaaatttcagcactcgatataagttttatttctatgcacaaacatcagcaggatcaggaagtcaaattacagaggaagcagtaacaactgtggatgaagcgatggcaagccggcaggtggatattgcaactcagggctggttcattggtctgatgtgtgctgttgctctccttatcttaattttgctgattgtttgcttcatcagaagaaacaagggtggtaaatatccagttaaagaaaaggaagatgcccatgctgaccctgaaatccagcctatgaaggaagatgatgggacatttggagaatacagtgatgcagaagaccacaagcctttgaaaaaaggaagtcgaactccttcagacaggactgtgaaaaaagaagatagtgacgacagcctagttgactatggagaaggggttaatggccagttcaatgaggatggctcctttattggacaatacagtggtaagaaagagaaagagccggctgaaggaaacgaaagctcagaggcaccttctcctgtcaacgccatgaattcctttgtttaatttttaagctctttgccaatattccatttctctagaatgtttatcctaagcacttgtttgtcagccctctcatactatgaacatatgggtagagagtatattttctgctgtatgttagtattatgagaatagttacagcaaaaacataactcagtcaaatgatatgttaatatgaactggaatgcaaagtgcatactttttcattcaaaatgggtattcttgatttcctcagaactgataaaaaataatgcaacatcaccaacagatcctgttatttcctctgcaggatacagttcaatatgatgcatgaaaaatgctccacatttaaaggacatacccgtgtatgttatgaaaacatggtttgatactttgtttatactaccctcagctgaacccctatatatgaattccgttttcattgtcaagaatgttactgtagtattctctagaacttcaatgtctttgtggacattgttgtgaaattggtgactatgtatagctgtcgttagtctttttgggagactgttaggaacagtttgtacagtatatacttgctaaatgagttcattatgacagtcacattgctgatgcttactgagaactattacctactcttggctcctgttactccgtaggcttcttaatcttccaggcattacagcagcacagtgttctactttttacatcatttctatgttcggttgtttttaggcataaacaatgtgtattgcagtgcatttcggcatttgtgccatactgaaagaatcaaaaacaaatcatccaaattaaatttcaaacattatttcagagaacacagggcaagacacatacagtgccttcagatattaagcattccacaacatcgtgcattctgtatcagctggtccagtccattctgggtcctagattactgtcattgtctaaaagtaacttttaaaaagcagagttcatgaaaactgcaatgctgggaaaagaaggaaacatgaaaataaaaataagacagtttattagaaatagcatttcctcataagcataaaaagaaaatctttgttgccaactgaagcacatgatgattttgtggtcctttatggtttctattacattcagtaagaaagatgtcaacatgctagaaaattaattttaaaactaagttattccaacactaaaagcatacaacagcatgccaacagtaatatattattctccaagactttacctatgtaagtgttcaaaactctgcagcattaaacaacgtgtatgcaaattgttatggatacatttcagaatctaagaaatcaggcaagtgcttaaaaggccaacggtccaagggattacatctgcagtttaaaaagtaaatatatattctatcgtattcataaacaatatctatcaaatgggttacctccaaatatgaaaatctataacaacctatggttgaaggaatgctcagtttcatttgccaataaattggtttctcataacttgcatcaagtttaattttaagtaaagctttttatatgtagatattttgttgaatttgtaaatacacttaaaatgtagatgctatatgcttataggtgttacatacaaataaacatgcaatgtttatgttgtactgtataagaggtaagctaattaatgcagtgaatgggattggaaagcatctacttaaatatctattgggttcccccctccccccaccttttttgctgtgaaactgaaatagtgaacttttctacgtattgacagcagatttttcgatgaaatcttcagagctttgcctatggggcacagtaggcctagtaacctggcatgtttgatatatgtaggtaaagcataatttaaagtaatcccaggtaaagatggccctaaatactttcatgtctctatattcatttttcacagatccacctgtctcttgaaaatataaaaagacaaaacaggtttgccttggcatcagagagcacaaagattaaaagttactttaaatttgccaatattttgggagaacaataaaactacattttttcctcttccatactggtagatgcgaaatttatctgtgcatgaaagggtcacttctgtaatagtgcaacagatttggtattaaaaattaaatgtggttttaaaagttcctctctcttttgtaatttatgttcccaattgagtgtgaatgtccaagtaatggtgtatgtaatggtacaggcaaatgtgactggatttccctcaaaaaagtaactattaaacagtcttgatctctttgtgacttttaa

SEQ ID NO: 13515 - DNA, 1640 bp, Homo sapiens
ggggagagaggctctgggttgctgctgcttctgctgctgctgctgctgtgtggctgtttctgtacactcactggcaggcttggtgccggctccctcgcccgcccgcccgccagcctgggaaagtgggttacagagcgaaggagctcagctcagacactggcagaggagcatccagtcacagagagaccaaacaagaaccctttcctttggcttcctcttcagctcttccagagggcttgctatttgcactctctcttttgaaattgtgttgcttttacttttcacccttctgcttgggttttatgagggctttgttaagtcttagagggaaaagagactgagcgagggaaagagagaggcaaagtggaaaggaccataaactggcaaagcccgctctgcgctcgctgtggatgaaagccccgtgttggtgaagcctctcctcgcgagcagcgcgcacccctccagagcaccccgcggacccgcacctcggcgtggccaccatggtcaggagagttcagccggatcggaaacagttgccactggtcctactgagattgctctgccttcttcccacaggactgcctgttcgcagcgtggattttaaccgaggcacggacaacatcaccgtgaggcagggggacacagccatcctcaggtgcgttgtagaagacaagaactcaaaggtggcctggttgaaccgttctggcatcatttttgctggacatgacaagtggtctctggacccacgggttgagctggagaaacgccattctctggaatacagcctccgaatccagaaggtggatgtctatgatgagggttcctacacttgctcagttcagacacagcatgagcccaagacctcccaagtttacttgatcgtacaagtcccaccaaagatctccaatatctcctcggatgtcactgtgaatgagggcagcaacgtgactctggtctgcatggccaatggccgtcctgaacctgttatcacctggagacaccttacaccaactggaagggaatttgaaggagaagaagaatatctggagatccttggcatcaccagggagcagtcaggcaaatatgagtgcaaagctgccaacgaggtctcctcggcggatgtcaaacaagtcaaggtcactgtgaactatcctcccactatcacagaatccaagagcaatgaagccaccacaggacgacaagcttcactcaaatgtgaggcctcggcagtgcctgcacctgactttgagtggtaccgggatgacactaggataaatagtgccaatggccttgagattaagagcacggagggccagtcttccctgacggtgaccaacgtcactgaggagcactacggcaactacacctgtgtggctgccaacaagctgggggtcaccaatgccagcctagtccttttcagacctgggtcggtgagaggaataaatggatccatcagtctggccgtaccactgtggctgctggcagcatctctgctctgccttctcagcaaatgttaatagaataaaaatttaaaaataaaaaaaaaaaaaaaaaaaaaaaaaaaaaaaaaaaaaaaaaaaaaaaaaaaaaaaaaaaaaaaaaaaaaaaaaaaaaaaaaaaaaaaaaaaaaaaaaaaaaaa

SEQ ID NO: 13516 - DNA, 2205 bp, Homo sapiens
gcgcgtccgctcccgccgttgcgacggacgggtaggggaggcgaccccggcgttctgctccgcactgtggaggaggtggggaggtgttgggccagggctgaggtaggagggagtctgtccctcgacgcctcctgcgacgccagcccctgagcgatgatgcgaacgtgcgtcctactctccgcggtgctctggtgcctcacaggagacaaaatatatgtagagttacatcaaaatagtccagtccttatctgtatggattttaagctttctaaaaaagaaatagtggaccccacctacttatggattgggcctaatgaaaagacgttaacaggaaataatagaataaatataactgaaactggacagctgatggtgaaagattttttggagcctttgtctggactttacacatgtactctttcttataagactgttaaagcagaaactcaagaagaaaaaacagtcaaaaagagatatgactttatggtctttgcctatcgggaacctgattattcatatcagatggctgtacgttttaccacaaggtcttgtatagggagatacaatgatgtattctttagagtgctgaagaaaatcttggatagtctaatttctgatttgtcatgccatgtcatagagccatcatataaatgccattctgttgaaattccagaacatggcctcatacatgagctatttatagcatttcaagttaatccttttgcgccggggtggaaaggtgcttgcaatggatctgttgactgtgaagataccactaatcataatatcctccaggcaagagatcgaatagaagacttttttcggagccaagcatatattttctaccataactttaataaaactctaccagcaatgcattttgtggaccacagtttgcaagtagtacgtctggatagctgtcgaccaggctttggaaaaaatgaacgtctacacagtaattgcgctagctgttgtgtggtttgtagtcctgcgacttttagtcctgatgttaatgtaacttgtcagacctgcgtttccgtccttacctatggagctaaatcttgcccacaaacttcaaacaaaaatcagcaatatgaagattagaggtgaaagcattgttacttacttgtggaagtcggggacataagatgattttcacatcccagagcatcatagatagttccattaagtaaaatcagtaagaccaaaccactggaaaacatgcattttggaaactttaaaataaatggttaacatggcatttctaagaaggcatttaatccagtatctctagtgtacaaaggaaacttgaagttttaatggattatttttaatgaaatgttttattgtttacaaacggtatgttgctgtgtacctaagagtatagtaaggtcaagaagagtatcaaagtataataaaataaaaattgtatactctccatatatttatttgtttggaatcactcttgtgtgatataaaggcgtgtatattatctttgtattagaaccaaaaaagttatttattttggtccctatgattttattttttaagataaattaatatactgtattttttaaagtataggtttaggtttacagaataatagagcagataatatatagagttccatacacccactgcaccccataccctcattcctccttacacaatttctcctattattaagatggtgcattagtgtggcacatttgttacaaatgatgaaccaatattaatttattattaattatagcccatagttcacattaagattcattgtgttgtaaggttatgtgggttttgacaaattcataatggcatgtgtgcaccattgcagtctcatacagaatagtttcaccaccctcaaaatcctgtgcttcacttatttatccctcccgccgtgccctggcaaccactgatctttttactgtctctacagttttgccttttccaaaatgtcatgtagttggttggagttatgcagtatgtagactttttagactggcttctttcacttagcaatatgcatttaaggttcctccatgtctttttgtgacttgatagctcattttttattgctgaataatgttcattgtatggatatagcatagtatgtttatccattcgcccattaaaggaaatcttgattgcttccagttttcagtgattaaaaataaagccgctataaacaaaaaaaaaaaaaaa

SEQ ID NO: 13517 - DNA, 1695 bp, Homo sapiens
atgcttataagcaggaacaagctgattttactactaggaatagtcttttttgaacgaggtaaatctgcaactctttcgctccccaaagctcccagttgtgggcagagtctggttaaggtacagccttggaattattttaacattttcagtcgcattcttggaggaagccaagtggagaagggttcctatccctggcaggtatctctgaaacaaaggcagaagcatatttgtggaggaagcatcgtctcaccacagtgggtgatcacggcggctcactgcattgcaaacagaaacattgtgtctactttgaatgttactgctggagagtatgacttaagccagacagacccaggagagcaaactctcactattgaaactgtcatcatacatccacatttctccaccaagaaaccaatggactatgatattgcccttttgaagatggctggagccttccaatttggccactttgtggggcccatatgtcttccagagctgcgggagcaatttgaggctggttttatttgtacaactgcaggctggggccgcttaactgaaggtggcgtcctctcacaagtcttgcaggaagtgaatctgcctattttgacctgggaagagtgtgtggcagctctgttaacactaaagaggcccatcagtgggaagacctttctttgcacaggttttcctgatggagggagagacgcatgtcagggagattcaggaggttcactcatgtgccggaataagaaaggggcctggactctggctggtgtgacttcctggggtttgggctgtggtcgaggctggagaaacaatgtgaggaaaagtgatcaaggatcccctgggatcttcacagacattagtaaagtgcttccctggatccacgaacacatccaaactggtaatcggagaaagagctccagagcctggtgcagtgagcaggatgtcatagtcagcggggctgaggggaagctgcacttcccagaaagcctccacctatattatgagagcaagcaacggtgtgtctggaccctgctggtaccagaggaaatgcatgtgttgctcagtttttcccacctagatgttgagtcttgtcaccacagttacctgtcaatgtattctttagaagacagacccattggaaaattttgtggagaaagcctcccttcatccattcttattggctctaattctctaaggctgaaattcgtctctgatgccacagattatgcagctgggtttaatcttacctataaagctcttaaaccaaactacattcctgattcaggttgcagttacttaactgtcctttttgaagaaggtctcatacagagtctaaactatcctgaaaactacagtgacaaggctaactgtgactggatttttcaagcctccaaacatcacctaattaagctttcatttcagagtctggaaatagaagaaagtggagactgcacttccgactatgtgacagtgcacagcgatgtagaaaggaagaaggaaatagctcggctgtgtggctatgatgtccccacccctgtgctgagcccctccagcatcatgctcatcagcttccaatcagatgaaaacgggacctgcaggggctttcaggctacagtctccttcattcctaaagcaggtaagaagatagagttaccaactctttggttcccagttctaatccttgtgatgtga

SEQ ID NO: 13518 - DNA, 2620 bp, Homo sapiens
ctgaacgcgaggactgttaactgtttctggcaaacatgaagtcaggcctctggtatttctttctcttctgcttgcgcattaaagttttaacaggagaaatcaatggttctgccaattatgagatgtttatatttcacaacggaggtgtacaaattttatgcaaatatcctgacattgtccagcaatttaaaatgcagttgctgaaaggggggcaaatactctgcgatctcactaagacaaaaggaagtggaaacacagtgtccattaagagtctgaaattctgccattctcagttatccaacaacagtgtctctttttttctatacaacttggaccattctcatgccaactattacttctgcaacctatcaatttttgatcctcctccttttaaagtaactcttacaggaggatatttgcatatttatgaatcacaactttgttgccagctgaagttctggttacccataggatgtgcagcctttgttgtagtctgcattttgggatgcatacttatttgttggcttacaaaaaagaagtattcatccagtgtgcacgaccctaacggtgaatacatgttcatgagagcagtgaacacagccaaaaaatctagactcacagatgtgaccctataatatggaactctggcacccaggcatgaagcacgttggccagttttcctcaacttgaagtgcaagattctcttatttccgggaccacggagagtctgacttaactacatacatcttctgctggtgttttgttcaatctggaagaatgactgtatcagtcaatggggattttaacagactgccttggtactgccgagtcctctcaaaacaaacaccctcttgcaaccagctttggagaaagcccagctcctgtgtgctcactgggagtggaatccctgtctccacatctgctcctagcagtgcatcagccagtaaaacaaacacatttacaagaaaaatgttttaaagatgccaggggtactgaatctgcaaagcaaatgagcagccaaggaccagcatctgtccgcatttcactatcatactacctcttctttctgtagggatgagaattcctcttttaatcagtcaagggagatgcttcaaagctggagctattttatttctgagatgttgatgtgaactgtacattagtacatactcagtactctccttcaattgctgaaccccagttgaccattttaccaagactttagatgctttcttgtgccctcaattttctttttaaaaatacttctacatgactgcttgacagcccaacagccactctcaatagagagctatgtcttacattctttcctctgctgctcaatagttttatatatctatgcatacatatatacacacatatgtatataaaattcataatgaatatatttgcctatattctccctacaagaatatttttgctccagaaagacatgttcttttctcaaattcagttaaaatggtttactttgttcaagttagtggtaggaaacattgcccggaattgaaagcaaatttattttattatcctattttctaccattatctatgttttcatggtgctattaattacaagtttagttctttttgtagatcatattaaaattgcaaacaaaatcatctttaatgggccagcattctcatggggtagagcagaatattcatttagcctgaaagctgcagttactataggttgctgtcagactatacccatggtgcctctgggcttgacaggtcaaaatggtccccatcagcctggagcagccctccagacctgggtggaattccagggttgagagactcccctgagccagaggccactaggtattcttgctcccagaggctgaagtcaccctgggaatcacagtggtctacctgcattcataattccaggatctgtgaagagcacatatgtgtcagggcacaattccctctcataaaaaccacacagcctggaaattggccctggcccttcaagatagccttctttagaatatgatttggctagaaagattcttaaatatgtggaatatgattattcttagctggaatattttctctacttcctgtctgcatgcccaaggcttctgaagcagccaatgtcgatgcaacaacatttgtaactttaggtaaactgggattatgttgtagtttaacattttgtaactgtgtgcttatagtttacaagtgagacccgatatgtcattatgcatacttatattatcttaagcatgtgtaatgctggatgtgtacagtacagtactgaacttgtaatttgaatctagtatggtgttctgttttcagctgacttggacaacctgactggctttgcacaggtgttccctgagttgtttgcaggtttctgtgtgtggggtggggtatggggaggagaaccttcatggtggcccacctggcctggttgtccaagctgtgcctcgacacatcctcatccccagcatgggacacctcaagatgaataataattcacaaaatttctgtgaaatcaaatccagttttaagaggagccacttatcaaagagattttaacagtagtaagaaggcaaagaataaacatttgatattcagcaactgaaaaaaaaaaa

SEQ ID NO: 13519 - DNA, 4950 bp, Homo sapiens
cagagcagggtggagagggcggtgggaggcgtgtgcctgagtgggctctactgccttgttccatattattttgtgcacattttccctggcactctgggttgctagccccgccgggcactgggcctcagacactgcgcggttccctcggagcagcaagctaaagaaagcccccagtgccggcgaggaaggaggcggcggggaaagatgcgcggcgttggctggcagatgctgtccctgtcgctggggttagtgctggcgatcctgaacaaggtggcaccgcaggcgtgcccggcgcagtgctcttgctcgggcagcacagtggactgtcacgggctggcgctgcgcagcgtgcccaggaatatcccccgcaacaccgagagactggatttaaatggaaataacatcacaagaattacgaagacagattttgctggtcttagacatctaagagttcttcagcttatggagaataagattagcaccattgaaagaggagcattccaggatcttaaagaactagagagactgcgtttaaacagaaatcaccttcagctgtttcctgagttgctgtttcttgggactgcgaagctatacaggcttgatctcagtgaaaaccaaattcaggcaatcccaaggaaagctttccgtggggcagttgacataaaaaatttgcaactggattacaaccagatcagctgtattgaagatggggcattcagggctctccgggacctggaagtgctcactctcaacaataacaacattactagactttctgtggcaagtttcaaccatatgcctaaacttaggacttttcgactgcattcaaacaacctgtattgtgactgccacctggcctggctctccgactggcttcgccaaaggcctcgggttggtctgtacactcagtgtatgggcccctcccacctgagaggccataatgtagccgaggttcaaaaacgagaatttgtctgcagtggtcaccagtcatttatggctccttcttgtagtgttttgcactgccctgccgcctgtacctgtagcaacaatatcgtagactgtcgtgggaaaggtctcactgagatccccacaaatcttccagagaccatcacagaaatacgtttggaacagaacacaatcaaagtcatccctcctggagctttctcaccatataaaaagcttagacgaattgacctgagcaataatcagatctctgaacttgcaccagatgctttccaaggactacgctctctgaattcacttgtcctctatggaaataaaatcacagaactccccaaaagtttatttgaaggactgttttccttacagctcctattattgaatgccaacaagataaactgccttcgggtagatgcttttcaggatctccacaacttgaaccttctctccctatatgacaacaagcttcagaccatcgccaaggggaccttttcacctcttcgggccattcaaactatgcatttggcccagaacccctttatttgtgactgccatctcaagtggctagcggattatctccataccaacccgattgagaccagtggtgcccgttgcaccagcccccgccgcctggcaaacaaaagaattggacagatcaaaagcaagaaattccgttgttcagctaaagaacagtatttcattccaggtacagaagattatcgatcaaaattaagtggagactgctttgcggatctggcttgccctgaaaagtgtcgctgtgaaggaaccacagtagattgctctaatcaaaagctcaacaaaatcccggagcacattccccagtacactgcagagttgcgtctcaataataatgaatttaccgtgttggaagccacaggaatctttaagaaacttcctcaattacgtaaaataaactttagcaacaataagatcacagatattgaggagggagcatttgaaggagcatctggtgtaaatgaaatacttcttacgagtaatcgtttggaaaatgtgcagcataagatgttcaagggattggaaagcctcaaaactttgatgttgagaagcaatcgaataacctgtgtggggaatgacagtttcataggactcagttctgtgcgtttgctttctttgtatgataatcaaattactacagttgcaccaggggcatttgatactctccattctttatctactctaaacctcttggccaatccttttaactgtaactgctacctggcttggttgggagagtggctgagaaagaagagaattgtcacgggaaatcctagatgtcaaaaaccatacttcctgaaagaaatacccatccaggatgtggccattcaggacttcacttgtgatgacggaaatgatgacaatagttgctccccactttctcgctgtcctactgaatgtacttgcttggatacagtcgtccgatgtagcaacaagggtttgaaggtcttgccgaaaggtattccaagagatgtcacagagttgtatctggatggaaaccaatttacactggttcccaaggaactctccaactacaaacatttaacacttatagacttaagtaacaacagaataagcacgctttctaatcagagcttcagcaacatgacccagctcctcaccttaattcttagttacaaccgtctgagatgtattcctcctcgcacctttgatggattaaagtctcttcgattactttctctacatggaaatgacatttctgttgtgcctgaaggtgctttcaatgatctttctgcattatcacatctagcaattggagccaaccctctttactgtgattgtaacatgcagtggttatccgactgggtgaagtcggaatataaggagcctggaattgctcgttgtgctggtcctggagaaatggcagataaacttttactcacaactccctccaaaaaatttacctgtcaaggtcctgtggatgtcaatattctagctaagtgtaacccctgcctatcaaatccgtgtaaaaatgatggcacatgtaatagtgatccagttgacttttaccgatgcacctgtccatatggtttcaaggggcaggactgtgatgtcccaattcatgcctgcatcagtaacccatgtaaacatggaggaacttgccacttaaaggaaggagaagaagatggattctggtgtatttgtgctgatggatttgaaggagaaaattgtgaagtcaacgttgatgattgtgaagataatgactgtgaaaataattctacatgtgtcgatggcattaataactacacatgcctttgcccacctgagtatacaggtgagttgtgtgaggagaagctggacttctgtgcccaggacctgaacccctgccagcacgattcaaagtgcatcctaactccaaagggattcaaatgtgactgcacaccagggtacgtaggtgaacactgcgacatcgattttgacgactgccaagacaacaagtgtaaaaacggagcccactgcacagatgcagtgaacggctatacgtgcatatgccccgaaggttacagtggcttgttctgtgagttttctccacccatggtcctccctcgtaccagcccctgtgataattttgattgtcagaatggagctcagtgtatcgtcagaataaatgagccaatatgtcagtgtttgcctggctatcagggagaaaagtgtgaaaaattggttagtgtgaattttataaacaaagagtcttatcttcagattccttcagccaaggttcggcctcagacgaacataacacttcagattgccacagatgaagacagcggaatcctcctgtataagggtgacaaagaccatatcgcggtagaactctatcgggggcgtgttcgtgccagctatgacaccggctctcatccagcttctgccatttacagtgtggagacaatcaatgatggaaacttccacattgtggaactacttgccttggatcagagtctctctttgtccgtggatggtgggaaccccaaaatcatcactaacttgtcaaagcagtccactctgaattttgactctccactctatgtaggaggcatgccagggaagagtaacgtggcatctctgcgccaggcccctgggcagaacggaaccagcttccacggctgcatccggaacctttacatcaacagtgagctgcaggacttccagaaggtgccgatgcaaacaggcattttgcctggctgtgagccatgccacaagaaggtgtgtgcccatggcacatgccagcccagcagccaggcaggcttcacctgcgagtgccaggaaggatggatggggcccctctgtgaccaacggaccaatgacccttgccttggaaataaatgcgtacatggcacctgcttgcccatcaatgcgttctcctacagctgtaagtgcttggagggccatggaggtgtcctctgtgatgaagaggaggatctgtttaacccatgccaggcgatcaagtgcaagcacgggaagtgcaggctttcaggtctggggcagccctactgtgaatgcagcagtggatacacgggggacagctgtgatcgagaaatctcttgtcgaggggaaaggataagagattattaccaaaagcagcagggctatgctgcttgccaaacaaccaagaaggtgtcccgattagagtgcagaggtgggtgtgcaggagggcagtgctgtggaccgctgaggagcaagcggcggaaatactctttcgaatgcactgacggctcctcctttgtggacgaggttgagaaagtggtgaagtgcggctgtacgaggtgtgtgtcctaaacacactcccggcagctctgtctttggaaaaggttgtatacttcttgaccatgtgggactaatgaatgcttcatagtggaaatatttgaaatatattgtaaaatacagaacagacttatttttattatgagaataaagactttttttctgcatttg

SEQ ID NO: 13520 - DNA, 4164 bp, Homo sapiens
cgcctaatcttcacccgctgctaggctcgtttaatgagtcttctgagagctaaggagtcctcggattcattcaaagcattctacaatgaacgctaggggggaaaaagaacaaacaaaatacatttcaaatataggattcaattacttttcactactcaatgatgtgtcaaaggcacgctgtgttttgttttgagggcggggagatgacaggagggaatcctgggcccccattggctcgccgctcgccgctgcagttgagctccagccgctccgagagcattattgatctgaagggtaaatgtggagggagccacagagaggggtccaggcttttctgagaagagaggcagcctcttccaggaagaaagtggtgtctactggctgcccggcctggagaaccttctttgaatgaaaacggacaaaatgcaaagcagtgtgttggcacagtgatttggaaaggggaaacagaagagaagggtctcaccttccgcgcaaggctgagctgttggcaccctgctgcggccgtcggtgctgctgctcctgcagctgccttttctgccatcagctttgttacctaacagcttggctcttttgggaaatatagacaagctggaacccaggagcagttgggagttttaaagaatgccagcctttttaaagctttgatgtccagtgctatagaatcaagttactgtggaggtcaaaacaatttgagatacataagctggccttagaaaataaattgcctctaacttacagtgaggagctcaacataacagggaaaaggagcacaggatgcagctacttggagggtgttgattgaaaacttcgatctccccaccccattcacggttgatttgacggatttctcaccttgttcacagagaaaatttcaattaaggcccctttagatggaatataatacagcagaagccttttcatcaaaaggattaatgcctgcatcatcatttctgcaataaaacaagaagctaagcggtggaggccacagacacctcaaacctggattccacaattctacgttaagtgttggagtttttattactctgctgtaggaaagcctttgccaatgcttacaaggaactgtttatccctgcttctctgggttctgtttgatggaggtctcctaacaccactacaaccacagccacagcagactttagccacagagccaagagaaaatgttatccatctgccaggacaacggtcacatttccaacgtgttaaacgtggctgggtatggaatcaattttttgtgctggaagaatacgtgggctccgagcctcagtatgtgggaaagctccattccgacttagacaagggagagggcactgtgaaatacaccctctcaggagatggcgctggcaccgtttttaccattgatgaaaccacaggggacattcatgcaataaggagcctagatagagaagagaaacctttctacactcttcgtgctcaggctgtggacatagaaaccagaaagcccctggagcctgaatcagaattcatcatcaaagtgcaggatattaatgataatgagccaaagtttttggatggaccttatgttgctactgttccagaaatgtctcctgtgggtgcatatgtactccaggtcaaggccacagatgcagatgacccgacctatggaaacagtgccagagtcgtttacagcattcttcagggacaaccttatttctctattgatcccaagacaggtgttattagaacagctttgccaaacatggacagagaagtcaaagaacaatatcaagtactcatccaagccaaggatatgggaggacagcttggaggattagccggaacaacaatagtcaacatcactctcaccgatgtcaatgacaatccacctcgattccccaaaagcatcttccacttgaaagttcctgagtcttcccctattggttcagctattggaagaataagagctgtggatcctgattttggacaaaatgcagaaattgaatacaatattgttccaggagatgggggaaatttgtttgacatcgtcacagatgaggatacacaagagggagtcatcaaattgaaaaagcctttagattttgaaacaaagaaggcatacactttcaaagttgaggcttccaaccttcaccttgaccaccggtttcactcggcgggccctttcaaagacacagctacggtgaagatcagcgtgctggacgtagatgagccaccggttttcagcaagccgctctacaccatggaggtttatgaagacactccggtagggaccatcattggcgctgtcactgctcaagacctggatgtaggcagcagtgctgttaggtacttcatagattggaagagtgatggggacagctactttacaatagatggaaatgaaggaaccatcgccactaatgaattactagacagagaaagcactgcgcagtataatttctccataattgcgagtaaagttagtaaccctttattgaccagcaaagtcaatatactgattaatgtcttagatgtaaatgaatttcctccagaaatatctgtgccatatgagacagccgtgtgtgaaaatgccaagccaggacagataattcagatagtcagtgctgcagaccgagatctttcacctgctgggcaacaattctcctttagattatcacctgaggctgctatcaaaccaaattttacagttcgtgacttcagaaacaacacagcggggattgaaacccgaagaaatggatacagccgcaggcagcaagagttgtatttcctccctgttgtaatagaagacagcagctaccctgtccagagcagcacaaacacaatgactattcgagtctgtagatgtgactctgatggcaccatcctgtcttgtaatgtggaagcaatttttctacctgtaggacttagcactggggcgttgattgcaattctactatgcattgttatactcttagccatagttgtactgtatgtagcactgcgaaggcagaagaaaaaagacaccctgatgacctctaaagaagacatcagagacaacgtcatccattacgatgatgaaggaggtggggaggaagatacccaggctttcgacatcggggctctgagaaacccaaaagtgattgaggagaacaaaattcgcagggatataaaaccagactctctctgtttacctcgtcagagaccacccatggaagataacacagacataagggatttcattcatcaaaggctacaggaaaatgacgtggacccaactgccccaccatacgattcactggccacatatgcctacgaagggagtgggtccgtggcagagtccctcagctctatagactctctcaccacagaagccgaccaggactatgactatctgacagactggggaccccgctttaaagtcttggcagacatgtttggcgaagaagagagttataaccctgataaagtcacttaagggagtcgtggaggctaaaatacaaccgagaggggagatttttaaaaaagaaaaagaaacacaaatattaatagaaatctctctcacacacacacacacacacaaacacacacacacacacacactctttctgggacaagattcctttgattacctggtttctagtaagttactaaattaatcatattgtcagttttggtttattctgccaacaagagatacatcctataatgtgtacttgctttgttttgttgttttgttttttcacaatcacactgagacaagctcaggcctattcaatacaatttactgacatgacaacctagaacgaagatagctatgtggcatcacggtggaagagtgttagatttttcttaattccactaaagtgcctattgaaactcttatcatttaaagtggtgtacagtacactctgctgtgatggtattgcgggattcagagataaagacataaaacagacaccgtctttatgtcaagaagcaatagcgacactctgactctcctcattccttttgagaacaaaagaagaacactttctgatctccaccttcttctaattcaaaaggttttctttttcttttttaaactgtatgctaaaacgtatttgtttatcctatcctttcagaaaattgaaataaatatgaaaatatcaagttcaatatgtaagtccc

SEQ ID NO: 13521 - DNA, 4246 bp, Homo sapiens
gctctcactctggctgggagcagaaggcagcctcggtctctgggcggcggcggcggcccactctgccctggccgcgctgtgtggtgaccgcaggccccagacatgagggcggcccgtgctctgctgcccctgctgctgcaggcctgctggacagccgcgcaggatgagccggagaccccgagggccgtggccttccaggactgccccgtggacctgttctttgtgctggacacctctgagagcgtggccctgaggctgaagccctacggggccctcgtggacaaagtcaagtccttcaccaagcgcttcatcgacaacctgagggacaggtactaccgctgtgaccgaaacctggtgtggaacgcaggcgcgctgcactacagtgacgaggtggagatcatccaaggcctcacgcgcatgcctggcggccgcgacgcactcaaaagcagcgtggacgcggtcaagtactttgggaagggcacctacaccgactgcgctatcaagaaggggctggagcagctcctcgtggggggctcccacctgaaggagaataagtacctgattgtggtgaccgacgggcaccccctggagggctacaaggaaccctgtggggggctggaggatgctgtgaacgaggccaagcacctgggcgtcaaagtcttctcggtggccatcacacccgaccacctggagccgcgtctgagcatcatcgccacggaccacacgtaccggcgcaacttcacggcggctgactggggccagagccgcgacgcagaggaggccatcagccagaccatcgacaccatcgtggacatgatcaaaaataacgtggagcaagtgtgctgctccttcgaatgccagcctgcaagaggacctccggggctccggggcgaccccggctttgagggagaacgaggcaagccggggctcccaggagagaagggagaagccggagatcctggaagacccggggacctcggacctgttgggtaccagggaatgaagggagaaaaagggagccgtggggagaagggctccaggggacccaagggctacaagggagagaagggcaagcgtggcatcgacggggtggacggcgtgaagggggagatggggtacccaggcctgccaggctgcaagggctcgcccgggtttgacggcattcaaggaccccctggccccaagggagaccccggtgcctttggactgaaaggagaaaagggcgagcctggagctgacggggaggcggggagaccagggagctcgggaccatctggagacgagggccagccgggagagcctgggccccccggagagaaaggagaggcgggcgacgaggggaacccaggacctgacggtgcccccggggagcggggtggccctggagagagaggaccacgggggaccccaggcacgcggggaccaagaggagaccctggtgaagctggcccgcagggtgatcagggaagagaaggccccgttggtgtccctggagacccgggcgaggctggccctatcggacctaaaggctaccgaggcgatgagggtcccccagggtccgagggtgccagaggagccccaggacctgccggaccccctggagacccggggctgatgggtgaaaggggagaagacggccccgctggaaatggcaccgagggcttccccggcttccccgggtatccgggcaacaggggcgctcccgggataaacggcacgaagggctaccccggcctcaagggggacgagggagaagccggggaccccggagacgataacaacgacattgcaccccgaggagtcaaaggagcaaaggggtaccggggtcccgagggcccccagggacccccaggacaccaaggaccgcctgggccggacgaatgcgagattttggacatcatcatgaaaatgtgctcttgctgtgaatgcaagtgcggccccatcgacctcctgttcgtgctggacagctcagagagcattggcctgcagaacttcgagattgccaaggacttcgtcgtcaaggtcatcgaccggctgagccgggacgagctggtcaagttcgagccagggcagtcgtacgcgggtgtggtgcagtacagccacagccagatgcaggagcacgtgagcctgcgcagccccagcatccggaacgtgcaggagctcaaggaagccatcaagagcctgcagtggatggcgggcggcaccttcacgggggaggccctgcagtacacgcgggaccagctgctgccgcccagcccgaacaaccgcatcgccctggtcatcactgacgggcgctcagacactcagagggacaccacaccgctcaacgtgctctgcagccccggcatccaggtggtctccgtgggcatcaaagacgtgtttgacttcatcccaggctcagaccagctcaatgtcatttcttgccaaggcctggcaccatcccagggccggcccggcctctcgctggtcaaggagaactatgcagagctgctggaggatgccttcctgaagaatgtcaccgcccagatctgcatagacaagaagtgtccagattacacctgccccatcacgttctcctccccggctgacatcaccatcctgctggacggctccgccagcgtgggcagccacaactttgacaccaccaagcgcttcgccaagcgcctggccgagcgcttcctcacagcgggcaggacggaccccgcccacgacgtgcgggtggcggtggtgcagtacagcggcacgggccagcagcgcccagagcgggcgtcgctgcagttcctgcagaactacacggccctggccagtgccgtcgatgccatggactttatcaacgacgccaccgacgtcaacgatgccctgggctatgtgacccgcttctaccgcgaggcctcgtccggcgctgccaagaagaggctgctgctcttctcagatggcaactcgcagggcgccacgcccgctgccatcgagaaggccgtgcaggaagcccagcgggcaggcatcgagatcttcgtggtggtcgtgggccgccaggtgaatgagccccacatccgcgtcctggtcaccggcaagacggccgagtacgacgtggcctacggcgagagccacctgttccgtgtccccagctaccaggccctgctccgcggtgtcttccaccagacagtctccaggaaggtggcgctgggctagcccaccctgcacgccggcaccaaaccctgtcctcccacccctccccactcatcactaaacagagtaaaatgtgatgcgaattttcccgaccaacctgattcgctagattttttttaaggaaaagcttggaaagccaggacacaacgctgctgcctgctttgtgcagggtcctccggggctcagccctgagttggcatcacctgcgcagggccctctggggctcagccctgagctagtgtcacctgcacagggccctctgaggctcagccctgagctggcgtcacctgtgcagggccctctggggctcagccctgagctggcctcacctgggttccccaccccgggctctcctgccctgccctcctgcccgccctccctcctgcctgcgcagctccttccctaggcacctctgtgctgcatcccaccagcctgagcaagacgccctctcggggcctgtgccgcactagcctccctctcctctgtccccatagctggtttttcccaccaatcctcacctaacagttactttacaattaaactcaaagcaagctcttctcctcagcttggggcagccattggcctctgtctcgttttgggaaaccaaggtcaggaggccgttgcagacataaatctcggcgactcggccccgtctcctgagggtcctgctggtgaccggcctggaccttggccctacagccctggaggccgctgctgaccagcactgaccccgacctcagagagtactcgcaggggcgctggctgcactcaagaccctcgagattaacggtgctaaccccgtctgctcctccctcccgcagagactggggcctggactggacatgagagccccttggtgccacagagggctgtgtcttactagaaacaacgcaaacctctccttcctcagaatagtgatgtgttcgacgttttatcaaaggccccctttctatgttcatgttagttttgctccttctgtgtttttttctgaaccatatccatgttgctgacttttccaaataaaggttttcactcctctaaaaaaaaaaaaaaaaaaaaa

SEQ ID NO: 13522 - DNA, 4464 bp, Homo sapiens
agaaaagaagtgagagctactttgaaaggacaaccatttttctttccgctaatttataatggttttgaagtggttgttcattctcaaacatagacttttaaatgttaggtctttcctataactctttgttattggaagtttcaaggatttggacactcaattaaggattctgtcctctcctcattcctttggttttggcccaaatgattatgtttcctctttttgggaagatttctctgggtattttgatatttgtcctgatagaaggagactttccatcattaacagcacaaacctacttatctatagaggagatccaagaacccaagagtgcagtttcttttctcctgcctgaagaatcaacagacctttctctagctaccaaaaagaaacagcctctggaccgcagagaaactgaaagacagtggttaatcagaaggcggagatctattctgtttcctaatggagtgaaaatctgcccagatgaaagtgttgcagaggctgtggcaaatcatgtgaagtattttaaagtccgagtgtgtcaggaagctgtctgggaagccttcaggactttttgggatcgacttcctgggcgtgaggaatatcattactggatgaatttgtgtgaggatggagtcacaagtatatttgaaatgggcacaaattttagtgaatctgtggaacatagaagcttaatcatgaagaaactgacttatgcaaaggaaactgtaagcagctctgaactgtcttctccagttcctgttggtgatacttcaacattgggagacactactctcagtgttccacatccagaggtggacgcctatgaaggtgcctcagagagcagcttggaaaggccagaggagagtattagcaatgaaattgagaatgtgatagaagaagccacaaaaccagcaggtgaacagattgcagaattcagtatccaccttttggggaagcagtacagggaagaactacaggattcctccagctttcaccaccagcaccttgaagaagaatttatttcagaggttgaaaatgcatttactgggttaccaggctacaaggaaattcgtgtacttgaatttaggtcccccaaggaaaatgacagtggcgtagatgtttactatgcagttaccttcaatggtgaggccatcagcaataccacctgggacctcattagccttcactccaacaaggtggaaaaccatggccttgtggaactggatgataaacccactgttgtttatacaatcagtaacttcagagattatattgctgagacattgcagcagaattttttgctggggaactcttccttgaatccagatcctgattccctgcagcttatcaatgtgagaggagttttgcgtcaccaaactgaagatctagtttggaacacccaaagttcaagtcttcaggcaacgccgtcatctattctggataatacctttcaagctgcatggccctcagcagatgaatccatcaccagcagtattccaccacttgatttcagctctggtcctccctcagccactggcagggaactctggtcagaaagtcctttgggtgatttagtgtctacacacaaattagcctttccctcgaagatgggcctcagctcttccccagaggttttagaggttagcagcttgactcttcattctgtcaccccggcagtgcttcagactggcttgcctgtggcttctgaggaaaggacttctggatctcacttggtagaagatggattagccaatgttgaagagtcagaagattttctttctattgattcattgccttcaagttcattcactcaacctgtgccaaaagaaacaataccatccatggaagactctgatgtgtccttaacatcttcaccatatctgacctcttctataccttttggcttggactccttgacctccaaagtcaaagaccaattaaaagtgagccctttcctgccagatgcatccatggaaaaagagttaatatttgacggtggtttaggttcagggtctgggcaaaaggtagatctgattacttggccatggagtgagacttcatcagagaagagcgctgaaccactgtccaagccgtggcttgaagatgatgattcacttttgccagctgagattgaagacaagaaactagttttagttgacaaaatggattccacagaccaaattagtaagcactcaaaatatgaacatgatgacagatccacacactttccagaggaagagcctcttagtgggcctgctgtgcccatcttcgcagatactgcagctgaatctgcgtctctaaccctccccaagcacatatcagaagtacctggtgttgatgattactcagttaccaaagcacctcttatactgacatctgtagcaatctctgcctctactgataaatcagatcaggcagatgccatcctaagggaggatatggaacaaattactgagtcatccaactatgaatggtttgacagtgaggtttcaatggtaaagccagatatgcaaactttgtggactatattgccagaatcagagagagtttggacaagaacttcttccctagagaaattgtccagagacatattggcaagtacaccacagagtgctgacaggctctggttatctgtgacacagtctaccaaattgcctccaaccacaatctccaccctgctagaggatgaagtaattatgggtgtacaggatatttcgttagaactggaccggataggcacagattactatcagcctgagcaagtccaagagcaaaatggcaaggttggtagttatgtggaaatgtcaacaagtgttcactccacagagatggttagtgtggcttggcccacagaaggaggagatgacttgagttatacccagacttcaggagctttggtggttttcttcagcctccgagtgactaacatgatgttttcagaagatctgtttaataaaaactccttggagtataaagccctggagcaaagattcttagaattgctggttccctatctccagtcaaatctcacggggttccagaacttagaaatcctcaacttcagaaatggcagcattgtggtgaacagtcgaatgaagtttgccaattctgtccctcctaacgtcaacaatgcggtgtacatgattctggaagacttttgtaccactgcctacaataccatgaacttggctattgataaatactctcttgatgtggaatcaggtgatgaagccaacccttgcaagtttcaggcctgtaatgaattttcagagtgtctggtcaacccctggagtggagaagcaaagtgcagatgcttccctggatacctgagtgtggaagaacggccctgtcagagtctctgtgacctacagcctgacttctgcttgaatgatggaaagtgtgacattatgcctgggcacggggccatttgtaggtgccgggtgggtgagaactggtggtaccgaggcaagcactgtgaggaatttgtgtctgagcccgtgatcataggcatcactattgcctccgtggttggacttcttgtcatcttttctgctatcatctacttcttcatcaggactcttcaagcacaccatgacaggagtgaaagagagagtcccttcagtggctccagcaggcagcctgacagcctctcatctattgagaatgctgtgaagtacaaccccgtgtatgaaagtcacagggctggatgtgagaagtatgagggaccctatcctcagcatcccttctacagctctgctagcggagacgtgattggtgggctgagcagagaagaaatcagacagatgtatgagagcagtgagctttccagagaggaaattcaagagagaatgagagttttggaactgtatgccaatgatcctgagtttgcagcttttgtgagagagcaacaagtggaagaggtttaaccaaaactcctgttctgaaactgattagaagcctggagaagatggagattacttgttacttatgtcatataattaacctggattttaaacactgttggaagaagagttttctatgaaaaaattaaatatagggcacactgtttttttttcagcttaagttttcagaatgtagtaagagatgttaccatttttatttctataaagactgaatgctgtgtttaaataaattgaaaactacgtaaactctggaaagtattctataagaaaaagctggacctaggatttagggctgcagttgctgtctgcttctgaatcactgggggtgtctcctaagaactgtgcctcgggtttttcaataggaaaataaggtgagactcttacatggagaagtctggcttagtaagggaatattttggagcatatttgttattgttgggtagaaggggaaacctttgaaatagtcttaatggatagtttataatcaggcattcatctaaataaaattctttcttttttttgatcaaaaaaaaaaaaa

SEQ ID NO: 13523 - DNA, 2114 bp, Homo sapiens
gtttttgtgtcctgccaggcaccgtggtctcatccgcctgcacagctgagtccagtgggagctgacgccatgaccctcaccctctcagtcctgatttgcctcgggctgagtgtgggccccaggacctgcgtgcaggcaggcaccctccccaaacccaccctctgggctgagccagcctctgtgatagctcgggggaagcccgtgaccctctggtgtcaggggcccctggagactgaggagtaccgtctggataaggagggactcccatgggcccggaagagacagaacccactggagcctggagccaaggccaagttccacattccatccacggtgtatgacagtgcagggcgataccgctgctactatgagacccctgcaggctggtcagagcccagtgaccccctggagctggtggcgacaggattctatgcagaacccactcttttagccctgccgagtcctgtggtggcctcaggaggaaatgtgaccctccagtgtgatacactggacggacttctcacgtttgttcttgttgaggaagaacagaagctccccaggaccctgtactcacagaagctccccaaagggccatcccaggccctgttccctgtgggtcccgtgacccccagctgcaggtggaggttcagatgctattactattacaggaaaaaccctcaggtgtggtcgaaccccagtgacctcctggagattctggtcccaggcgtgtctaggaagccctccctcctgatcccgcagggctctgtcgtggcccgcggaggcagcctgaccctgcagtgtcgctctgatgtcggctatgacatattcgttctgtacaaggagggggaacatgacctcgtccagggctctggccagcagccccaggctgggctctcccaggccaacttcaccctgggccctgtgagccgctcccacgggggccagtacagatgctacggtgcacacaacctctcccctaggtggtcggcccccagcgaccccctggacatcctgatcgcaggactgatccctgacatacccgccctctcggtgcagccgggccccaaggtggcctcaggagagaacgtgaccctgctgtgtcagtcatggcatcagatagacactttctttttgaccaaggagggggcagcccatcccccgctgtgtctaaagtcaaagtaccagtcttatagacaccaggctgaattctccatgagtcctgtgacctcagcccagggtggaacctaccgatgctacagcgcaatcaggtcctacccctacctgctgtccagccctagttacccccaggagctcgtggtctcaggaccctctggggatcccagcctctcacctacaggctccacccccacacctggccctgaggaccagcccctcacccccacggggttggatccccagagtggtctgggaaggcacctgggggttgtgactggggtctcagtggccttcgtcctgctgctgttcctcctcctcttcctcctcctccgacatcggcatcagagcaaacacaggacatcggcccatttctaccgtcctgcaggggctgcggggccagagcccaaggaccagggcctgcagaagagggccagcccagttgctgacatccaggaggaaattctcaatgctgccgtgaaggacacacagcccaaggacggggtggagatggatgctcgggctgctgcatctgaagccccccaggatgtgacctacgcccagctacacagcttgaccctcagacgggaggcaactgagcctcctccatcccaggaaagggaacctccagctgaacccagcatctacgcccccctggccatccactagcccacgggggacccagatctcatactcaacagaaggagactcagagactccagaaggcacaggagctgcccccagtggacaccaatgaaccccagccagcctggacccctaacaaagaccaccaggacatcctgggaactctgggactcactagattctgcagtcaaagatgactaatatccttgcatttttgaaatgaagccacagacttctcaataaatcaatgagctgagaaaactgaaacaaaaaaaaaaaaaaaaaaaaaaaaaaaa

SEQ ID NO: 13524 - DNA, 6834 bp, Homo sapiens
atgcggcacggcgtcgcctgggcgctgctggtggccgcggccctggggcttggggcgcgcggggtgcgcggcgcggtggcccttgccgacttctacccgttcggcgccgagcgcggcgacgccgtcacccccaagcaggacgacggcggctcggggctgcggccgctctcggtgcccttcccgttcttcggtgccgagcactccggactctacgtgaacaacaacgggatcatctccttcctgaaggaggtttctcagttcaccccagtggccttccccattgccaaggaccgctgcgtggtggcagccttctgggcagatgtggacaaccggcgtgcaggcgacgtgtactaccgggaggccaccgacccagccatgctgcgccgagccacggaggacgtcaggcactacttccccgagctcctggacttcaatgccacctgggtttttgttgccacctggtaccgagtgaccttctttggaggcagttcctcatcccctgtcaacacattccagactgtgctcatcacagacggcaagctctccttcaccatcttcaactatgagtccatcgtgtggaccacaggcacacacgccagcagcgggggcaacgccactggcctcgggggcatcgcagcccaggctggcttcaacgcaggcgatgggcagcgttacttcagtatccccggctcgcgcacagcagacatggccgaggtggagaccaccaccaacgtgggtgtgcccgggcgctgggcgttcagaatcgatgatgcccaggtgcgcgtggggggctgcggccatacaacgtccgtgtgcctggccctgcgcccctgcctcaacggcggcaagtgcatcgacgactgcgtcacgggcaacccctcctacacctgctcctgcctctcgggcttcacggggcggaggtgccacctggacgtgaacgaatgtgcctcccagccctgtcagaatggtgggacctgtactcacggcatcaacagtttccgctgccagtgcccggctggctttgggggacccacctgtgagacagcccaatccccctgtgacaccaaagagtgtcaacatggtggccagtgccaggtggagaatggctctgcggtgtgtgtgtgccaggccggatacaccggagcagcctgcgagatggatgtggacgactgcagccctgacccctgcctgaatggaggctcttgtgttgacctagtggggaattacacctgcttgtgtgccgagcccttcaagggacttcgctgtgagacaggagaccatccagtgccagacgcctgcctctcggccccttgccacaatgggggcacctgtgtggatgcggaccagggctacgtgtgcgagtgccccgaaggcttcatgggcctggactgcagggagagagtccccgatgactgtgagtgccgcaacggaggcagatgcctgggcgccaacaccaccctctgccagtgccccctgggattctttgggcttctctgtgaatttgaaatcacagccatgccctgcaacatgaacacacagtgcccagatgggggctactgcatggagcacggcgggagctacctctgcgtctgccacaccgaccacaatgccagccactccctgccatcaccctgcgactcggacccctgcttcaacggaggctcctgcgatgcccatgacgactcctacacctgcgagtgcccgcgcgggttccacggcaagcactgcgagaaagcccggccacacctgtgcagctcagggccctgccggaacgggggcacgtgcaaggaggcgggcggcgagtaccactgcagctgcccctaccgcttcactgggaggcactgtgagatcgggaagccagactcgtgtgcctctggcccctgtcacaacggcggcacctgcttccactacattggcaaatacaagtgtgactgtcccccaggcttctccgggcggcactgcgagatagccccctccccctgcttccggagcccgtgtgtgaatgggggcacctgcgaggaccgggacacggatttcttctgccactgccaagcagggtacatgggacgccggtgccaggcagaggtggactgcggccccccggaggaggtgaagcacgccacactgcgcttcaacggcacgcggctgggcgcggtggccctgtatgcatgtgaccgtggctacagcctgagcgcccccagccgcatccgggtctgccagccacacggtgtctggagtgagcctccccagtgccttgaaatcgatgagtgccggtctcagccgtgcctgcatgggggctcttgtcaggaccgcgttgctgggtacctgtgcctctgcagcacaggctatgagggcgcccactgtgagctggagagggatgagtgccgagctcacccgtgcagaaatggagggtcctgcaggaacctcccaggggcctatgtctgccggtgccctgcaggcttcgttggagtccactgtgagacagaggtggacgcctgcgactccagcccctgccagcatggaggccggtgtgagagcggcggcggggcctacctgtgcgtctgcccagagagcttcttcggctaccactgcgagacagtgagtgacccctgcttctccagcccctgtgggggccgtggctattgcctggccagcaacggctcccacagctgcacctgcaaagtgggctacacgggcgaggactgcgccaaagagctcttcccaccgacggccctcaagatggagagagtggaggagagtggggtctctatctcctggaacccgcccaatggtccagccgccaggcagatgcttgatggctacgcggtcacctacgtctcctccgacggctcctaccgccgcacagactttgtggacaggacccgctcctcgcaccagctccaggccctggcggccggcagggcctacaacatctccgtcttctcagtgaagcgaaacagtaacaacaagaatgacatcagcaggcctgccgtgctgctggcccgcacgcgaccccgccctgtggaaggcttcgaggtcaccaatgtgacggctagcaccatctcagtgcagtgggccctgcacaggatccgccatgccaccgtcagtggggtccgtgtgtccatccgccaccctgaggccctcagggaccaggccaccgatgtggacaggagtgtggacaggttcacctttagggccctgctgcctgggaagaggtacaccatccagctgaccaccctcagtgggctcaggggagaggagcaccccacagagagcctggccaccgcgccgacgcacgtgtggacccggcccctgcctccagcaaacctgaccgccgcccgagtcactgccacctctgcccacgtggtctgggatgccccgactccaggcagcttgctggaggcttatgtcatcaatgtgaccaccagccagagcaccaagagccgctatgtccccaacgggaagctggcgtcctacacggtgcgcgacctgctgccgggacggcggtaccagctctctgtgatagcagtgcagagcacggagctcgggccgcagcacagcgagcccgcccacctctacatcatcacctcccccagggatggcgctgacagacgctggcaccagggaggacaccaccctcgggtgctcaagaacagaccgcccccggcgcgcctgccggagctgcgcctgctcaatgaccacagcgcccccgagacccccacccagccccccaggttctcggagcttgtggacggcagaggaagagtgagcgccaggttcggtggctcacccagcaaagcagccaccgtgagatcacaacccacagcctcggcgcagctcgagaacatggaggaagcccccaagcgggtcagcctggccctccagctccctgaacacggcagcaaggacatcggaaacgtccctggcaactgttcagaaaacccctgtcagaacggaggcacttgtgtgccgggcgcagacgcccacagctgtgactgcgggccagggttcaaaggcagacgctgcgagctcgcctgtataaaggtgtcccgcccctgcacaaggctgttctccgagacaaaggcctttccagtctgggagggaggcgtctgtcaccacgtgtataaaagagtctaccgagttcaccaagacatctgcttcaaagagagctgtgaaagcacaagcctcaagaagaccccaaacaggaaacaaagtaagagtcagacactggagaaatcttaaggatttaagacgttcttgttacactccaccaacctcacgagtttctaacacccaggaagatgaggtctaaaaactggatgaaaaaggacaccctgagaaaaggtcctagctggagtcagtcccctctgtgacctctctcctcaggcctctagaggacagatggccaggcctgtgcacacaccagcccaccctgagagacccctctgggaccaaccacctgtgagtcctgcgatgcgtttaagcagcctgtgccctcacccaagctgcagttcctgaaggtgtagtctgtgtctctgcggatgagatgacagctcgccattccccggaatcagtgaggctgtcagtcagccacgcttctgcagtatgcagaaacctgttcttagactccaaagccagagaaagaattctcccttcgaggcccaacaaattgagaaggaactgtgatggaccacttccaaaacagagacgggggcaggggctgaagggcagagaccaggtgatgtcagaaggaaagccgggttgcagacacagccgcccctgctctggtcctccagcgtgtttatgacgctcgtgcaggtcgacgagccatcctatggactagttaacactaaggtggagttcagacttttttagacaacggcgcgactggcagcctttctctatcaagggtcagacggtaaacgttttcagctttgcagaccagaggtccctgtggctacagtagcgcagacacagccacaggcatgtcattgaatggctgcggctatgttccaataaaaacttatttacaataacaggtggtggccaaattggcccatgggccttatttggtgaaccctgttctatgagatcacctaggcttcagccttaaacagtggaagccatcccctgaatgacaagtcacaagggtatcaaagaaagacccctgaattttcatggaaaaagctattcagacccctgcttggaaagctaaggcacactgccacgaagcagcaaggacgccttacaagtctcagtgcaacagagatggacacctgggctgggctggacaatgtttaaggttccttttagtccatgactcaagtgatactgttttaggctatcaggtagtaaacacgatcttagacatccccatctttgtaagcagaacagtacggcacttcaccacatctgcttcccaccatgcttctaagcagctgtcttccccctgctaatgttacaaccaaagcagccaccccacctcctctcgtgttgagcctcacgaccgctgacccagctggaaagccagcgccctgccgcgtcaccctgactctgctcagagccagcattccagccacaaagagggcctccttcctttcctctttcataaaaatgttttttgaagagttagagtatattttaggctttttatctttattaaaatttcatgtgcatgtgtctgtgtattctgcaatttgtcattttcagaaagaaggaacaggcaattcgcgaagtttcacctgtactcccgagctgttccccaggctccagacccacttgagagcagaaggtggagctcaatgaagggtctcgagctcagcgaagggtcactgggtgaactgagagaaaccacgttcacaaacgcgtactgcggacttcctgccgccctgggacctgtcactgtttgtccatgtaagctacagcattactagcagatgctaagatcgagtgatatcactggaaaagtaggtgaatcctactaggaaactttctactccctactaggacctcaagcccctcagccacacagcaaatgctaatatgctccagtgttagcttagaagccttgtgtcaacaagaactggctcctgagtcccaagcttggtgccacacagcaaatgctaatatgctccagtgttagcttagaagccttgtgtcaacaagaactggctcctgagtcccaagcttggtgccacacagcaaatgctaatatgctccagtgttagcttagaagccttgtgtcaacaagaactggctcctgagtcccaagtgctgtcacaggacttgcccattgggatgttttccacattaaatatcaagtaaaaagacttcctggtgctcaggaattacagttcgttcttgaaacattccaaagaggccaccacagcttttcccatgtggcttcttttaaaaactcaaatggcttccttgaaaatactcaaagtccacccaaggaaattagtaataatagaatcagaaaactgtcaggagcataaagatttctgtatcaaaatgaaagaagcaatcctgagttgctgaattacccatctgctaatgaaaccgggatggactgatcatctaaccaagtgcagactgaggattctacttagtcctccgactgggtacaacaacagcctaggttctagggagggtggcagtgaccgggatgccacaatggaagagaaaatgaaaacactggcacagtgaaatgtctcatttccaaacagttttgcctatggccaagcaaggcaataaagacaaactctcccttttccccattgcgtgtgggctgccaggtacaagtaagggaatctttgctgtgcccactgtcct

SEQ ID NO: 13525 - DNA, 1695 bp, Homo sapiens
atgtggttctgcgcgtgtgcggacggctgtctgttaactccgcggtcagttcccggactggtggctggtctgcagggttgacctgcgcaatgcagaggctgcaggtagtgctgggccacctgaggggtccggccgattccggctggatgccgcaggccgcgccttgcctgagcggtgccccgcaggcctcggccgcggacgtggtggtggtgcacgggcggcgcacggccatctgccgggcgggccgcggcggcttcaaggacaccacccccgacgagcttctctcggcagtcatgaccgcggttctcaaggacgtgaatctgaggccggaacagctgggggacatctgtgtcggaaatgtgctgcagcctggggccggggcaatcatggcccgaatcgcccagtttctgagtgacatcccggagactgtgcctttgtccactgtcaatagacagtgttcgtcggggctacaggcagtggccagcatagcaggtggcatcagaaatgggtcttatgacattggcatggcctgtggggtggagtccatgtccctggctgacagagggaaccctggaaatattacttcgcgcttgatggagaaggagaaggccagagattgcctgattcctatggggataacctctgagaatgtggctgagcggtttggcatttcacgggagaagcaggatacctttgccctggcttcccagcagaaggcagcaagagcccagagcaagggctgtttccaagctgagattgtgcctgtgaccaccacggtccatgatgacaagggcaccaagaggagcatcactgtgacccaggatgagggtatccgccccagcaccaccatggagggcctggccaaactgaagcctgccttcaagaaagatggttctaccacagctggaaactctagccaggtgagtgatggggcagctgccatcctgctggcccggaggtccaaggcagaagagttgggccttcccatccttggggtcctgaggtcttatgcagtggttggggtcccacctgacatcatgggcattggacctgcctatgccatcccagtagctttgcaaaaagcagggctgacagtgagtgacgtggacatcttcgagatcaatgaggcctttgcaagccaggctgcctactgtgtggagaagctacgactcccccctgagaaggtgaaccccctggggggtgcagtggccttagggcacccactgggctgcactggggcacgacaggtcatcacgctgctcaatgagctgaagcgccgtgggaagagggcatacggagtggtgtccatgtgcatcgggactggaatgggagccgctgccgtctttgaataccctgggaactgagtgaggtcccaggctggaggcgctacgcagacagtcctgctgctctagcagcaaggcagtaacaccacaaaagcaaaaccacatgggaaaactcagcactggtggtggtggcagtggacagatcaaggcacttcaactcatttggaaaatgtgaacactgatgacatggtataggagtgggtggggtgttgagccacccatcagaccctctttagctgtgcaagataaaagcagcctgggtcacccaggccacaaggccatggttaattcttaaggcaaggcaaatccatggatgagaagtgcaatgggcatagtaaaagtgcatgaattt

SEQ ID NO: 13526 - DNA, 3169 bp, Homo sapiens
agcggaatcgtgagaaggaccggttccctccgtgctgcttcctccccgtgcagtgctgggtgtgcgtgtgcgagtgtgagtgcaagtgcgcgcgcgcacgggtgcgagtgtgtgtgagtgtgagcgtgtgtctgtgtgtgcgtgcgcggccgccctgcctctgcccgctccccgggcgcggagccgcgggtttcatggggcgattgcagcgattcccccacccagagcgacctgcgggcagcggcggcagtggcaggagccgcctttccgattccctacgatgcgggtgctgagctatggcaaagggcagcgaagtgacgagcgagacccgcgtacgactgtgaaagccacctggagccaccttgccgggattgtacctgcaggcagaaagtcttcctacgaccgtcttttcccttagaggcaccagaatccctgtaaccattcatccaggtgttgagaagatatgtagcagccgagcacccatcttttgacaccgtcctctgaaatcagctttggagatgctttcactctgtccgtcttctgcagcagccaggcagagtgccgactccttcacagccgtgaggaactcttcaggctccagaagctcttaaacctgatctacaatggaaaaaattcttttttatctgtttctcattggcatagcagtgaaagctcagatctgtccaaagcgttgtgtctgtcagattttgtctcctaatcttgcaaccctttgtgccaagaaagggcttttatttgttccaccaaacattgacagaagaactgtggaactgcggttggcagacaattttgttacaaatattaaaaggaaagattttgccaatatgaccagcttggtggacctgactctatccaggaatacaataagttttattacacctcatgctttcgctgacctacgaaatttgagggctttgcatttgaatagcaacagattgactaaaattacaaatgatatgttcagtggtctttccaatcttcatcatttgatactgaacaacaatcagctgactttaatttcctctacagcgtttgatgatgtcttcgcccttgaggagctggatctgtcctataataatctagaaaccattccttgggatgctgttgagaagatggttagcttgcatacccttagtttggatcacaatatgattgataacattcctaaggggaccttctcccatttgcacaagatgactcggttagatgtgacatcaaataaattgcagaagctaccacctgaccctctctttcagcgagctcaggtactagcaacctcaggaatcataagcccatctacttttgcattaagttttggtggaaacccattgcattgcaattgtgaattgttgtggttgaggcgtctgtccagagaagatgacttagagacctgtgcttctcctccacttttaactggccgctacttttggtcaattcctgaagaagagtttttgtgtgagcctcctctcattactcgtcatacacatgagatgagagtcctggagggacaaagggcaacactgaggtgcaaagccaggggagaccctgagcctgcaattcactggatttctcctgaagggaagcttatttcaaatgcaacaagatctctggtgtatgataacggaacacttgacattcttatcacaactgtaaaggatacaggtgcttttacctgcattgcttccaatcctgctggggaagcaacacaaatagtggatcttcatataattaagctccctcacttactaaatagtacaaaccatatccatgagcctgatcctggttcttcagatatctcaacttctaccaagtcaggttctaatacaagcagtagtaatggtgatactaaattgagtcaagataaaattgtggtggcagaagctacatcatcaacggcactacttaaatttaattttcaaagaaatatccctggaatacgtatgtttcaaatccagtacaatggtacttatgatgacacccttgtttacagaatgatacctcctacgagcaaaacttttctggtcaataatctggctgctggaactatgtatgacttgtgtgtcttggccatatatgatgatggcatcacttccctcactgccacaagagtcgtgggttgcatccagtttactacggaacaggattatgtgcgttgccatttcatgcagtcccagtttttgggaggcaccatgattattattattggtggaatcattgtagcatctgtgctggtattcatcattattctgatgatccggtataaggtttgcaacaataatgggcaacacaaggtcaccaaggttagcaatgtttattcccaaactaacggggctcaaatacaaggctgtagtgtaacgctgccccagtccgtgtccaaacaagctgtgggacacgaagagaatgcccagtgttgtaaagctaccagtgacaatgtgattcaatcttcagaaacttgttcgagtcaggactcctctaccactacctctgctttgcctccttcctggacttcaagcacttctgtgtcccaaaagcagaaaagaaagactggcacaaagccaagtacagaaccacagaatgaagccgtcacaaatgttgaatcccaaaacactaacaggaacaactcaactgccttgcagttagctagccgtcctcccgattctgtcacagaggggcccacgtctaaaagagcacatataaagccaaatgctttgctgactaatgttgaccagattgtccaggaaacacagaggctggagttaatctgaagagcaccacttctcctctctctcctgaaaaaatttgccactgatatttttactggataaaattcaaaaatgtttcaattcacaaaggctaattgttgaactggtgtcatagaagaaattgtctacaggagccaaggtgaaagtctctgatgacggcggaactggctccattagaccatggttcatcctcttttaaaaccaaatttttttttcttctggcctacaagtattttttttttaaaaaagaaaaaaagcctacattggcatcaagttctgtatcaatccatcttacattgccatccatgatttaacagactgtagaatcttgaataatctatatcactttaacaaataaatgttttactatgacaaaaaaaaaaaaaaaa

SEQ ID NO: 13527 - DNA, 1032 bp, Homo sapiens
gtgagaaggaaactgcaagagtggggcagagaaccagagtgtcagagcaaaacctcctctatctgcacatcctggggacgaaccgggcagccggagagctgcggccggcccagtcccgctccgcctttgaagggtaaaacccaaggcggggccttggttctggcagaagggacgctatgaccgcagaattcctctccctgctttgcctcgggctgtgtctgggctacgaagatgagaaaaagaatgagaaaccgcccaagccctccctccacgcctggcccagctcggtggttgaagccgagagcaatgtgaccctgaagtgtcaggctcattcccagaatgtgacatttgtgctgcgcaaggtgaacgactctgggtacaagcaggaacagagctcggcagaaaacgaagctgaattccccttcacggacctgaagcctaaggatgctgggaggtacttttgtgcctacaagacaacagcctcccatgagtggtcagaaagcagtgaacacttgcagctggtggtcacagataaacacgatgaacttgaagctccctcaatgaaaacagacaccagaaccatctttgtcgccatcttcagctgcatctccatccttctcctcttcctctcagtcttcatcatctacagatgcagccagcacggttcatcatctgaggaatccaccaagagaaccagccattccaaacttccggagcaggaggctgccgaggcagatttatccaatatggaaagggtatctctctcgacggcagacccccaaggagtgacctatgctgagctaagcaccagcgccctgtctgaggcagcttcagacaccacccaggagcccccaggatctcatgaatatgcggcactgaaagtgtagcaagaagacagccctggccactaaaggaggggggatcgtgctggccaaggttatcggaaatctggagatgcagatactgtgtttccttgctcttcgtccatatcaataaaattaagtttctcgtcttaaaaaaaaaaaaaaaaaa

SEQ ID NO: 13528 - DNA, 5392 bp, Homo sapiens
aattcactaatgcattctgctctttttgagagcacagcttctcagatgtgctccttggagctggtgtgcagtgtcctgactgtaagatcaagtccaaacctgttttggaattgaggaaacttctcttttgatctcagcccttggtggtccaggtcttcatgctgctgtgggtgatattactggtcctggctcctgtcagtggacagtttgcaaggacacccaggcccattattttcctccagcctccatggaccacagtcttccaaggagagagagtgaccctcacttgcaagggatttcgcttctactcaccacagaaaacaaaatggtaccatcggtacctcgggaaagaaatactaagagaaaccccagacaatatccttgaggttcaggaatctggagagtacagatgccaggcccagggctcccctctcagtagccctgtgcacttggatttttcttcagcttcgctgatcctgcaagctccactttctgtgtttgaaggagactctgtggttctgaggtgccgggcaaaggcggaagtaacactgaataatactatttacaagaatgataatgtcctggcattccttaataaaagaactgacttccatattcctcatgcatgtctcaaggacaatggtgcatatcgctgtactggatataaggaaagttgttgccctgtttcttccaatacagtcaaaatccaagtccaagagccatttacacgtccagtgctgagagccagctccttccagcccatcagcgggaacccagtgaccctgacctgtgagacccagctctctctagagaggtcagatgtcccgctccggttccgcttcttcagagatgaccagaccctgggattaggctggagtctctccccgaatttccagattactgccatgtggagtaaagattcagggttctactggtgtaaggcagcaacaatgcctcacagcgtcatatctgacagcccgagatcctggatacaggtgcagatccctgcatctcatcctgtcctcactctcagccctgaaaaggctctgaattttgagggaaccaaggtgacacttcactgtgaaacccaggaagattctctgcgcactttgtacaggttttatcatgagggtgtccccctgaggcacaagtcagtccgctgtgaaaggggagcatccatcagcttctcactgactacagagaattcagggaactactactgcacagctgacaatggccttggcgccaagcccagtaaggctgtgagcctctcagtcactgttcccgtgtctcatcctgtcctcaacctcagctctcctgaggacctgatttttgagggagccaaggtgacacttcactgtgaagcccagagaggttcactccccatcctgtaccagtttcatcatgaggatgctgccctggagcgtaggtcggccaactctgcaggaggagtggccatcagcttctctctgactgcagagcattcagggaactactactgcacagctgacaatggctttggcccccagcgcagtaaggcggtgagcctctccatcactgtccctgtgtctcatcctgtcctcaccctcagctctgctgaggccctgacttttgaaggagccactgtgacacttcactgtgaagtccagagaggttccccacaaatcctataccagttttatcatgaggacatgcccctgtggagcagctcaacaccctctgtgggaagagtgtccttcagcttctctctgactgaaggacattcagggaattactactgcacagctgacaatggctttggtccccagcgcagtgaagtggtgagcctttttgtcactgttccagtgtctcgccccatcctcaccctcagggttcccagggcccaggctgtggtgggggacctgctggagcttcactgtgaggccccgagaggctctcccccaatcctgtactggttttatcatgaggatgtcaccctggggagcagctcagccccctctggaggagaagcttctttcaacctctctctgactgcagaacattctggaaactactcatgtgaggccaacaatggcctagtggcccagcacagtgacacaatatcactcagtgttatagttccagtatctcgtcccatcctcaccttcagggctcccagggcccaggctgtggtgggggacctgctggagcttcactgtgaggccctgagaggctcctccccaatcctgtactggttttatcatgaagatgtcaccctgggtaagatctcagccccctctggaggaggggcctccttcaacctctctctgactacagaacattctggaatctactcctgtgaggcagacaatggtccggaggcccagcgcagtgagatggtgacactgaaagttgcagttccggtgtctcgcccggtcctcaccctcagggctcccgggacccatgctgcggtgggggacctgctggagcttcactgtgaggccctgagaggctctcccctgatcctgtaccggttttttcatgaggatgtcaccctaggaaataggtcgtccccctctggaggagcgtccttaaacctctctctgactgcagagcactctggaaactactcctgtgaggccgacaatggcctcggggcccagcgcagtgagacagtgacactttatatcacagggctgaccgcgaacagaagtggcccttttgccacaggagtcgccgggggcctgctcagcatagcaggccttgctgcgggggcactgctgctctactgctggctctcgagaaaagcagggagaaagcctgcctctgaccccgccaggagccctccagactcggactcccaagagcccacctatcacaatgtaccagcctgggaagagctgcaaccagtgtacactaatgcaaatcctagaggagaaaatgtggtttactcagaagtacggatcatccaagagaaaaagaaacatgcagtggcctctgaccccaggcatctcaggaacaagggttcccctatcatctactctgaagttaaggtggcgtcaaccccggtttccggatccctgttcttggcttcctcagctcctcacagatgagtccacacgtctctccaactgctgtttcagcctctgcaccccaaagttccccttgggggagaagcagcattgaagtgggaagatttaggctgccccagaccatatctactggcctttgtttcacatgtcctcattctcagtctgaccagaatgcagggccctgctggactgtcacctgtttcccagttaaagccctgactggcaggttttttaatccagtggcaaggtgctcccactccagggcccagcacatctcctggattccttagtgggcttcagctgtgattgctgttctgagtactgctctcatcacacccccacagagggggtcttaccacacaaagggagagtgggccttcaggagatgccgggctggcctaacagctcaggtgctcctaaactccgacacagagttcctgctttgggtggatgcatttctcaattgtcatcagcctggtggggctactgcagtgtgctgccaaatgggacagcacacagcctgtgcacatgggacatgtgatgggtctccccacgggggctgcatttcacactcctccacctgtctcaaactctaaggtcggcacttgacaccaaggtaacttctctcctgctcatgtgtcagtgtctacctgcccaagtaagtggctttcatacaccaagtcccaagttcttcccatcctaacagaagtaacccagcaagtcaaggccaggaggaccaggggtgcagacagaacacatactggaacacaggaggtgctcaattactatttgactgactgactgaatgaatgaatgaatgaggaagaaaactgtgggtaatcaaactggcataaaatccagtgcactccctaggaaatccgggaggtattctggcttccctaagaaacaacggaagagaaggagcttggatgaggaaactgttcagcaagaggaagggcttctcacactttcatgtgcttgtggatcacctgaggatcctgtgaaaatacagatactgattcagtgggtctgtgtagagcctgagactgccattctaacatgttcccaggggatgctgatgctgctggccctgggactgcactgcatgcatgtgaagccctataggtctcagcagaggcccatggagagggaatgtgtggctctggctgcccagggcccaactcggttcacacggatcgtgctgctccctggccagcctttggccacagcaccaccagctgctgttgctgagagagcttcttctctgtgacatgttggctttcatcagccaccctgggaagcggaaagtagctgccactatctttgtttccccacctcaggcctcacactttcccatgaaaagggtgaatgtatataacctgagccctctccattcagagttgttctcccatctctgagcaatgggatgttctgttccgcttttatgatatccatcacatcttatcttgatctttgctcccagtggattgtacagtgatgacttttaagccccacggccctgaaataaaatccttccaagggcattggaagctctctccacctgaaccatggcttttcatgcttccaagtgtcagggccttgcccagatagacagggctgactctgctgccccaacctttcaaggaggaaaccagacacctgagacaggagcctgtatgcagcccagtgcagccttgcagaggacaaggctggaggcatttgtcatcactacagatatgcaactaaaatagacgtggagcaagagaaatgcattcccaccgaggccgcttttttaggcctagttgaaagtcaagaaggacagcagcaagcataggctcaggattaaagaaaaaaatctgctcacagtttgttctggaggtcacatcaccaacaaagctcacgccctatgcagttctgagaaggtggaggcaccaggctcaaaagaggaaatttagaatttctcattgggagagtaaggtacccccatcccagaatgataactgcacagtggcagaacaaactccaccctaatgtgggtggaccccatccagtctgttgaaggcctgagtgtaacaaaagggcttattcttcctcaagtaagggggaactcctgctttgggctgggacataagtttttctgctttcagacgcaaactgaaaaatggctcttcttgggtcttgagcttgctggcatatggactgaaagaaactatgctattggatctcctggatctccagcttgctgactgcagatcttgagatatgtcagcctctacagtcacaagagctaattcattctaataaaccaatctttctgtaaa

SEQ ID NO: 13529 - DNA, 6160 bp, Homo sapiens
ctcgcgaggagagcggagcaggcgcgcggcccaggcggaggagcgccgactctggagcagccggagctggaagaggaggaggaggagaggcggcggggaaggaggaggagggggagagtcgctcccgccgggcgagcatggggcgcctggcctcgaggccgctgctgctggcgctcctgtcgttggctctttgccgagggcgtgtggtgagagtccccacagcgaccctggttcgagtggtgggcactgagctggtcatcccctgcaacgtcagtgactatgatggccccagcgagcaaaactttgactggagcttctcatctttggggagcagctttgtggagcttgcaagcacctgggaggtggggttcccagcccagctgtaccaggagcggctgcagaggggcgagatcctgttaaggcggactgccaacgacgccgtggagctccacataaagaacgtccagccttcagaccaaggccactacaaatgttcaacccccagcacagatgccactgtccagggaaactatgaggacacagtgcaggttaaagtgctggccgactccctgcacgtgggccccagcgcgcggcccccgccgagcctgagcctgcgggagggggagcccttcgagctgcgctgcactgccgcctccgcctcgccgctgcacacgcacctggcgctgctgtgggaggtgcaccgcggcccggccaggcggagcgtcctcgccctgacccacgagggcaggttccacccgggcctggggtacgagcagcgctaccacagtggggacgtgcgcctcgacaccgtgggcagcgacgcctaccgcctctcagtgtcccgggctctgtctgccgaccagggctcctacaggtgtatcgtcagcgagtggatcgccgagcagggcaactggcaggaaatccaagaaaaggccgtggaagttgccaccgtggtgatccagccatcagttctgcgagcagctgtgcccaagaatgtgtctgtggctgaaggaaaggaactggacctgacctgtaacatcacaacagaccgagccgatgacgtccggcccgaggtgacgtggtccttcagcaggatgcctgacagcaccctacctggctcccgcgtgttggcgcggcttgaccgtgattccctggtgcacagctcgcctcatgttgctttgagtcatgtggatgcacgctcctaccatttactggttcgggatgttagcaaagaaaactctggctactattactgccacgtgtccctgtgggcacccggacacaacaggagctggcacaaagtggcagaggccgtgtcttccccagctggtgtgggtgtgacctggctagaaccagactaccaggtgtacctgaatgcttccaaggtccccgggtttgcggatgaccccacagagctggcatgccgggtggtggacacgaagagtggggaggcgaatgtccgattcacggtttcgtggtactacaggatgaaccggcgcagcgacaatgtggtgaccagcgagctgcttgcagtcatggacggggactggacgctaaaatatggagagaggagcaagcagcgggcccaggatggagactttattttttctaaggaacatacagacacgttcaatttccggatccaaaggactacagaggaagacagaggcaattattactgtgttgtgtctgcctggaccaaacagcggaacaacagctgggtgaaaagcaaggatgtcttctccaagcctgttaacatattttgggcattagaagattccgtgcttgtggtgaaggcgaggcagccaaagcctttctttgctgccggaaatacatttgagatgacttgcaaagtatcttccaagaatattaagtcgccacgctactctgttctcatcatggctgagaagcctgtcggcgacctctccagtcccaatgaaacgaagtacatcatctctctggaccaggattctgtggtgaagctggagaattggacagatgcatcacgggtggatggcgttgttttagaaaaagtgcaggaggatgagttccgctatcgaatgtaccagactcaggtctcagacgcagggctgtaccgctgcatggtgacagcctggtctcctgtcaggggcagcctttggcgagaagcagcaaccagtctctccaatcctattgagatagacttccaaacctcaggtcctatatttaatgcttctgtgcattcagacacaccatcagtaattcggggagatctgatcaaattgttctgtatcatcactgtcgagggagcagcactggatccagatgacatggcctttgatgtgtcctggtttgcggtgcactcttttggcctggacaaggctcctgtgctcctgtcttccctggatcggaagggcatcgtgaccacctcccggagggactggaagagcgacctcagcctggagcgcgtgagtgtgctggaattcttgctgcaagtgcatggctccgaggaccaggactttggcaactactactgttccgtgactccatgggtgaagtcaccaacaggttcctggcagaaggaggcagagatccactccaagcccgtttttataactgtgaagatggatgtgctgaacgccttcaagtatcccttgctgatcggcgtcggtctgtccacggtcatcgggctcctgtcctgtctcatcgggtactgcagctcccactggtgttgtaagaaggaggttcaggagacacggcgcgagcgccgcaggctcatgtcgatggagatggactaggctggcccgggaggggagtgacagagggacgttctaggagcaattggggcaagaagaggacagtgatattttaaaacaaagtgtgttacactaaaaaccagtcctctctaatctcaggtgggacttggcgctctctcttttctgcatgtcaagttctgagcgcggacatgtttaccagcacacggctcttcttcccacggcactttctgatgtaacaatcgagtgtgtgttttcccaactgcagctttttaatggttaaccttcatctaattttttttctcccactggtttatagatcctctgacttgtgtgtgtttatagcttttgtttcgcggggttgtggtgaggaaggggtgatggcatgcggagttctttatcttcagtgagaatgtgcctgcccgcctgagagccagcttccgcgttggaggcacgtgttcagagagctgctgagcgccaccctctacccggctgacagacaacacagacctgtgccgaaggctaatttgtggcttttacgaccctaccccaccccctgttttcaggggtttagactacatttgaaatccaaacttggagtatataacttcttattgagcccaactgctttttttttttttttttttgcttctctgccccttttccatttcttttgtatttgttttctgtgagagcactgaaatggcagccctggaatctacaatttggctctccactgagcaccttatcttgccaccttagccttaagaatgaatatgaagaaaaatacacagccacctctgtccagggcagtaagaagggctgcaaggaaggggaggatggggacaaggaaaggatcagatacctgctccagtagttgtgaggccactgtgtctcaggggactccaggaggagcagaagagggatcccacgaagttattcttacgcagctggggccaggagggtcagagtggtgccaggtgcaagttaggctaaagaagccaccactattcctctctcttgcccattgtggggggcaaaggcattggtcaccaagagtcttgcagggggacccacagatatgccatgtccttcacacgtgcttgggctccttaacctgaaggcaaattgctacttgcaagactgactgacttcaaggaatcagaaattacctagaagcaccatgttttttctatgaccttttcagtccttcaggtcattttaaggtccactgcagggggttagtgagaaagggtatactttgtggtatgttttgctttcctaatagggacatgaaggaaacccagcaatttgctgttatgtgaatggcctgtagagcagagtcaagagcggtgtgctttgcccgactgctcccatcaggaataggagagtagacagagatcttccacatcccaggcttctgctgctgctttaaaagctctgtccttggagcctcccgctccctgaagtgtctcgccccctgcacagcactggcctttcggaagcatcccagtagggttttctgaggctcgctggtgactcatgccctaattgcaatcctctgcttttatcttgactttgaaggatctaacactgctctctcttccaaaggggaaaaaaagattcatttgttttgagcaataaactaatacaaaatgatggccattcatgtgcagctctttgtcaccatgggccggatgagttgtgctcctcctggctcaccatttccccctgctcccccacagccggttctgcacttatcaccgagtcgcccctggaagcagattcccattgagttttccccaccaaggggaccatgcacatggtagaaacattagattctgcattgacagtagcctttccttggcccgggcctgtggtgggaagacgggcaacaagtataccccaccagggcctgagtgactagaggaagaggacgaggccttgttggcactagatttgggtattttctgcatgtcataacatatcctaactgctatttcagaagaggcagcttgtaggtgattgtacaagtgagaattaaagagagaacagatatttaaacaggtgctgtattagtaacagccagtgccctttcagcccttgcatctattaaaaggagattcaggattttattggcacaggcccttcttagtaggaagaaagggtgcttagctttggacctgaccgggtgtgtgtaaaaccatggactgagtcacagcagacactcgatggtggtaaatgtgatgggtgcttacacactgtaccttttcctttcatactgatgctgcagttcagggctggagttgttaaggcattgacctccacccacctgccccatgtccactgggctgcccaagctgcatgtcacctgagggctggcaggaaggggcgagaaatcccagggcattgtaccaaggacctagttccttctagggatataaatttccaggaatgtgtatttttaatgtggtgagatgcactcttttgttgtaccaaatagggctccccaccccacccctgcgacaagtgctcttctagaacaggttcctaccagcagcactggtgtgaatgaaagagagacccagccgcgtctcacacaggtggaattgcacttcttaacaaaaaggaactttataaaagtttgggattttttttcctaatcataaaaatagccccagaaagagcctaagctatgttcagatagaagcctcgaaattcctgtaaattgtttactttatgatgtttacatacacgtttcactttgaaaaaaaatgcaaatcgactttttaacaactgttgagatgtttcatgggacagtagaactctgactcaccaactgggctaaattttaatttaaaaatgtatttatttgagtgtctttccccccctcaccctcaccatctgaggggctccctgagatcttggtagaggaggcccctcctgcccagaccttcgtttgtttccccggtggcccttgcttcttgctttgcagactgcctgcagccatgattttgtcactgacatctgtgagccaaagactgagcctttttggcaggaataataagcaatactacacaacttgctactttcagaaaacttttttttagcttcaccgatgacaacagaggaagaagggaactgggatttgggtaagttctcctccactgtttgaccaaattctcagtgataaatatgtgtgcagatccctagaagagaaaacgctgactttctttttaagtgtggcacataaggatctgcagaattttccgtagacaaagaaaggatcttgtgtatttttgtccatatccaatgttatatgaactaattgtattgttttatactgtgaccacaaatattatgcaatgcaccatttgttttttatttcattaaaggaagtttaattt

SEQ ID NO: 13530 - DNA, 9979 bp, Homo sapiens
ttttgtcccggaaccccgcagccctccccacactctgggcgcggagcacaatgattggtcactcctattttcgctgagcttttcctcttatttcagttttcttcgagatcaaatctggtttgtagatgtgcttggggagaatgggggcctcttctccaagaagcccggagcctgtcgggccgccggcgcccggtctccccttctgctgcggaggatccctgctggcggttgtggtgctgcttgcgctgccggtggcctggggtcaatgcaatgccccagaatggcttccatttgccaggcctaccaacctaactgatgaatttgagtttcccattgggacatatctgaactatgaatgccgccctggttattccggaagaccgttttctatcatctgcctaaaaaactcagtctggactggtgctaaggacaggtgcagacgtaaatcatgtcgtaatcctccagatcctgtgaatggcatggtgcatgtgatcaaaggcatccagttcggatcccaaattaaatattcttgtactaaaggataccgactcattggttcctcgtctgccacatgcatcatctcaggtgatactgtcatttgggataatgaaacacctatttgtgacagaattccttgtgggctaccccccaccatcaccaatggagatttcattagcaccaacagagagaattttcactatggatcagtggtgacctaccgctgcaatcctggaagcggagggagaaaggtgtttgagcttgtgggtgagccctccatatactgcaccagcaatgacgatcaagtgggcatctggagcggccccgcccctcagtgcattatacctaacaaatgcacgcctccaaatgtggaaaatggaatattggtatctgacaacagaagcttattttccttaaatgaagttgtggagtttaggtgtcagcctggctttgtcatgaaaggaccccgccgtgtgaagtgccaggccctgaacaaatgggagccggagctaccaagctgctccagggtatgtcagccacctccagatgtcctgcatgctgagcgtacccaaagggacaaggacaacttttcacctgggcaggaagtgttctacagctgtgagcccggctacgacctcagaggggctgcgtctatgcgctgcacaccccagggagactggagccctgcagcccccacatgtgaagtgaaatcctgtgatgacttcatgggccaacttcttaatggccgtgtgctatttccagtaaatctccagcttggagcaaaagtggattttgtttgtgatgaaggatttcaattaaaaggcagctctgctagttactgtgtcttggctggaatggaaagcctttggaatagcagtgttccagtgtgtgaacaaatcttttgtccaagtcctccagttattcctaatgggagacacacaggaaaacctctggaagtctttccctttgggaaaacagtaaattacacatgcgacccccacccagacagagggacgagcttcgacctcattggagagagcaccatccgctgcacaagtgaccctcaagggaatggggtttggagcagccctgcccctcgctgtggaattctgggtcactgtcaagccccagatcattttctgtttgccaagttgaaaacccaaaccaatgcatctgactttcccattgggacatctttaaagtacgaatgccgtcctgagtactacgggaggccattctctatcacatgtctagataacctggtctggtcaagtcccaaagatgtctgtaaacgtaaatcatgtaaaactcctccagatccagtgaatggcatggtgcatgtgatcacagacatccaggttggatccagaatcaactattcttgtactacagggcaccgactcattggtcactcatctgctgaatgtatcctctcgggcaatgctgcccattggagcacgaagccgccaatttgtcaacgaattccttgtgggctaccccccaccatcgccaatggagatttcattagcaccaacagagagaattttcactatggatcagtggtgacctaccgctgcaatcctggaagcggagggagaaaggtgtttgagcttgtgggtgagccctccatatactgcaccagcaatgacgatcaagtgggcatctggagcggcccggcccctcagtgcattatacctaacaaatgcacgcctccaaatgtggaaaatggaatattggtatctgacaacagaagcttattttccttaaatgaagttgtggagtttaggtgtcagcctggctttgtcatgaaaggaccccgccgtgtgaagtgccaggccctgaacaaatgggagccggagctaccaagctgctccagggtatgtcagccacctccagatgtcctgcatgctgagcgtacccaaagggacaaggacaacttttcacccgggcaggaagtgttctacagctgtgagcccggctacgacctcagaggggctgcgtctatgcgctgcacaccccagggagactggagccctgcagcccccacatgtgaagtgaaatcctgtgatgacttcatgggccaacttcttaatggccgtgtgctatttccagtaaatctccagcttggagcaaaagtggattttgtttgtgatgaaggatttcaattaaaaggcagctctgctagttactgtgtcttggctggaatggaaagcctttggaatagcagtgttccagtgtgtgaacaaatcttttgtccaagtcctccagttattcctaatgggagacacacaggaaaacctctggaagtctttccctttgggaaaacagtaaattacacatgcgacccccacccagacagagggacgagcttcgacctcattggagagagcaccatccgctgcacaagtgaccctcaagggaatggggtttggagcagccctgcccctcgctgtggaattctgggtcactgtcaagccccagatcattttctgtttgccaagttgaaaacccaaaccaatgcatctgactttcccattgggacatctttaaagtacgaatgccgtcctgagtactacgggaggccattctctatcacatgtctagataacctggtctggtcaagtcccaaagatgtctgtaaacgtaaatcatgtaaaactcctccagatccagtgaatggcatggtgcatgtgatcacagacatccaggttggatccagaatcaactattcttgtactacagggcaccgactcattggtcactcatctgctgaatgtatcctctcgggcaatgctgcccattggagcacgaagccgccaatttgtcaacgaattccttgtgggctaccccccaccatcgccaatggagatttcattagcaccaacagagagaattttcactatggatcagtggtgacctaccgctgcaatcctggaagcggagggagaaaggtgtttgagcttgtgggtgagccctccatatactgcaccagcaatgacgatcaagtgggcatctggagcggcccggcccctcagtgcattatacctaacaaatgcacgcctccaaatgtggaaaatggaatattggtatctgacaacagaagcttattttccttaaatgaagttgtggagtttaggtgtcagcctggctttgtcatgaaaggaccccgccgtgtgaagtgccaggccctgaacaaatgggagccggagctaccaagctgctccagggtatgtcagccacctccagatgtcctgcatgctgagcgtacccaaagggacaaggacaacttttcacccgggcaggaagtgttctacagctgtgagcccggctatgacctcagaggggctgcgtctatgcgctgcacaccccagggagactggagccctgcagcccccacatgtgaagtgaaatcctgtgatgacttcatgggccaacttcttaatggccgtgtgctatttccagtaaatctccagcttggagcaaaagtggattttgtttgtgatgaaggatttcaattaaaaggcagctctgctagttattgtgtcttggctggaatggaaagcctttggaatagcagtgttccagtgtgtgaacaaatcttttgtccaagtcctccagttattcctaatgggagacacacaggaaaacctctggaagtctttccctttggaaaagcagtaaattacacatgcgacccccacccagacagagggacgagcttcgacctcattggagagagcaccatccgctgcacaagtgaccctcaagggaatggggtttggagcagccctgcccctcgctgtggaattctgggtcactgtcaagccccagatcattttctgtttgccaagttgaaaacccaaaccaatgcatctgactttcccattgggacatctttaaagtacgaatgccgtcctgagtactacgggaggccattctctatcacatgtctagataacctggtctggtcaagtcccaaagatgtctgtaaacgtaaatcatgtaaaactcctccagatccagtgaatggcatggtgcatgtgatcacagacatccaggttggatccagaatcaactattcttgtactacagggcaccgactcattggtcactcatctgctgaatgtatcctctcaggcaatactgcccattggagcacgaagccgccaatttgtcaacgaattccttgtgggctacccccaaccatcgccaatggagatttcattagcaccaacagagagaattttcactatggatcagtggtgacctaccgctgcaatcttggaagcagagggagaaaggtgtttgagcttgtgggtgagccctccatatactgcaccagcaatgacgatcaagtgggcatctggagcggccccgcccctcagtgcattatacctaacaaatgcacgcctccaaatgtggaaaatggaatattggtatctgacaacagaagcttattttccttaaatgaagttgtggagtttaggtgtcagcctggctttgtcatgaaaggaccccgccgtgtgaagtgccaggccctgaacaaatgggagccagagttaccaagctgctccagggtgtgtcagccgcctccagaaatcctgcatggtgagcataccccaagccatcaggacaacttttcacctgggcaggaagtgttctacagctgtgagcctggctatgacctcagaggggctgcgtctctgcactgcacaccccagggagactggagccctgaagccccgagatgtgcagtgaaatcctgtgatgacttcttgggtcaactccctcatggccgtgtgctatttccacttaatctccagcttggggcaaaggtgtcctttgtctgtgatgaagggtttcgcttaaagggcagttccgttagtcattgtgtcttggttggaatgagaagcctttggaataacagtgttcctgtgtgtgaacatatcttttgtccaaatcctccagctatccttaatgggagacacacaggaactccctctggagatattccctatggaaaagaaatatcttacacatgtgacccccacccagacagagggatgaccttcaacctcattggggagagcaccatccgctgcacaagtgaccctcatgggaatggggtttggagcagccctgcccctcgctgtgaactttctgttcgtgctggtcactgtaaaaccccagagcagtttccatttgccagtcctacgatcccaattaatgactttgagtttccagtcgggacatctttgaattatgaatgccgtcctgggtattttgggaaaatgttctctatctcctgcctagaaaacttggtctggtcaagtgttgaagacaactgtagacgaaaatcatgtggacctccaccagaacccttcaatggaatggtgcatataaacacagatacacagtttggatcaacagttaattattcttgtaatgaagggtttcgactcattggttccccatctactacttgtctcgtctcaggcaataatgtcacatgggataagaaggcacctatttgtgagatcatatcttgtgagccacctccaaccatatccaatggagacttctacagcaacaatagaacatcttttcacaatggaacggtggtaacttaccagtgccacactggaccagatggagaacagctgtttgagcttgtgggagaacggtcaatatattgcaccagcaaagatgatcaagttggtgtttggagcagccctccccctcggtgtatttctactaataaatgcacagctccagaagttgaaaatgcaattagagtaccaggaaacaggagtttctttaccctcactgagatcatcagatttagatgtcagcccgggtttgtcatggtagggtcccacactgtgcagtgccagaccaatggcagatgggggcccaagctgccacactgctccagggtgtgtcagccgcctccagaaatcctgcatggtgagcataccctaagccatcaggacaacttttcacctgggcaggaagtgttctacagctgtgagcccagctatgacctcagaggggctgcgtctctgcactgcacgccccagggagactggagccctgaagcccctagatgtacagtgaaatcctgtgatgacttcctgggccaactccctcatggccgtgtgctacttccacttaatctccagcttggggcaaaggtgtcctttgtttgcgatgaagggttccgattaaaaggcaggtctgctagtcattgtgtcttggctggaatgaaagccctttggaatagcagtgttccagtgtgtgaacaaatcttttgtccaaatcctccagctatccttaatgggagacacacaggaactccctttggagatattccctatggaaaagaaatatcttacgcatgcgacacccacccagacagagggatgaccttcaacctcattggggagagctccatccgctgcacaagtgaccctcaagggaatggggtttggagcagccctgcccctcgctgtgaactttctgttcctgctgcctgcccacatccacccaagatccaaaacgggcattacattggaggacacgtatctctatatcttcctgggatgacaatcagctacatttgtgaccccggctacctgttagtgggaaagggcttcattttctgtacagaccagggaatctggagccaattggatcattattgcaaagaagtaaattgtagcttcccactgtttatgaatggaatctcgaaggagttagaaatgaaaaaagtatatcactatggagattatgtgactttgaagtgtgaagatgggtatactctggaaggcagtccctggagccagtgccaggcggatgacagatgggaccctcctctggccaaatgtacctctcgtacacatgatgctctcatagttggcactttatctggtacgatcttctttattttactcatcattttcctctcttggataattctaaagcacagaaaaggcaataatgcacatgaaaaccctaaagaagtggctatccatttacattctcaaggaggcagcagcgttcatccccgaactctgcaaacaaatgaagaaaatagcagggtccttccttgacaaagtactatacagctgaagaacatctcgaatacaattttggtgggaaaggagccaattgatttcaacagaatcagatctgagcttcataaagtctttgaagtgacttcacagagacgcagacatgtgcacttgaagatgctgccccttccctggtacctagcaaagctcctgcctctttgtgtgcgtcactgtgaaacccccacccttctgcctcgtgctaaacgcacacagtatctagtcaggggaaaagactgcatttaggagatagaaaatagtttggattacttaaaggaataaggtgttgcctggaatttctggtttgtaaggtggtcactgttcttttttaaaatatttgtaatatggaatgggctcagtaagaagagcttggaaaatgcagaaagttatgaaaaataagtcacttataattatgctacctactgataaccactcctaatattttgattcattttctgcctatcttctttcacatatgtgtttttttacatacgtacttttcccccttagtttgtttccttttattttatagagcagaaccctagtcttttaaacagtttagagtgaaatatatgctatatcagtttttactttctctagggagaaaaattaatttactagaaaggcatgaaatgatcatgggaagagtggttaagactactgaagagaaatatttggaaaataagatttcgatatcttctttttttttgagatggagtctggctctgtctcccaggctggagtgcagtggcgtaatctcggctcactgcaagctccgcctcccgggttgacaccattttcctgcctcagcctcctgagtagttgggattaccagtagatgggactacaggcacctgccaacacgcccggctaatttttttgtatttttagtagagacggggtttcaccatgttagccaggatggtctggatctcctgacctcgtgatccacctgcctcggcctcccaaagtgctgcgattacaggcatgagccaccgcgcctggccgctttcgatattttctaaactttaattcaaaagcactttgtgctgtgttctatataaaaaacataataaaaattgaaatgaaagaataattgttattataaaagtactagcttacttttgtatggattcagaatatactaaattaactttttaaaacacaacttttaaaaaatgtatcaaaataataaacgtgttctgatatttttaaaataagtgaccttgtgttctttaaccagtccacatctttagagaacaaaaatgtgttatgatattatgggccatgctaatgacctctagaaaacatcagaatatttctggatatttaataatagctttatatatgactaatgctcatttctatgtaattctgtttaatagttgctttaaaggtgaattttgccacatttactttgacagcagtataaggagtgagatagacatgaacctgaatttcaatttaaaatcatggaagagagggaaaaaaaaccagcttaagaaaaatcaactgataaactgcaagaaaaaaatgcaacttacatcacaaaagctaattgctttattatttagagagtacttaaaaattaaagaccaaacttctctccacccaacaaaaatgggcaaaggacatacagctaggtcaccaagaaagaagggcaaataggtggtgagtatatgtaaagatacttgataggacttttgcttagttgaatctttagcaaatctcttttatttcttgggattttgaagaagtaatttttaaaggaggactagaaactaagtgattgggaattggcctttttagaattaaaatttcccattacaagaaaaaaaaatcctgtgttcttttttttttccagaatggagtaggtcagtgagcaatgtgattaataaatatttcaatgtctgtgacttttgatttattttggagacagggtcttgctctgttacccaggctggagtgcagtggtgctatctaggcttactgcaacctcacctgtcactttttaattgcaagaaagctgaaaggtttttttctattatatcagttataatgataaatactgtatatactaactatgagtaaaatactatattgcctaacttgtattattaagcaattctgctaacctgtgaccttacattttcatctgaaaagcaggggctggacaccaattgccctatgaagctattgctagtcctaacattctttgttttgtttgcttttttggcacacttaagtgtgtactatgaagtttatgatgctttaatgaaattttctgtctctaccattgtaatgagaaaggaataaaatactttattttgcaaatctaaaaaaaaaaaaaa

SEQ ID NO: 13531 - DNA, 8629 bp, Homo sapiens
ttttgtcccggaaccccgcagccctccccacactctgggcgcggagcacaatgattggtcactcctattttcgctgagcttttcctcttatttcagttttcttcgagatcaaatctggtttgtagatgtgcttggggagaatgggggcctcttctccaagaagcccggagcctgtcgggccgccggcgcccggtctccccttctgctgcggaggatccctgctggcggttgtggtgctgcttgcgctgccggtggcctggggtcaatgcaatgccccagaatggcttccatttgccaggcctaccaacctaactgatgaatttgagtttcccattgggacatatctgaactatgaatgccgccctggttattccggaagaccgttttctatcatctgcctaaaaaactcagtctggactggtgctaaggacaggtgcagacgtaaatcatgtcgtaatcctccagatcctgtgaatggcatggtgcatgtgatcaaaggcatccagttcggatcccaaattaaatattcttgtactaaaggataccgactcattggttcctcgtctgccacatgcatcatctcaggtgatactgtcatttgggataatgaaacacctatttgtgacagaattccttgtgggctaccccccaccatcaccaatggagatttcattagcaccaacagagagaattttcactatggatcagtggtgacctaccgctgcaatcctggaagcggagggagaaaggtgtttgagcttgtgggtgagccctccatatactgcaccagcaatgacgatcaagtgggcatctggagcggccccgcccctcagtgcattatacctaacaaatgcacgcctccaaatgtggaaaatggaatattggtatctgacaacagaagcttattttccttaaatgaagttgtggagtttaggtgtcagcctggctttgtcatgaaaggaccccgccgtgtgaagtgccaggccctgaacaaatgggagccggagctaccaagctgctccagggtatgtcagccacctccagatgtcctgcatgctgagcgtacccaaagggacaaggacaacttttcacctgggcaggaagtgttctacagctgtgagcccggctacgacctcagaggggctgcgtctatgcgctgcacaccccagggagactggagccctgcagcccccacatgtgaagtgaaatcctgtgatgacttcatgggccaacttcttaatggccgtgtgctatttccagtaaatctccagcttggagcaaaagtggattttgtttgtgatgaaggatttcaattaaaaggcagctctgctagttactgtgtcttggctggaatggaaagcctttggaatagcagtgttccagtgtgtgaacaaatcttttgtccaagtcctccagttattcctaatgggagacacacaggaaaacctctggaagtctttccctttgggaaaacagtaaattacacatgcgacccccacccagacagagggacgagcttcgacctcattggagagagcaccatccgctgcacaagtgaccctcaagggaatggggtttggagcagccctgcccctcgctgtggaattctgggtcactgtcaagccccagatcattttctgtttgccaagttgaaaacccaaaccaatgcatctgactttcccattgggacatctttaaagtacgaatgccgtcctgagtactacgggaggccattctctatcacatgtctagataacctggtctggtcaagtcccaaagatgtctgtaaacgtaaatcatgtaaaactcctccagatccagtgaatggcatggtgcatgtgatcacagacatccaggttggatccagaatcaactattcttgtactacagggcaccgactcattggtcactcatctgctgaatgtatcctctcgggcaatgctgcccattggagcacgaagccgccaatttgtcaacgaattccttgtgggctaccccccaccatcgccaatggagatttcattagcaccaacagagagaattttcactatggatcagtggtgacctaccgctgcaatcctggaagcggagggagaaaggtgtttgagcttgtgggtgagccctccatatactgcaccagcaatgacgatcaagtgggcatctggagcggcccggcccctcagtgcattatacctaacaaatgcacgcctccaaatgtggaaaatggaatattggtatctgacaacagaagcttattttccttaaatgaagttgtggagtttaggtgtcagcctggctttgtcatgaaaggaccccgccgtgtgaagtgccaggccctgaacaaatgggagccggagctaccaagctgctccagggtatgtcagccacctccagatgtcctgcatgctgagcgtacccaaagggacaaggacaacttttcacccgggcaggaagtgttctacagctgtgagcccggctatgacctcagaggggctgcgtctatgcgctgcacaccccagggagactggagccctgcagcccccacatgtgaagtgaaatcctgtgatgacttcatgggccaacttcttaatggccgtgtgctatttccagtaaatctccagcttggagcaaaagtggattttgtttgtgatgaaggatttcaattaaaaggcagctctgctagttattgtgtcttggctggaatggaaagcctttggaatagcagtgttccagtgtgtgaacaaatcttttgtccaagtcctccagttattcctaatgggagacacacaggaaaacctctggaagtctttccctttggaaaagcagtaaattacacatgcgacccccacccagacagagggacgagcttcgacctcattggagagagcaccatccgctgcacaagtgaccctcaagggaatggggtttggagcagccctgcccctcgctgtggaattctgggtcactgtcaagccccagatcattttctgtttgccaagttgaaaacccaaaccaatgcatctgactttcccattgggacatctttaaagtacgaatgccgtcctgagtactacgggaggccattctctatcacatgtctagataacctggtctggtcaagtcccaaagatgtctgtaaacgtaaatcatgtaaaactcctccagatccagtgaatggcatggtgcatgtgatcacagacatccaggttggatccagaatcaactattcttgtactacagggcaccgactcattggtcactcatctgctgaatgtatcctctcaggcaatactgcccattggagcacgaagccgccaatttgtcaacgaattccttgtgggctacccccaaccatcgccaatggagatttcattagcaccaacagagagaattttcactatggatcagtggtgacctaccgctgcaatcttggaagcagagggagaaaggtgtttgagcttgtgggtgagccctccatatactgcaccagcaatgacgatcaagtgggcatctggagcggccccgcccctcagtgcattatacctaacaaatgcacgcctccaaatgtggaaaatggaatattggtatctgacaacagaagcttattttccttaaatgaagttgtggagtttaggtgtcagcctggctttgtcatgaaaggaccccgccgtgtgaagtgccaggccctgaacaaatgggagccagagttaccaagctgctccagggtgtgtcagccgcctccagaaatcctgcatggtgagcataccccaagccatcaggacaacttttcacctgggcaggaagtgttctacagctgtgagcctggctatgacctcagaggggctgcgtctctgcactgcacaccccagggagactggagccctgaagccccgagatgtgcagtgaaatcctgtgatgacttcttgggtcaactccctcatggccgtgtgctatttccacttaatctccagcttggggcaaaggtgtcctttgtctgtgatgaagggtttcgcttaaagggcagttccgttagtcattgtgtcttggttggaatgagaagcctttggaataacagtgttcctgtgtgtgaacatatcttttgtccaaatcctccagctatccttaatgggagacacacaggaactccctctggagatattccctatggaaaagaaatatcttacacatgtgacccccacccagacagagggatgaccttcaacctcattggggagagcaccatccgctgcacaagtgaccctcatgggaatggggtttggagcagccctgcccctcgctgtgaactttctgttcgtgctggtcactgtaaaaccccagagcagtttccatttgccagtcctacgatcccaattaatgactttgagtttccagtcgggacatctttgaattatgaatgccgtcctgggtattttgggaaaatgttctctatctcctgcctagaaaacttggtctggtcaagtgttgaagacaactgtagacgaaaatcatgtggacctccaccagaacccttcaatggaatggtgcatataaacacagatacacagtttggatcaacagttaattattcttgtaatgaagggtttcgactcattggttccccatctactacttgtctcgtctcaggcaataatgtcacatgggataagaaggcacctatttgtgagatcatatcttgtgagccacctccaaccatatccaatggagacttctacagcaacaatagaacatcttttcacaatggaacggtggtaacttaccagtgccacactggaccagatggagaacagctgtttgagcttgtgggagaacggtcaatatattgcaccagcaaagatgatcaagttggtgtttggagcagccctccccctcggtgtatttctactaataaatgcacagctccagaagttgaaaatgcaattagagtaccaggaaacaggagtttctttaccctcactgagatcatcagatttagatgtcagcccgggtttgtcatggtagggtcccacactgtgcagtgccagaccaatggcagatgggggcccaagctgccacactgctccagggtgtgtcagccgcctccagaaatcctgcatggtgagcataccctaagccatcaggacaacttttcacctgggcaggaagtgttctacagctgtgagcccagctatgacctcagaggggctgcgtctctgcactgcacgccccagggagactggagccctgaagcccctagatgtacagtgaaatcctgtgatgacttcctgggccaactccctcatggccgtgtgctacttccacttaatctccagcttggggcaaaggtgtcctttgtttgcgatgaagggttccgattaaaaggcaggtctgctagtcattgtgtcttggctggaatgaaagccctttggaatagcagtgttccagtgtgtgaacaaatcttttgtccaaatcctccagctatccttaatgggagacacacaggaactccctttggagatattccctatggaaaagaaatatcttacgcatgcgacacccacccagacagagggatgaccttcaacctcattggggagagctccatccgctgcacaagtgaccctcaagggaatggggtttggagcagccctgcccctcgctgtgaactttctgttcctgctgcctgcccacatccacccaagatccaaaacgggcattacattggaggacacgtatctctatatcttcctgggatgacaatcagctacatttgtgaccccggctacctgttagtgggaaagggcttcattttctgtacagaccagggaatctggagccaattggatcattattgcaaagaagtaaattgtagcttcccactgtttatgaatggaatctcgaaggagttagaaatgaaaaaagtatatcactatggagattatgtgactttgaagtgtgaagatgggtatactctggaaggcagtccctggagccagtgccaggcggatgacagatgggaccctcctctggccaaatgtacctctcgtacacatgatgctctcatagttggcactttatctggtacgatcttctttattttactcatcattttcctctcttggataattctaaagcacagaaaaggcaataatgcacatgaaaaccctaaagaagtggctatccatttacattctcaaggaggcagcagcgttcatccccgaactctgcaaacaaatgaagaaaatagcagggtccttccttgacaaagtactatacagctgaagaacatctcgaatacaattttggtgggaaaggagccaattgatttcaacagaatcagatctgagcttcataaagtctttgaagtgacttcacagagacgcagacatgtgcacttgaagatgctgccccttccctggtacctagcaaagctcctgcctctttgtgtgcgtcactgtgaaacccccacccttctgcctcgtgctaaacgcacacagtatctagtcaggggaaaagactgcatttaggagatagaaaatagtttggattacttaaaggaataaggtgttgcctggaatttctggtttgtaaggtggtcactgttcttttttaaaatatttgtaatatggaatgggctcagtaagaagagcttggaaaatgcagaaagttatgaaaaataagtcacttataattatgctacctactgataaccactcctaatattttgattcattttctgcctatcttctttcacatatgtgtttttttacatacgtacttttcccccttagtttgtttccttttattttatagagcagaaccctagtcttttaaacagtttagagtgaaatatatgctatatcagtttttactttctctagggagaaaaattaatttactagaaaggcatgaaatgatcatgggaagagtggttaagactactgaagagaaatatttggaaaataagatttcgatatcttctttttttttgagatggagtctggctctgtctcccaggctggagtgcagtggcgtaatctcggctcactgcaagctccgcctcccgggttgacaccattttcctgcctcagcctcctgagtagttgggattaccagtagatgggactacaggcacctgccaacacgcccggctaatttttttgtatttttagtagagacggggtttcaccatgttagccaggatggtctggatctcctgacctcgtgatccacctgcctcggcctcccaaagtgctgcgattacaggcatgagccaccgcgcctggccgctttcgatattttctaaactttaattcaaaagcactttgtgctgtgttctatataaaaaacataataaaaattgaaatgaaagaataattgttattataaaagtactagcttacttttgtatggattcagaatatactaaattaactttttaaaacacaacttttaaaaaatgtatcaaaataataaacgtgttctgatatttttaaaataagtgaccttgtgttctttaaccagtccacatctttagagaacaaaaatgtgttatgatattatgggccatgctaatgacctctagaaaacatcagaatatttctggatatttaataatagctttatatatgactaatgctcatttctatgtaattctgtttaatagttgctttaaaggtgaattttgccacatttactttgacagcagtataaggagtgagatagacatgaacctgaatttcaatttaaaatcatggaagagagggaaaaaaaaccagcttaagaaaaatcaactgataaactgcaagaaaaaaatgcaacttacatcacaaaagctaattgctttattatttagagagtacttaaaaattaaagaccaaacttctctccacccaacaaaaatgggcaaaggacatacagctaggtcaccaagaaagaagggcaaataggtggtgagtatatgtaaagatacttgataggacttttgcttagttgaatctttagcaaatctcttttatttcttgggattttgaagaagtaatttttaaaggaggactagaaactaagtgattgggaattggcctttttagaattaaaatttcccattacaagaaaaaaaaatcctgtgttcttttttttttccagaatggagtaggtcagtgagcaatgtgattaataaatatttcaatgtctgtgacttttgatttattttggagacagggtcttgctctgttacccaggctggagtgcagtggtgctatctaggcttactgcaacctcacctgtcactttttaattgcaagaaagctgaaaggtttttttctattatatcagttataatgataaatactgtatatactaactatgagtaaaatactatattgcctaacttgtattattaagcaattctgctaacctgtgaccttacattttcatctgaaaagcaggggctggacaccaattgccctatgaagctattgctagtcctaacattctttgttttgtttgcttttttggcacacttaagtgtgtactatgaagtttatgatgctttaatgaaattttctgtctctaccattgtaatgagaaaggaataaaatactttattttgcaaatctaaaaaaaaaaaaaa

SEQ ID NO: 13532 - DNA, 2977 bp, Homo sapiens
agtgggggcgctcgcctttcctgcctcactcgcagctgccgggtgttggggaaagagtcgcctgcctccggaccggagtgcagacctctgaccctggagtcgctcggccgctgggaaccgtccccttgggtcgtcgcctgggccgcccgtcgttccccggccccgaggggtccggctggccgcggtgtgggtagaggtcagcatgagccaaggggtccgccgggcaggcgctgggcagggggtagcggccgcggtgcagctgctggtcaccctgagcttcctgcggagcgtcgtcgaggcgcaggtcactggagttctggatgattgcttgtgtgatattgacagcatcgataacttcaatacctacaaaatcttccccaaaataaaaaaattgcaagagagagactattttcgttattacaaggttaatctgaagcgaccttgtcctttctgggcagaagatggccactgttcaataaaagactgtcatgtggagccctgtccagagagtaaaattccggttggaataaaagctgggcattctaataagtacttgaaaatggcaaacaataccaaagaattagaagtttgtgagcaagctaataaactgggagcaattaacagcacattaagtaatcaaagcaaagaagctttcattgactgggcaagatatgatgattcacgggatcacttttgtgaacttgatgatgagagatctccagctgctcagtatgtagacctattgctgaacccagagcgttacactggctataaagggacctctgcatggagagtgtggaacagcatctatgaagagaactgtttcaagcctcgatctgtttatcgtcctttaaatcctctggcgcctagccgaggcgaagatgatggagaatcattctacacatggctagaaggtttgtgtctggagaaaagagtcttctataagcttatatcgggacttcatgctagcatcaatttacatctatgcgcaaattatcttttggaagaaacctggggtaagcccagttggggacctaatattaaagaattcaaacaccgctttgaccctgtggaaaccaagggagaaggtccaagaaggctcaagaatctttactttttatacttgattgagcttcgagctttgtcaaaggtggctccatattttgagcgctcaattgtcgatctttacactggaaatgcagaagaagatgctgacacaaaaactcttctactgaatatctttcaagatacaaagtcctttcccatgcactttgatgagaaatccatgtttgcaggtgacaaaaaaggggccaagtcactaaaggaggaattccgattacatttcaagaatatctcccgtataatggactgtgttggatgtgacaaatgcagattatggggaaaattacagactcagggtttaggaactgccctgaagatattattctctgaaaaagaaatccaaaagcttccagagaatagtccatctaaaggcttccaactcacccgacaggaaatagttgctcttttaaatgcttttggaaggctttctacaagtataagagacttacagaattttaaagtcttattacaacacagtaggtaataaaggcttttatgtgtctaactagagacataaagtgactgtggaaagccttttaattatggacattcatcagaaagacactaatctgacttcaagaattctgaactattaaatagaaaatttaaatgctcacttgaatatttatgattcttaatagattattatcaactagagatatttataaatgaagtatatacttttaaaacatgtaagttatactaattttgtgtttaatttcatatgttttcatgtaatgaaaattctattttttttagaattggttttgtttttattctattatcctttatttccagttgtcaaactttaaatggctatgtctgcattctaataacactgttcagtctgttatggaaaaggagaactagggaacaaatgttgctcagggctggtgtcagtgagaaaaatttatcaatgctttttaatgtgtttttacccttgcctcactgtgtgtgtgtcactttctataatataaagaaatactataatatttctagaatctggaactgtcaccatgatgaatggccctttcaatgcatagttacagaaattcctgaagattccccaggacttcaatttcattggtttttatttgcagtttttagttgctgtaattgttgctgtttccagtctaaaggacctcctttggtaaaggtgaacaagacctctcccctatgctacccagccagattttgtgtgtgtaatgggctggcccaagagtgttcttttacttagaactccttttgattttgcttttctctgcccctagaaattttagggacaaagacattttggaaattgtcagttacttttagaaagaaaacactgcagaaatatttaacagattacttcttgataaaatttaaatgggattatatgaatttataatgccaattgaaaatattatatacacaaaatttgctattttcacttaaagtaagcatttttaaaggatttattttagaatacaatctatgcaatcctcgaactcagtgtgcttttccctgacaggatatataaaaaggtagattaggtcaaccctcctttaagcttactctcccctcaccttttcttttcactgtatataaacggtactttctgtgattcataccaacagaggactttctgtgattcataccaacagtcctaaactgtcattttctaaatctgggatttaaaatctttagacaatatttaaaatcttgattttttttaaatgtcagcagatacaatttggaagattgcatctgtgtagaagtaatgcaggtacaagatctagagtttttccttagactctttagtcttttctgaattaaagaataagtgctcttaaatccaaaaaaaaaaaaaaaa

SEQ ID NO: 13533 - DNA, 4680 bp, Homo sapiens
gcctcccgccgcctcccgcgcggccatggactgagcgccgccggccaggccgcggggatggggccgccgctcccgctgctgctgctgctactgctgctgctgccgccacgcgtcctgcctgccgccccttcgtccgtcccccgcggccggcagctcccggggcgtctgggctgcctgctcgaggagggcctctgcggagcgtccgaggcctgtgtgaacgatggagtgtttggaaggtgccagaaggttccggcaatggacttttaccgctacgaggtgtcgcccgtggccctgcagcgcctgcgcgtggcgttgcagaagctttccggcacaggtttcacgtggcaggatgactatactcagtatgtgatggaccaggaacttgcagacctcccgaaaacctacctgaggcgtcctgaagcatccagcccagccaggccctcaaaacacagcgttggcagcgagaggaggtacagtcgggagggcggtgctgccctggccaacgccctccgacgccacctgcccttcctggaggccctgtcccaggccccagcctcagacgtgctcgccaggacccatacggcgcaggacagaccccccgctgagggtgatgaccgcttctccgagagcatcctgacctatgtggcccacacgtctgcgctgacctaccctcccgggccccggacccagctccgcgaggacctcctgccgcggaccctcggccagctccagccagatgagctcagccctaaggtggacagtggtgtggacagacaccatctgatggcggccctcagtgcctatgctgcccagaggcccccagctccccccggggagggcagcctggagccacagtaccttctgcgtgcaccctcaagaatgcccaggcctttgctggcaccagccgccccccagaagtggccttcacctctgggagattccgaagacccctctagcacaggcgatggagcacggattcataccctcctgaaggacctgcagaggcagccggctgaggtgaggggcctgagtggcctggagctggacggcatggctgagctgatggctggcctgatgcaaggcgtggaccatggagtagctcgaggcagccctgggagagcggccctgggagagtctggagaacaggcggatggccccaaggccaccctccgtggagacagctttccagatgacggagtgcaggacgacgatgatagactttaccaagaggtccatcgtctgagtgccacactcgggggcctcctgcaggaccacgggtctcgactcttacctggagccctcccctttgcaaggcccctcgacatggagaggaagaagtccgagcaccctgagtcttccctgtcttcagaagaggagactgccggagtggagaacgtcaagagccagacgtattccaaagatctgctggggcagcagccgcattcggagcccggggccgctgcgtttggggagctccaaaaccagatgcctgggccctcgaaggaggagcagagccttccagcgggtgctcaggaggccctcagcgacggcctgcaattggaggtccagccttccgaggaagaggcgcggggctacatcgtgacagacagagaggttctcggaccagcagtgaccttcaaagtgagcgccaatgtccaaaacgtgaccactgaggatgtggagaaggccacagttgacaacaaagacaaactggaggaaacctctggactgaaaattcttcaaaccggagtcgggtcgaaaagcaaactcaagttcctgcctcctcaggcggagcaagaagactccaccaagttcatcgcgctcaccctggtctccctcgcctgcatcctgggcgtcctcctggcctctggcctcatctactgcctccgccatagctctcagcacaggctgaaggagaagctctcgggactagggggcgacccaggtgcagatgccactgccgcctaccaggagctgtgccgccagcgtatggccacgcggccaccagaccgacctgagggcccgcacacgtcacgcatcagcagcgtctcatcccagttcagcgacgggccgatccccagcccctccgcacgcagcagcgcctcatcctggtccgaggagcctgtgcagtccaacatggacatctccaccggccacatgatcctgtcctacatggaggaccacctgaagaacaagaaccggctggagaaggagtgggaagcgctgtgcgcctaccaggcggagcccaacagctcgttcgtggcccagagggaggagaacgtgcccaagaaccgctccctggctgtgctgacctatgaccactcccgggtcctgctgaaggcggagaacagccacagccactcagactacatcaacgctagccccatcatggatcacgacccgaggaaccccgcgtacatcgccacccagggaccgctgcccgccaccgtggctgacttttggcagatggtgtgggagagcggctgcgtggtgatcgtcatgctgacacccctcgcggagaacggcgtccggcagtgctaccactactggccggatgaaggctccaatctctaccacatctatgaggtgaacctggtctccgagcacatctggtgtgaggacttcctggtgaggagcttctatctgaagaacctgcagaccaacgagacgcgcaccgtgacgcagttccacttcctgagttggtatgaccgaggagtcccttcctcctcaaggtccctcctggacttccgcagaaaagtaaacaagtgctacaggggccgttcttgtccaataattgttcattgcagtgacggtgcaggccggagcggcacctacgtcctgatcgacatggttctcaacaagatggccaaaggtgctaaagagattgatatcgcagcgaccctggagcacttgagggaccagagacccggcatggtccagacgaaggagcagtttgagttcgcgctgacagccgtggctgaggaggtgaacgccatcctcaaggcccttccccagtgagcggcagcctcaggggcctcaggggagcccccaccccacggatgttgtcaggaatcatgatctgactttaattgtgtgtcttctattataactgcatagtaatagggcccttagctctcccgtagtcagcgcagtttagcagttaaaagtgtatttttgtttaatcaaacaataataaagagagatttgtggaaaaatccagttacgggtggaggggaatcggttcatcaattttcacttgcttaaaaaaaatactttttcttaaagcacccgttcaccttcttggttgaagttgtgttaacaatgcagtagccagcacgttcgaggcggtttccaggaagagtgtgcttgtcatctgccactttcgggagggtggatccactgtgcaggagtggccggggaagctggcagcactcagtgaggccgcccggcacacaaggcacgtttggcatttctctttgagagagtttatcattgggagaagccgcggggacagaactgaacgtcctgcagcttcggggcaagtgagacaatcacagctcctcgctgcgtctccatcaacactgcgccgggtaccatggacggccccgtcagccacacctgtcagcccaagcagagtgattcaggggctccccgggggcagacacctgtgcaccccatgagtagtgcccacttgaggctggcactcccctgacctcacctttgcaaagttacagatgcaccccaacattgagatgtgtttttaatgttaaaatattgatttctacgttatgaaaacagatgcccccgtgaatgcttacctgtgagataaccacaaccaggaagaacaaatctgggcattgagcaagctatgagggtccccgggagcacacgaaccctgccaggcccccgctggctcctccaggcacgtcccggacctgtggggccccagagaggggacatttccctcctgggagagaaggagatcagggcaactcggagagggctgcgagcatttccctcccgggagaggagatcagggcgacctgcacgcactgcgtagagcctggaagggaagtgagaaaccagccgaccggccctgcccctcttcccgggatcacttaatgaaccacgtgttttgacatcatgtaaacctaagcacgtagagatgattcggatttgacaaaataacatttgagtatccgattcgccatcaccccctaccccagaaataggacaattcacttcattgaccaggatgatcacatggaaggcggcgcagaggcagctgtgtgggctgcagatttcctgtgtggggttcagcgtagaaaacgcacctccatcccgcccttcccacagcattcctccatcttagatagatggtactctccaaaggccctaccagagggaacacggcctactgagcggacagaatgatgccaaaatattgcttatgtctctacatggtattgtaatgaatatctgctttaatatagctatcatttcttttccaaaattacttctctctatctggaatttaattaatcgaaatgaatttatctgaatataggaagcatatgcctacttgtaatttctaactccttatgtttgaagagaaacctccggtgtgagatatacaaatatatttaattgtgtcatattaaacttctgattcaaaaaaaa

SEQ ID NO: 13534 - DNA, 4767 bp, Homo sapiens
gcctcccgccgcctcccgcgcggccatggactgagcgccgccggccaggccgcggggatggggccgccgctcccgctgctgctgctgctactgctgctgctgccgccacgcgtcctgcctgccgccccttcgtccgtcccccgcggccggcagctcccggggcgtctgggctgcctgctcgaggagggcctctgcggagcgtccgaggcctgtgtgaacgatggagtgtttggaaggtgccagaaggttccggcaatggacttttaccgctacgaggtgtcgcccgtggccctgcagcgcctgcgcgtggcgttgcagaagctttccggcacaggtttcacgtggcaggatgactatactcagtatgtgatggaccaggaacttgcagacctcccgaaaacctacctgaggcgtcctgaagcatccagcccagccaggccctcaaaacacagcgttggcagcgagaggaggtacagtcgggagggcggtgctgccctggccaacgccctccgacgccacctgcccttcctggaggccctgtcccaggccccagcctcagacgtgctcgccaggacccatacggcgcaggacagaccccccgctgagggtgatgaccgcttctccgagagcatcctgacctatgtggcccacacgtctgcgctgacctaccctcccgggccccggacccagctccgcgaggacctcctgccgcggaccctcggccagctccagccagatgagctcagccctaaggtggacagtggtgtggacagacaccatctgatggcggccctcagtgcctatgctgcccagaggcccccagctccccccggggagggcagcctggagccacagtaccttctgcgtgcaccctcaagaatgcccaggcctttgctggcaccagccgccccccagaagtggccttcacctctgggagattccgaagacccctccagcacaggcgatggagcacggattcataccctcctgaaggacctgcagaggcagccggctgaggtgaggggcctgagtggcctggagctggacggcatggctgagctgatggctggcctgatgcaaggcgtggaccatggagtagctcgaggcagccctgggagagcggccctgggagagtctggagaacaggcggatggccccaaggccaccctccgtggagacagctttccagatgacggagtgcaggacgacgatgatagactttaccaagaggtccatcgtctgagtgccacactcgggggcctcctgcaggaccacgggtctcgactcttacctggagccctcccctttgcaaggcccctcgacatggagaggaagaagtccgagcaccctgagtcttccctgtcttcagaagaggagactgccggagtggagaacgtcaagagccagacgtattccaaagatctgctggggcagcagccgcattcggagcccggggccgctgcgtttggggagctccaaaaccagatgcctgggccctcgaaggaggagcagagccttccagcgggtgctcaggaggccctcagcgacggcctgcaattggaggtccagccttccgaggaagaggcgcggggctacatcgtgacagacagagaccccctgcgccccgaggaaggaaggcggctggtggaggacgtcgcccgcctcctgcaggtgcccagcagtgcgttcgctgacgtggaggttctcggaccagcagtgaccttcaaagtgagcgccaatgtccaaaacgtgaccactgaggatgtggagaaggccacagttgacaacaaagacaaactggaggaaacctctggactgaaaattcttcaaaccggagtcgggtcgaaaagcaaactcaagttcctgcctcctcaggcggagcaagaagactccaccaagttcatcgcgctcaccctggtctccctcgcctgcatcctgggcgtcctcctggcctctggcctcatctactgcctccgccatagctctcagcacaggctgaaggagaagctctcgggactagggggcgacccaggtgcagatgccactgccgcctaccaggagctgtgccgccagcgtatggccacgcggccaccagaccgacctgagggcccgcacacgtcacgcatcagcagcgtctcatcccagttcagcgacgggccgatccccagcccctccgcacgcagcagcgcctcatcctggtccgaggagcctgtgcagtccaacatggacatctccaccggccacatgatcctgtcctacatggaggaccacctgaagaacaagaaccggctggagaaggagtgggaagcgctgtgcgcctaccaggcggagcccaacagctcgttcgtggcccagagggaggagaacgtgcccaagaaccgctccctggctgtgctgacctatgaccactcccgggtcctgctgaaggcggagaacagccacagccactcagactacatcaacgctagccccatcatggatcacgacccgaggaaccccgcgtacatcgccacccagggaccgctgcccgccaccgtggctgacttttggcagatggtgtgggagagcggctgcgtggtgatcgtcatgctgacacccctcgcggagaacggcgtccggcagtgctaccactactggccggatgaaggctccaatctctaccacatctatgaggtgaacctggtctccgagcacatctggtgtgaggacttcctggtgaggagcttctatctgaagaacctgcagaccaacgagacgcgcaccgtgacgcagttccacttcctgagttggtatgaccgaggagtcccttcctcctcaaggtccctcctggacttccgcagaaaagtaaacaagtgctacaggggccgttcttgtccaataattgttcattgcagtgacggtgcaggccggagcggcacctacgtcctgatcgacatggttctcaacaagatggccaaaggtgctaaagagattgatatcgcagcgaccctggagcacttgagggaccagagacccggcatggtccagacgaaggagcagtttgagttcgcgctgacagccgtggctgaggaggtgaacgccatcctcaaggcccttccccagtgagcggcagcctcaggggcctcaggggagcccccaccccacggatgttgtcaggaatcatgatctgactttaattgtgtgtcttctattataactgcatagtaatagggcccttagctctcccgtagtcagcgcagtttagcagttaaaagtgtatttttgtttaatcaaacaataataaagagagatttgtggaaaaatccagttacgggtggaggggaatcggttcatcaattttcacttgcttaaaaaaaatactttttcttaaagcacccgttcaccttcttggttgaagttgtgttaacaatgcagtagccagcacgttcgaggcggtttccaggaagagtgtgcttgtcatctgccactttcgggagggtggatccactgtgcaggagtggccggggaagctggcagcactcagtgaggccgcccggcacacaaggcacgtttggcatttctctttgagagagtttatcattgggagaagccgcggggacagaactgaacgtcctgcagcttcggggcaagtgagacaatcacagctcctcgctgcgtctccatcaacactgcgccgggtaccatggacggccccgtcagccacacctgtcagcccaagcagagtgattcaggggctccccgggggcagacacctgtgcaccccatgagtagtgcccacttgaggctggcactcccctgacctcacctttgcaaagttacagatgcaccccaacattgagatgtgtttttaatgttaaaatattgatttctacgttatgaaaacagatgcccccgtgaatgcttacctgtgagataaccacaaccaggaagaacaaatctgggcattgagcaagctatgagggtccccgggagcacacgaaccctgccaggcccccgctggctcctccaggcacgtcccggacctgtggggccccagagaggggacatttccctcctgggagagaaggagatcagggcaactcggagagggctgcgagcatttccctcccgggagaggagatcagggcgacctgcacgcactgcgtagagcctggaagggaagtgagaaaccagccgaccggccctgcccctcttcccgggatcacttaatgaaccacgtgttttgacatcatgtaaacctaagcacgtagagatgattcggatttgacaaaataacatttgagtatccgattcgccatcaccccctaccccagaaataggacaattcacttcattgaccaggatgatcacatggaaggcggcgcagaggcagctgtgtgggctgcagatttcctgtgtggggttcagcgtagaaaacgcacctccatcccgcccttcccacagcattcctccatcttagatagatggtactctccaaaggccctaccagagggaacacggcctactgagcggacagaatgatgccaaaatattgcttatgtctctacatggtattgtaatgaatatctgctttaatatagctatcatttcttttccaaaattacttctctctatctggaatttaattaatcgaaatgaatttatctgaatataggaagcatatgcctacttgtaatttctaactccttatgtttgaagagaaacctccggtgtgagatatacaaatatatttaattgtgtcatattaaacttctgattcaaaaaaaa

SEQ ID NO: 13535 - DNA, 4716 bp, Homo sapiens
gcctcccgccgcctcccgcgcggccatggactgagcgccgccggccaggccgcggggatggggccgccgctcccgctgctgctgctgctactgctgctgctgccgccacgcgtcctgcctgccgccccttcgtccgtcccccgcggccggcagctcccggggcgtctggatggagtgtttggaaggtgccagaaggttccggcaatggacttttaccgctacgaggtgtcgcccgtggccctgcagcgcctgcgcgtggcgttgcagaagctttccggcacaggtttcacgtggcaggatgactatactcagtatgtgatggaccaggaacttgcagacctcccgaaaacctacctgaggcgtcctgaagcatccagcccagccaggccctcaaaacacagcgttggcagcgagaggaggtacagtcgggagggcggtgctgccctggccaacgccctccgacgccacctgcccttcctggaggccctgtcccaggccccagcctcagacgtgctcgccaggacccatacggcgcaggacagaccccccgctgagggtgatgaccgcttctccgagagcatcctgacctatgtggcccacacgtctgcgctgacctaccctcccgggccccggacccagctccgcgaggacctcctgccgcggaccctcggccagctccagccagatgagctcagccctaaggtggacagtggtgtggacagacaccatctgatggcggccctcagtgcctatgctgcccagaggcccccagctccccccggggagggcagcctggagccacagtaccttctgcgtgcaccctcaagaatgcccaggcctttgctggcaccagccgccccccagaagtggccttcacctctgggagattccgaagacccctctagcacaggcgatggagcacggattcataccctcctgaaggacctgcagaggcagccggctgaggtgaggggcctgaatggcctggagctggacggcatggccgagctgatggctggcctgatgcaaggcgtggaccatggagtagctcgaggcagccctgggagagcggccctgggagagtctggagaacaggcggatggccccaaggccaccctccgtggagacagctttccagatgacggagtgcaggacgacgatgatagactttaccaagaggtccatcgtctgagtgccacactcgggggcctcctgcaggaccacgggtctcgactcttacctggagccctcccctttgcaaggcccctcgacatggagaggaagaagtccgagcaccctgagtcttccctgtcttcagaagaggagactgccggagtggagaacgtcaagagccagacgtattccaaagatctgctggggcagcagccgcattcggagcccggggccgctgcgtttggggagctccaaaaccagatgcctgggccctcgaaggaggagcagagccttccagcgggtgctcaggaggccctcagcgacggcctgcaattggaggtccagccttccgaggaagaggcgcggggctacatcgtgacagacagagaccccctgcgccccgaggaaggaaggcggctggtggaggacgtcgcccgcctcctgcaggtgcccagcagtgcgttcgctgacgtggaggttctcggaccagcagtgaccttcaaagtgagcgccaatgtccaaaacgtgaccactgaggatgtggagaaggccacagttgacaacaaagacaaactggaggaaacctctggactgaaaattcttcaaaccggagtcgggtcgaaaagcaaactcaagttcctgcctcctcaggcggagcaagaagactccaccaagttcatcgcgctcaccctggtctccctcgcctgcatcctgggcgtcctcctggcctctggcctcatctactgcctccgccatagctctcagcacaggctgaaggagaagctctcgggactagggggcgacccaggtgcagatgccactgccgcctaccaggagctgtgccgccagcgtatggccacgcggccaccagaccgacctgagggcccgcacacgtcacgcatcagcagcgtctcatcccagttcagcgacgggccgatccccagcccctccgcacgcagcagcgcctcatcctggtccgaggagcctgtgcagtccaacatggacatctccaccggccacatgatcctgtcctacatggaggaccacctgaagaacaagaaccggctggagaaggagtgggaagcgctgtgcgcctaccaggcggagcccaacagctcgttcgtggcccagagggaggagaacgtgcccaagaaccgctccctggctgtgctgacctatgaccactcccgggtcctgctgaaggcggagaacagccacagccactcagactacatcaacgctagccccatcatggatcacgacccgaggaaccccgcgtacatcgccacccagggaccgctgcccgccaccgtggctgacttttggcagatggtgtgggagagcggctgcgtggtgatcgtcatgctgacacccctcgcggagaacggcgtccggcagtgctaccactactggccggatgaaggctccaatctctaccacatctatgaggtgaacctggtctccgagcacatctggtgtgaggacttcctggtgaggagcttctatctgaagaacctgcagaccaacgagacgcgcaccgtgacgcagttccacttcctgagttggtatgaccgaggagtcccttcctcctcaaggtccctcctggacttccgcagaaaagtaaacaagtgctacaggggccgttcttgtccaataattgttcattgcagtgacggtgcaggccggagcggcacctacgtcctgatcgacatggttctcaacaagatggccaaaggtgctaaagagattgatatcgcagcgaccctggagcacttgagggaccagagacccggcatggtccagacgaaggagcagtttgagttcgcgctgacagccgtggctgaggaggtgaacgccatcctcaaggcccttccccagtgagcggcagcctcaggggcctcaggggagcccccaccccacggatgttgtcaggaatcatgatctgactttaattgtgtgtcttctattataactgcatagtaatagggcccttagctctcccgtagtcagcgcagtttagcagttaaaagtgtatttttgtttaatcaaacaataataaagagagatttgtggaaaaatccagttacgggtggaggggaatcggttcatcaattttcacttgcttaaaaaaaatactttttcttaaagcacccgttcaccttcttggttgaagttgtgttaacaatgcagtagccagcacgttcgaggcggtttccaggaagagtgtgcttgtcatctgccactttcgggagggtggatccactgtgcaggagtggccggggaagctggcagcactcagtgaggccgcccggcacacaaggcacgtttggcatttctctttgagagagtttatcattgggagaagccgcggggacagaactgaacgtcctgcagcttcggggcaagtgagacaatcacagctcctcgctgcgtctccatcaacactgcgccgggtaccatggacggccccgtcagccacacctgtcagcccaagcagagtgattcaggggctccccgggggcagacacctgtgcaccccatgagtagtgcccacttgaggctggcactcccctgacctcacctttgcaaagttacagatgcaccccaacattgagatgtgtttttaatgttaaaatattgatttctacgttatgaaaacagatgcccccgtgaatgcttacctgtgagataaccacaaccaggaagaacaaatctgggcattgagcaagctatgagggtccccgggagcacacgaaccctgccaggcccccgctggctcctccaggcacgtcccggacctgtggggccccagagaggggacatttccctcctgggagagaaggagatcagggcaactcggagagggctgcgagcatttccctcccgggagaggagatcagggcgacctgcacgcactgcgtagagcctggaagggaagtgagaaaccagccgaccggccctgcccctcttcccgggatcacttaatgaaccacgtgttttgacatcatgtaaacctaagcacgtagagatgattcggatttgacaaaataacatttgagtatccgattcgccatcaccccctaccccagaaataggacaattcacttcattgaccaggatgatcacatggaaggcggcgcagaggcagctgtgtgggctgcagatttcctgtgtggggttcagcgtagaaaacgcacctccatcccgcccttcccacagcattcctccatcttagatagatggtactctccaaaggccctaccagagggaacacggcctactgagcggacagaatgatgccaaaatattgcttatgtctctacatggtattgtaatgaatatctgctttaatatagctatcatttcttttccaaaattacttctctctatctggaatttaattaatcgaaatgaatttatctgaatataggaagcatatgcctacttgtaatttctaactccttatgtttgaagagaaacctccggtgtgagatatacaaatatatttaattgtgtcatattaaacttctgattcaaaaaaaa

SEQ ID NO: 13536 - DNA, 11449 bp, Homo sapiens
gcgaaacttaaggaatcctgccttcccggagccgcgggcgatgcgactagggctgccgggcgccgccgccgcccgtccggcttcgtccttcccggcagtcgggaactagttctgaccctcgccccccgaccccggatcgaatccccgccctccgcaccctggatatgttttctcccagacctggatatttttttgatatcgtgaaactacgagggaaataatttgggggatttcttcttggctccctgctttccccacagacatgccttccgtttggagggccgcggcaccccgtccgaggcgaaggaacccccccagccgcgagggagagaaatgaagggaatttctgcagcggcatgaaagctctgcagctaggtcctctcatcagccatttgtcctttcaaactgtattgtgatacgggcaggatcagtccacgggagagaagacgagcctcccggctgtttctccgccggtctacttcccatatttcttttctttgccctcctgattcttggctggcccagggatgacttcctcgctgcagcggccctggcgggtgccctggctaccatggaccatcctgctggtcagcactgcggctgcttcgcagaatcaagaacggctatgtgcgtttaaagatccgtatcagcaagaccttgggataggtgagagtagaatctctcatgaaaatgggacaatattatgctcgaaaggtagcacctgctatggcctttgggagaaatcaaaaggggacataaatcttgtaaaacaaggatgttggtctcacattggagatccccaagagtgtcactatgaagaatgtgtagtaactaccactcctccctcaattcagaatggaacataccgtttctgctgttgtagcacagatttatgtaatgtcaactttactgagaattttccacctcctgacacaacaccactcagtccacctcattcatttaaccgagatgagacaataatcattgctttggcatcagtctctgtattagctgttttgatagttgccttatgctttggatacagaatgttgacaggagaccgtaaacaaggtcttcacagtatgaacatgatggaggcagcagcatccgaaccctctcttgatctagataatctgaaactgttggagctgattggccgaggtcgatatggagcagtatataaaggctccttggatgagcgtccagttgctgtaaaagtgttttcctttgcaaaccgtcagaattttatcaacgaaaagaacatttacagagtgcctttgatggaacatgacaacattgcccgctttatagttggagatgagagagtcactgcagatggacgcatggaatatttgcttgtgatggagtactatcccaatggatctttatgcaagtatttaagtctccacacaagtgactgggtaagctcttgccgtcttgctcattctgttactagaggactggcttatcttcacacagaattaccacgaggagatcattataaacctgcaatttcccatcgagatttaaacagcagaaatgtcctagtgaaaaatgatggaacctgtgttattagtgactttggactgtccatgaggctgactggaaatagactggtgcgcccaggggaggaagataatgcagccataagcgaggttggcactatcagatatatggcaccagaagtgctagaaggagctgtgaacttgagggactgtgaatcagctttgaaacaagtagacatgtatgctcttggactaatctattgggagatatttatgagatgtacagacctcttcccaggggaatccgtaccagagtaccagatggcttttcagacagaggttggaaaccatcccacttttgaggatatgcaggttctcgtgtctagggaaaaacagagacccaagttcccagaagcctggaaagaaaatagcctggcagtgaggtcactcaaggagacaatcgaagactgttgggaccaggatgcagaggctcggcttactgcacagtgtgctgaggaaaggatggctgaacttatgatgatttgggaaagaaacaaatctgtgagcccaacagtcaatccaatgtctactgctatgcagaatgaacgcaacctgtcacataataggcgtgtgccaaaaattggtccttatccagattattcttcctcctcatacattgaagactctatccatcatactgacagcatcgtgaagaatatttcctctgagcattctatgtccagcacacctttgactataggggaaaaaaaccgaaattcaattaactatgaacgacagcaagcacaagctcgaatccccagccctgaaacaagtgtcaccagcctctccaccaacacaacaaccacaaacaccacaggactcacgccaagtactggcatgactactatatctgagatgccatacccagatgaaacaaatctgcataccacaaatgttgcacagtcaattgggccaacccctgtctgcttacagctgacagaagaagacttggaaaccaacaagctagacccaaaagaagttgataagaacctcaaggaaagctctgatgagaatctcatggagcactctcttaaacagttcagtggcccagacccactgagcagtactagttctagcttgctttacccactcataaaacttgcagtagaagcaactggacagcaggacttcacacagactgcaaatggccaagcatgtttgattcctgatgttctgcctactcagatctatcctctccccaagcagcagaaccttcccaagagacctactagtttgcctttgaacaccaaaaattcaacaaaagagccccggctaaaatttggcagcaagcacaaatcaaacttgaaacaagtcgaaactggagttgccaagatgaatacaatcaatgcagcagaacctcatgtggtgacagtcaccatgaatggtgtggcaggtagaaaccacagtgttaactcccatgctgccacaacccaatatgccaatgggacagtactatctggccaaacaaccaacatagtgacacatagggcccaagaaatgttgcagaatcagtttattggtgaggacacccggctgaatattaattccagtcctgatgagcatgagcctttactgagacgagagcaacaagctggccatgatgaaggtgttctggatcgtcttgtggacaggagggaacggccactagaaggtggccgaactaattccaataacaacaacagcaatccatgttcagaacaagatgttcttgcacagggtgttccaagcacagcagcagatcctgggccatcaaagcccagaagagcacagaggcctaattctctggatctttcagccacaaatgtcctggatggcagcagtatacagataggtgagtcaacacaagatggcaaatcaggatcaggtgaaaagatcaagaaacgtgtgaaaactccctattctcttaagcggtggcgcccctccacctgggtcatctccactgaatcgctggactgtgaagtcaacaataatggcagtaacagggcagttcattccaaatccagcactgctgtttaccttgcagaaggaggcactgctacaaccatggtgtctaaagatataggaatgaactgtctgtgaaatgttttcaagcctatggagtgaaattattttttgcatcatttaaacatgcagaagatgtttaaaaataaaaaaaaaactgctttatcctcctgtcagcaccccctcccacccctgcaacaaagacttgctttaaatagatttcagctatgcagaaaaatttagcttatgcttccatatttttaaattttgttttttaagttttgcacttttgtttagtctcgctaaagttatatttgtctgttatgaccacagagttatatgtgtgtgtatcaaaagtggtctcaaaatatttttttaagaaaaaaagcaaaaacaatgtattgctgataatcagtttggaccagtttcttaaggtcattaaaacagaagcaaattaagacaggtttgactgcagtggtgtctggtatccatgttttatttctgggcacaagctagtttttatgttgatacgttcctgaacatattatcttgttggacatcttttctcttgtgttttgtttgaatgtgcaatagtttataggccacaaataagctttcttgtaagctctcttcctaacagggcacatattcttccataatataaacacttttctgccccatctcccatacttttgaaggtcagttctatgacagtgaattttgcacaggagaagcagctacctgatttcttactttctctctccttatcatggagaatacagaaacattgtctgaaagggctctaaagaaggaactaccaaaacctgacttgaaatgccatttcttttaaccttccaaatcctaaatgtttccttcaaggcatcttaataaacttatttgcttctggttttgggagttcataagagagaatagaacaaaatacaggacatcaaatattagccatttcccattttattttatttttctatgtaggttcatgttccatgttcatttatttaagaaatacatttttattggtaagcttatagagctacacttatggaatttttaagtaggtaaataaatggttaagacaaaatagtgttatagccttcattctctgaataggccatctttgactcataaaattacccttactgtttattataacttcagaagtaatttatagttctgaacctatagtatcttttaccctgttcccaagcaaagactggtgactttatctgaaaatgattcctcttcccatgacctaaaacactgtgaggaaaaatcattcaagtggcatgccaagtccctatgaaggaagggctgctatcaaacctaccttttttgagcaaactgagactaaacttctctcttttcaaaattgtgttatcttccttaatcctattttcataatttttccttttgccagtttttcacattatctttgatatgtgagcaacatttattatttacattagagtataccttttagtaataaaatgacttgaaatcatattatttttaaaagccctttgcttctttcattacttataatctcctctaaaacaacctctgcatgttttttttaaataaagcactttctgtcaaataatggacttttttctaaacagaaattattttctattaatttgcaaactgatgatttcacttttttttacttttttttcgattatcagagtacttagtaaatgttatatagtttagttctaagatagttccagggattaaaaggttaagaggaaaacacaaatcaccaaatttctgatttatgtttttatctcctgaacaatattttctcactcatattcctctatcttatcacttagctaaagacagcctaaatttcccaattttctgtccaaaatatttgtgatttacttgtatataagccttctcatttgccatgtgctgtgatcttacaagttagatgttactatacctaccatttattcagctggattgctgaacacagttctggattcatagaattaagaatatcttgttagtgcccaggatttccacgttttgtgttttattggcccttttctttattcagccccttaatctattttcagtcttctggcacgtaatttttttcacagttattattcttctattaacaaattatttttatctttcctagtacattttcacttagttctcttgcccttaaatatctttcacatgcattttaggatattcttttcaaatatttgtaggacaactttgaatcaaaataaattatgttccttctccaatttgaagcattgaggataaatgaccatttgaggtctaactgatcttttcctgccagaagagttatcttacgttctgctatatttgtatttgggccagttgattgtaggttgtccaacattttttaatattgggaaaattatgataaaatgctttaaaaattaatatgccagattaaaataactgaatagtttactatttcattcaagcatgtttaaaacaaataatttcctttcaccagtttttcttagtaaactcctgaaaaagtaggaaaggtggaaagtatatatcatttttataaattttaaattgtacatcagacttttaaaatctgtaatatacaagcaagcaaaattattttaaatgacttaattgtatgctaatactcatctgataataaatgcttcttaaagttgacatttaactgctatcacaaagttttatatgtagaaaagtggggtccttttgaataaaagatcattcaactaaaaatattaaaatttatttcactggatggtaatgtaaccttaaaagcatcataataggtaaagtctaatattagttcccttaacaaaatcctaactgtataccagaattaggtcactgaaagaacttgatttgaattacgtttagacaaaaatgatttaattgtaaattcttaaaactttctaaatgcataattggcaaaaaaaaaaacccactgttaccagtgtaggaagttacaagaaggcacatactgaatgctgaagtatacatatgctatttctcttaaacctcagagcaaccatatgagcattgtaattaatattcccattttacagatgaggaaactgaagctaagagaagctaagtaatatgcccaaggtccacatctagtaacagacaaagctgggatttcagtctatgtctgcctctctccacatctctttcatccataccacactgcctacatgccatatgacaggatgtgtaatgggctaacgtttatttaaaaagttcaggccaggtgcagtggcttatgcctataatccccgcactttgggaggccgagccgggtggatcatgaggtcagacgttcaacaccagcctggccaagatggtgaaaccccgtctctattaaaaatattttttaaaaattaactgagcgtggtggtgggcgcctgtagtcccagctactcaggaggctaaggcaggagaatctcttgaacccgagaggtggaggttgcagtgagctgagatcgcgccactgcactgcagcctaggcgacagagcaagactgcctcaaaaaaaaaacataaaaattcagtcactatactctggcacaattttcatttgtatatgagccaaaccacataccttaatgatttgggaagttaggcaaatatgagatatgtagacatatctatgctgattgttgcttgagaaataattactaattctagacaaaactcaatcctgtatcttccatcatgaatcttaaaatcatttcacttcactcctaacatttcttacattgcagaactaatggtaaagtaaattttacggaaaaagttaagatagctttgggaacagagacctttccctaaattgattccatagcagatttgggggaattaacaaagaatttcagtctcatcaatcctttgaatccatcttcaaaacttctgcttttaataactttagaaaatttactaatctatagaactaattgagtaggatataggaaggatacaaggatataatgtcctttttataaaagtttagtatagcttctttacatgtatccacttgttccagaaaatgtgcattggttctgaatgtgaaaatatttaaagagagaaaggaacactcaagtaagtgtgggcttcagtgggaattatcacaaaacattggcaagtatttttatttaaattattttcaaatttgacttctacagccaagtggaattggtaggctgtagctgttacactgaaatttctagtctttgtaagtgcctcctgaaagtcatttaaaatggaaaaatatttcaatgagcttttccttttttcatatttatggacatgaatattttattggagatcattaactcctagaatttgagattatatttccatacaacattttataaagttatgttgaacttactacctgttatgtgcaggttattatgtaactattcacagattgcttcatatattgctttatcttcccatctaacttcttaaagttaaaatccggacacacatgttgattatctagaccagtcattctggaaattgtaacactcccacataaaccccaggagactttttcagaatgcaatgtttctaaatgtactgttactggcagtttactctccagcatataaggttgcattttaacttttagattatgaactgtgcaaactttacccaaaactatcttgcatgattccctcctaaatatattccttgattaagtaaatctggcaaatcactgtttgagctagttacataaaatttgttatcaagagaaggcttttctacaagtttccagattaacataaagaaaagagggaatcacagggcatttaagtgcaccttcccattactttccttaaatcacctcatagttaggctgggcgcggtggctcacgcctgtaatcccagcactttgggaggccgagacggtggatcacgaggtcaggggactgagatcatcctggctaacacgatgaaacctcatctctactaaaaatacaaataattagccaggcatggtggcacgcgcctgtagtcccagctactcgggaggcagagacaggagaatcgtttgcacccgggaggcggaggttgttgcagtgagccgagatcgcgccaatgcactccagcctgggctacagagtgagactccatctcaaaaaaaaacaaaaaaaatcacctcatagtttatgtctgacttactccaaacctcagttatctgatttgtagtctgtgtcaggaaagttttcttcatatctattctgtctccctcctctttgattttaaatttttttcttttacccagtaggacaaaaaagagcagttggtcatcatccccaatattcttagtcttcagtatgcttcaggcctctcaatgaacacttaagtctcaattcttcagacaaaattgcttaagctcttctcctcagtcctattttaatgactttatatttaagaatatagaattatattttcttttatattcaaattcattactccagttaagtaatagtttgatagtttgatagaatcgagagttaagatgtttctatttgaaagtggattcaaccatcagaccaccagcaaatcggcacttaatttttgtgttatctaacattttctattgtggaattttatgattttatattctcattagttataactaaaaagccatgcacacagaattgtatatcattttgccattaaaattttttaacatattgcagcaagcttagttttatgattgagccacaaccttttacatattttttgtatgaaatattaaacactaaatgcaagattaactttcaaaagcaaaccctacattaatcaggtattatctatggacatttttgtagaccacttttgaaatacttattattttgcaacatagactggactatacaactttcatttaacttttaggtgactgatttaagttgagtgtgcatatagagaaaaacctagaaatttatctcatggcagatacatttgaaagtacttcagaagaatttatgctgtatattaaaactaggctcaaaataaatctatcgtatctttaaaagtccaattctgttattactgtgatgtttgtagtgttactattaaacattgtgaacatacacatttttaaaacaacttgaaacccattttaaaatctgggtaagagagaaggaatcttcagaacaaaatcacatcattagggtgtccagtttatgattgaatttttaagcaaattactgtatttgaaactacaacttgatttggttttcagttttaaaaggcaacatgtgggttttatccattttatttatacctttagatttcagaaacatcttcatgttttagatgcattctacagacatcatgttacttaaaaactcagggcccctttcatccctttgtacactgaaaaagttcaattgttagcaagtaagcaattagatccagttgaatatttaaagtgtttgttgcacagttcatttaatgtttcatcttatttgactttttcacatagatataatatcagatttcattaattataaaaagttgcccagttctgtaattactgaacagagggaatgactcaactaattggctacatgttgcaacaaatttaggcctttagagttgaagcactgacttaaaacgacttacatttctgttctttggtcaaatgaccatacatgatatgggacaaattgtttcattttgtttgttttttaataagggaacttggtaaagtagttcctgtcagataggattttctcaagagacaatttaacgttataaagccttctaaaagtgaactaaatattttataactttagtaatagcttggatggttttgagaaaataacctgtatttatcacattgtcaaacagaatttttctttgaatcagacaagttcaagctctaaattgatgtgctatatacttaaaatcctaggaagttatctgtaaccagtctcttgtctcaggctcttcaccttgttaccaatcctcgtaagtatgtaaaggaaacatatttttaaagaagcttaacagtaagaaaaaattactaaaagatgcaattcaaagataggtcccagtttaacactgaattgcttgacttctgtggcttttctttttctggccacatttatttatttaagcaatttttgtatgccttgttatttcatttccatagagattatattgtatcagtgtttatgtaagctggaatcatcctcagttttttgctgataatttttcaaataaagatacatggataattgtaaaatacactaactcttagggtgttgtagtagctgaaacatggagatgcgtagctgtcatgctttttctgaatggacaggagaaacataagctacggagtattcacttctgaggatgcttttccggaaaaagaaaggctagaaaatactcgcacttcctcagaaccctctttcttgttaacgggtatcttttgttggtgtgttttgctcttacattacagatagactatcatatatgactttatgaataatttcagttattttgcttttgtataagctgtctgaagccttgctatgctgtataagttgtgtttgatggatcagtgtgagtataaaataaagcaaatcacttttcttttgtattatctatggatgccactatgaaagctgacattaagccactaaagagttttctatgaataagtgtaagtaaatgctttgatatatataaacctaaataaaaagattgtattgatacagagacattggagaaggagattttaaggcagttctttaggtttaaaaaggcttgctgtaaaatggtgcgttattccgtttattaaagatcatattaatgacaata

SEQ ID NO: 13537 - DNA, 5925 bp, Homo sapiens
gcgctgcccgcctcgtccccacccccccaacccccgcgcccgccctcggacagtccctgctcgcccgcgcgctgcagccccatctcctagcggcagcccaggcgcggagggagcgagtccgccccgaggtaggtccaggacgggcgcacagcagcagccgaggctggccgggagagggaggaagaggatggcagggccacgccccagcccatgggccaggctgctcctggcagccttgatcagcgtcagcctctctgggaccttggcaaaccgctgcaagaaggccccagtgaagagctgcacggagtgtgtccgtgtggataaggactgcgcctactgcacagacgagatgttcagggaccggcgctgcaacacccaggcggagctgctggccgcgggctgccagcgggagagcatcgtggtcatggagagcagcttccaaatcacagaggagacccagattgacaccaccctgcggcgcagccagatgtccccccaaggcctgcgggtccgtctgcggcccggtgaggagcggcattttgagctggaggtgtttgagccactggagagccccgtggacctgtacatcctcatggacttctccaactccatgtccgatgatctggacaacctcaagaagatggggcagaacctggctcgggtcctgagccagctcaccagcgactacactattggatttggcaagtttgtggacaaagtcagcgtcccgcagacggacatgaggcctgagaagctgaaggagccctggcccaacagtgacccccccttctccttcaagaacgtcatcagcctgacagaagatgtggatgagttccggaataaactgcagggagagcggatctcaggcaacctggatgctcctgagggcggcttcgatgccatcctgcagacagctgtgtgcacgagggacattggctggcgcccggacagcacccacctgctggtcttctccaccgagtcagccttccactatgaggctgatggcgccaacgtgctggctggcatcatgagccgcaacgatgaacggtgccacctggacaccacgggcacctacacccagtacaggacacaggactacccgtcggtgcccaccctggtgcgcctgctcgccaagcacaacatcatccccatctttgctgtcaccaactactcctatagctactacgagaagcttcacacctatttccctgtctcctcactgggggtgctgcaggaggactcgtccaacatcgtggagctgctggaggaggccttcaatcggatccgctccaacctggacatccgggccctagacagcccccgaggccttcggacagaggtcacctccaagatgttccagaagacgaggactgggtcctttcacatccggcggggggaagtgggtatataccaggtgcagctgcgggcccttgagcacgtggatgggacgcacgtgtgccagctgccggaggaccagaagggcaacatccatctgaaaccttccttctccgacggcctcaagatggacgcgggcatcatctgtgatgtgtgcacctgcgagctgcaaaaagaggtgcggtcagctcgctgcagcttcaacggagacttcgtgtgcggacagtgtgtgtgcagcgagggctggagtggccagacctgcaactgctccaccggctctctgagtgacattcagccctgcctgcgggagggcgaggacaagccgtgctccggccgtggggagtgccagtgcgggcactgtgtgtgctacggcgaaggccgctacgagggtcagttctgcgagtatgacaacttccagtgtccccgcacttccgggttcctctgcaatgaccgaggacgctgctccatgggccagtgtgtgtgtgagcctggttggacaggcccaagctgtgactgtcccctcagcaatgccacctgcatcgacagcaatgggggcatctgtaatggacgtggccactgtgagtgtggccgctgccactgccaccagcagtcgctctacacggacaccatctgcgagatcaactactcggcgatccacccgggcctctgcgaggacctacgctcctgcgtgcagtgccaggcgtggggcaccggcgagaagaaggggcgcacgtgtgaggaatgcaacttcaaggtcaagatggtggacgagcttaagagagccgaggaggtggtggtgcgctgctccttccgggacgaggatgacgactgcacctacagctacaccatggaaggtgacggcgcccctgggcccaacagcactgtcctggtgcacaagaagaaggactgccctccgggctccttctggtggctcatccccctgctcctcctcctcctgccgctcctggccctgctactgctgctatgctggaagtactgtgcctgctgcaaggcctgcctggcacttctcccgtgctgcaaccgaggtcacatggtgggctttaaggaagaccactacatgctgcgggagaacctgatggcctctgaccacttggacacgcccatgctgcgcagcgggaacctcaagggccgtgacgtggtccgctggaaggtcaccaacaacatgcagcggcctggctttgccactcatgccgccagcatcaaccccacagagctggtgccctacgggctgtccttgcgcctggcccgcctttgcaccgagaacctgctgaagcctgacactcgggagtgcgcccagctgcgccaggaggtggaggagaacctgaacgaggtctacaggcagatctccggtgtacacaagctccagcagaccaagttccggcagcagcccaatgccgggaaaaagcaagaccacaccattgtggacacagtgctgatggcgccccgctcggccaagccggccctgctgaagcttacagagaagcaggtggaacagagggccttccacgacctcaaggtggcccccggctactacaccctcactgcagaccaggacgcccggggcatggtggagttccaggagggcgtggagctggtggacgtacgggtgcccctctttatccggcctgaggatgacgacgagaagcagctgctggtggaggccatcgacgtgcccgcaggcactgccaccctcggccgccgcctggtaaacatcaccatcatcaaggagcaagccagagacgtggtgtcctttgagcagcctgagttctcggtcagccgcggggaccaggtggcccgcatccctgtcatccggcgtgtcctggacggcgggaagtcccaggtctcctaccgcacacaggatggcaccgcgcagggcaaccgggactacatccccgtggagggtgagctgctgttccagcctggggaggcctggaaagagctgcaggtgaagctcctggagctgcaagaagttgactccctcctgcggggccgccaggtccgccgtttccacgtccagctcagcaaccctaagtttggggcccacctgggccagccccactccaccaccatcatcatcagggacccagatgaactggaccggagcttcacgagtcagatgttgtcatcacagccaccccctcacggcgacctgggcgccccgcagaaccccaatgctaaggccgctgggtccaggaagatccatttcaactggctgcccccttctggcaagccaatggggtacagggtaaagtactggattcagggtgactccgaatccgaagcccacctgctcgacagcaaggtgccctcagtggagctcaccaacctgtacccgtattgcgactatgagatgaaggtgtgcgcctacggggctcagggcgagggaccctacagctccctggtgtcctgccgcacccaccaggaagtgcccagcgagccagggcgtctggccttcaatgtcgtctcctccacggtgacccagctgagctgggctgagccggctgagaccaacggtgagatcacagcctacgaggtctgctatggcctggtcaacgatgacaaccgacctattgggcccatgaagaaagtgctggttgacaaccctaagaaccggatgctgcttattgagaaccttcgggagtcccagccctaccgctacacggtgaaggcgcgcaacggggccggctgggggcctgagcgggaggccatcatcaacctggccacccagcccaagaggcccatgtccatccccatcatccctgacatccctatcgtggacgcccagagcggggaggactacgacagcttccttatgtacagcgatgacgttctacgctctccatcgggcagccagaggcccagcgtctccgatgacactggctgcggctggaagttcgagcccctgctgggggaggagctggacctgcggcgcgtcacgtggcggctgcccccggagctcatcccgcgcctgtcggccagcagcgggcgctcctccgacgccgaggcgccccacgggcccccggacgacggcggcgcgggcgggaagggcggcagcctgccccgcagtgcgacacccgggccccccggagagcacctggtgaatggccggatggactttgccttcccgggcagcaccaactccctgcacaggatgaccacgaccagtgctgctgcctatggcacccacctgagcccacacgtgccccaccgcgtgctaagcacatcctccaccctcacacgggactacaactcactgacccgctcagaacactcacactcgaccacactgcccagggactactccaccctcacctccgtctcctcccacgactctcgcctgactgctggtgtgcccgacacgcccacccgcctggtgttctctgccctggggcccacatctctcagagtgagctggcaggagccgcggtgcgagcggccgctgcagggctacagtgtggagtaccagctgctgaacggcggtgagctgcatcggctcaacatccccaaccctgcccagacctcggtggtggtggaagacctcctgcccaaccactcctacgtgttccgcgtgcgggcccagagccaggaaggctggggccgagagcgtgagggtgtcatcaccattgaatcccaggtgcacccgcagagcccactgtgtcccctgccaggctccgccttcactttgagcactcccagtgccccaggcccgctggtgttcactgccctgagcccagactcgctgcagctgagctgggagcggccacggaggcccaatggggatatcgtcggctacctggtgacctgtgagatggcccaaggaggagggccagccaccgcattccgggtggatggagacagccccgagagccggctgaccgtgccgggcctcagcgagaacgtgccctacaagttcaaggtgcaggccaggaccactgagggcttcgggccagagcgcgagggcatcatcaccatagagtcccaggatggaggacccttcccgcagctgggcagccgtgccgggctcttccagcacccgctgcaaagcgagtacagcagcatcaccaccacccacaccagcgccaccgagcccttcctagtggatgggctgaccctgggggcccagcacctggaggcaggcggctccctcacccggcatgtgacccaggagtttgtgagccggacactgaccaccagcggaacccttagcacccacatggaccaacagttcttccaaacttgaccgcaccctgccccacccccgccacgtcccactaggcgtcctcccgactcctctcccggagcctcctcagctactccatccttgcacccctgggggcccagcccacccgcatgcacagagcaggggctaggtgtctcctgggaggcatgaagggggcaaggtccgtcctctgtgggcccaaacctatttgtaaccaaagagctgggagcagcacaaggacccagcctttgttctgcacttaataaatggttttgctactgctaaaaaaa

SEQ ID NO: 13538 - DNA, 2032 bp, Homo sapiens
ggaggactcaggccccgctggccgcgggctcggtacccggtgggtcggtggagcgtctgttgggtccgggccgccggcttcgccctcgccatggcgccctggctgcagctcctgtcgctgctggggctgctcccgggcgcagtggccgcccccgcccagccccgagccgccagctttcaggcctgggggccgccgtccccggagctgctggcgcccacccgcttcgcgctggagatgttcaaccgcggccgggctgcggggacgcgggccgtgctgggccttgtgcgcggccgcgtccgccgggcgggtcaggggtcgctgtactccctggaggccaccctggaggagccaccctgcaacgaccccatggtgtgccggctccccgtgtccaagaaaaccctgctctgcagcttccaagtcctggatgagctcggaagacacgtgctgctgcggaaggactgtggcccagtggacaccaaggttccaggtgctggggagcccaagtcagccttcactcagggctcagccatgatttcttctctgtcccaaaaccatccagacaacagaaacgagactttcagctcagtcatttccctgttgaatgaggatcccctgtcccaggacttgcctgtgaagatggcttcaatcttcaagaactttgtcattacctataaccggacatatgagtcaaaggaagaagcccggtggcgcctgtccgtctttgtcaataacatggtgcgagcacagaagatccaggccctggaccgtggcacagctcagtatggagtcaccaagttcagtgatctcacagaggaggagttccgcactatctacctgaatactctcctgaggaaagagcctggcaacaagatgaagcaagccaagtctgtgggtgacctcgccccacctgaatgggactggaggagtaagggggctgtcacaaaagtcaaagaccagggcatgtgtggctcctgctgggccttctcagtcacaggcaatgtggagggccagtggtttctcaaccaggggaccctgctctccctctctgaacaggagctcttggactgtgacaagatggacaaggcctgcatgggcggcttgccctccaatgcctactcggccataaagaatttgggagggctggagacagaggatgactacagctaccagggtcacatgcagtcctgcaacttctcagcagagaaggccaaggtctacatcaatgactccgtggagctgagccagaacgagcagaagctggcagcctggctggccaagagaggcccaatctccgtggccatcaatgcctttggcatgcagttttaccgccacgggatctcccgccctctccggcccctctgcagcccttggctcattgaccatgcggtgttgcttgtgggctacggcaaccgctctgacgttcccttttgggccatcaagaacagctggggcactgactggggtgagaagggttactactacttgcatcgtgggtccggggcctgtggcgtgaacaccatggccagctcggcggtggtggactgaagaggggcccccagctcgggacctggtgctgatcagagtggctgctgccccagcctgacatgtgtccaggcccctccccgggaggtacagctggcagagggaaaggcactgggtacctcagggtgagcagagggcactgggctggggcacagcccctgcttccctgcaccccattcccaccctgaagttctgcacctgcacctttgttgaattgtggtagcttaggaggatgtcggggtgaagggtggtatcttggcagttgaagctggggcaagaactctgggcttgggtaatgagcaggaagaaaattttctgatcttaagcccagctctgttctgcccccgctttcctctgtttgatactataaattttctggttcccttggatttagggatagtgtccctctccatgtccaggaaacttgtaaccacccttttctaacagcaataaagaggtgtccttgtcccgaaaaaaaaaaaaaaaaaaa

SEQ ID NO: 13539 - DNA, 6474 bp, Homo sapiens
gtttggcaagtcagtgcaagaggctgacttctgagaggcttccaggagcccgaagagaggacctccacgggagaagggagtgcgtgtgctcggttttttttttttctctcttttttttttttttttctgaatgaacagctttgcccaagtgactgaaaaatacagcttcttcctgaatctaccggcgtagttgctgaagagcgctctagacaggacatggctctgaagactcactctttggaatgtcctcttgctcccggcttataaacaactgtcccgaggaaagaaaggttttacatagccaaatacagcctgacaaatggcacttcggaactgtgctttctgatgacaacgcgttcgatttctgacaaagcctctcgcacgctgcccctggagggaagtcctaagtaaaactcagaccctccttaaagtgaggagcgagggcttggacggtgaacacggcagcatggcatccgcggggcacattatcaccttgctcctgtggggttacttactggagctttggacaggaggtcatacagctgatactacccacccccggttacgcctgtcacataaagagctcttgaatctgaacagaacatcaatatttcatagcccttttggatttcttgatctccatacaatgctgctggatgaatatcaagagaggctcttcgtgggaggcagggaccttgtatattccctcagcttggagagaatcagtgacggctataaagagatacactggccgagtacagctctaaaaatggaagaatgcataatgaagggaaaagatgcgggtgaatgtgcaaattatgttcgggttttgcatcactataacaggacacaccttctgacctgtggtactggagcttttgatccagtttgtgccttcatcagagttggatatcatttggaggatcctctgtttcacctggaatcacccagatctgagagaggaaggggcagatgtccttttgaccccagctcctccttcatctccactttaattggtagtgaattgtttgctggactctacagtgactactggagcagagacgctgcgatcttccgcagcatggggcgactggcccatatccgcactgagcatgacgatgagcgtctgttgaaagaaccaaaatttgtaggttcatacatgattcctgacaatgaagacagagatgacaacaaagtatatttcttttttactgagaaggcactggaggcagaaaacaatgctcacgcaatttacaccagggtcgggcgactctgtgtgaatgatgtaggagggcagagaatactggtgaataagtggagcactttcctaaaagcgagactcgtttgctcagtaccaggaatgaatggaattgacacatattttgatgaattagaggacgtttttttgctacctaccagagatcataagaatccagtgatatttggactctttaacactaccagtaatatttttcgagggcatgctatatgtgtctatcacatgtctagcattcgggcagccttcaacggaccatatgcacataaggaaggacctgaataccactggtcagtctatgaaggaaaagtcccttatccaaggcctggttcttgtgccagcaaagtaaatggagggagatacggaaccaccaaggactatcctgatgatgccatccgatttgcaagaagtcatccactaatgtaccaggccataaaacctgcccataaaaaaccaatattggtaaaaacagatggaaaatataacctgaaacaaatagcagtagatcgagtggaagctgaggatggccaatatgacgtcttgtttattgggacagataatggaattgtgctgaaagtaatcacaatttacaaccaagaaatggaatcaatggaagaagtaattctagaagaacttcagatattcaaggatccagttcctattatttctatggagatttcttcaaaacggcaacagctgtatattggatctgcttctgctgtggctcaagtcagattccatcactgtgacatgtatggaagtgcttgtgctgactgctgcctggctcgagacccttactgtgcctgggatggcatatcctgctcccggtattacccaacaggcacacatgcaaaaaggcgtttccggagacaagatgttcgacatggaaatgcagctcagcagtgctttggacaacagtttgttggggatgctttggataagactgaagaacatctggcttatggcatagagaacaacagtactttgctggaatgtaccccacgatctttacaagcgaaagttatctggtttgtacagaaaggacgtgagacaagaaaagaggaggtgaagacagatgacagagtggttaagatggaccttggtttactcttcctaaggttacacaaatcagatgctgggacctatttttgccagacagtagagcatagctttgtccatacggtccgtaaaatcaccttggaggtagtggaagaggagaaagtcgaggatatgtttaacaaggacgatgaggaggacaggcatcacaggatgccttgtcctgctcagagtagcatctcgcagggagcaaaaccatggtacaaggaattcttgcagctgatcggttatagcaacttccagagagtggaagaatactgcgagaaagtatggtgcacagatagaaagaggaaaaagcttaaaatgtcaccctccaagtggaagtatgccaaccctcaggaaaagaagctccgttccaaacctgagcattaccgcctgcccaggcacacgctggactcctgatggggtgagactatctactgtcttttgaagaatttatatttggaaagtaaaaaagtaaaaaaataaatcatccaacttctttgcattacttaaaagagatttctgtaatacaggaatgactatgaaggtgttataataaattattctacatactcatttgactggataaactttacataaaattaactaattttttaaataaatgcattgcttaatggtttctcattatgtttatcaaaaaacaactgtagctgttattttcagtacttggctgcttttctgtgaaaattattattttacttttggaagacaagattattagaatattgaagaaaaattggagacttataatcatggtaaatataaaactaaatatgttttaatatttctgaatttttcttttccatcacaatgtaagatatgcagaatacaagatactttggcattctcatgtgaactttctgtactctttaaggattattttattagtgttgtttaagccatgagtgttaagtagcaggtgtgttgtgagtgctgtaacccatgaaaggaaaaatgtcattctgaggcttgtgcccttcgtaaaatattcattaaagtacattcacactatttttgctttataacacagtctttaattttcactcactgtggaaataaaaactaaggtaacttctcagaaagatatcaaatctcagaaagaatgtcaaatcagatgaagttatagttaggattctaactactgtaaaagatttttgcttccctcttgtggtaaaaaaaattatattctcacacatttcttttttctctacagacggatatctgtttaggaaagatttgaaagcagattatcagtaggtacatggatacatcaagttcatttgcagaaacaaataactgaaataaaaaacatgttaatccttgtatcatactttaatatgaaagtattgtttatagataatttatctcacaagtcaaaaatgaagattttgcagcactgaaaatctattaaagctccaaattttaagtttctaaataatcttcgctgaaatctaaaatatactataacaaccgtgttttatttgtgaaaaaaatattaaagtgatttgctctcaaatatcaaattttcttctctcttttatattaagagacagaaaattgtttcatgagttcacttaactactgagatattcagagcatttttacctctctcttaaatgttataaaaaacaattgtatttttaagaatgtttatttatcaaagtctttccttcttctattaaatatttagcaattacctttctaaaatatgaaattttgtaagatgttttcacctaaataaaaattgaaagcaagtggattacacaggagaaccattatgaacatttatttagatattaatcttaaacagtgtttatttcagttttcaaagttagcttataggttatacatttaagttaaagtgctcataatcacttgcaatttcattgtaaaatgaacaaatacataaatattttaagaaaaatttaagtttattcagataagtcaccatgcttcaaaagatctaagaaatgcaaatatactgaaaattgacatcctctgaaaattccacttgctatttacccaagaatccactggaggtcattactgccattaaataataactgaaaagactatgtagtgaaatgtatttttaaaaactatattcagtaaaagcctgctcaatttggagaaatagaaccacaaacacagatcacaggggccttacaaagtttatgtctgaacaaataagtcaattaagtacactttattgaaaattgccttccattaacacacaagaaagaaagcaggattttctcctgtatctgaattttaaaattaaaaaggcagataagacataaatagttatcattttaattgcaataacacagacaagtagttaatgatgataacaatggtgtaacttgtaaactaaatatttggtaactgaagcaataggcagaggaaaatagcttttctatgacacaagtcataagaagtccatatactgaagagcgtttgattaaaataaagtgactattaaccagaaaagaaacattttacataaaatgctaaaatttattataggaaaataaatcaaacccaaagaaagtttattcaatgctaatttgaaagaaaattgataagaaaactttgagggcccaagtccacaatttggtgagaccactaaattttacatataattatacacacacatatgtacatatatatgtatataatcttgcttcccgcctgtttatggcagtactgaagagaaatgggaaagaagagggagggagagagaaagacgaagggagagagaaagcagtttccaaggatatgtttcatgtcccaccattttctcagtttctccctctctctcccaacacacacacacacacacccctcacatactataaaataaatcttcactgccctatcaaaatacaaataaatcaatctatgctgttctgtccttcttgagaatctaaaacataccacaaaaatacatccccagtcttttgttctgtctgaggttagaattaattcaaattcagaatctgttgtgagaaatgcccaggctttaaaaattaaaaatggatggatcttctctgaactcagggagggcacatacttagatacctacaagacttggaggaattaagagttcacccttcatctcaccaaattttccccatttttctctttcttgtagaaggagagaaaccatgctctctagcaacattgagcaaaaatcataaccactcatctaatttctaagaggcacctccatcgagggccggtctcctgcttctttagacctcttctatctttgttacaggagaggacctgtggatagacttagttttgacataaaacaatgcccattcacctcctccttcagcacaacgtcacccattgggcaagagatccagatttgttaacaaaaaagattttacttcgtgattccacgtctataattctatattgctaattttttcttttgtgtgaattactgaatatttcagagcaaagctatcaacttggagaaacagggattaaaaataaggataaacactaataagagctctagaaaaaagggaacagaaagtctgcctgtttagtaagtggcaattccatacatattttagagttttttctatctaaaattagttaaatacttagaatgtttgtaatgagtgttcgatatttgctataggttttagggttttgtaaatcttcatagtaattataaacatttgtaaaatttgtaaaatactataagtcattttgagtgttggtgttaagcatgaaacaaacagcagctgttgtccttaaaaatgaattgacctggccgggcgcggtggctcacgcctgtaatcccagcactttgggaggccgaggcgggtggatcatgaggtcaggagatggagaccatcctggctaacaaggtgaaaccccgtctctactaaaaatacaaaaaattagccgggcgcggtggcgggcgcctgtagtcccagctacttgggaggctgaggcaggagaatggcgtgaacccgggaagcggagcttgcagtgagccgagattgcgccactgcagtccgcagtccggcctgggcgacagagcgagactccgtctc

SEQ ID NO: 13540 - DNA, 2109 bp, Homo sapiens
acgacccggagcgaaggtctcgcgaggcctgggcgctgcggcggcaggaggaggacggggaaggacggagccgagccgcggctgcctccctcgctcactccctcgcgcactcgcccgccccctccctccctcccctcccttccccggccccggctctggccccggcccattcgctgttgggtcttctgctagggaggatgtcgggttcgtcgctgcccagcgccctggccctctcgctgttgctggtctctggctccctcctcccagggccaggcgccgctcagaacgagccaaggattgtcaccagtgaagaggtcattattcgagacagccctgttctccctgtcaccctgcagtgtaacctcacctccagctctcacacccttacatacagctactggacaaagaatggggtggaactgagtgccactcgtaagaatgccagcaacatggagtacaggatcaataagccgagagctgaggattcaggcgaataccactgcgtatatcactttgtcagcgctcctaaagcaaacgccaccattgaagtgaaagccgctcctgacatcactggccataaacggagtgagaacaagaatgaagggcaggatgccactatgtattgcaagtcagttggctacccccacccagactggatatggcgcaagaaggagaacgggatgcccatggacattgtcaatacctctggccgcttcttcatcatcaacaaggaaaattacactgagttgaacattgtgaacctgcagatcacggaagaccctggcgagtatgaatgtaatgccaccaacgccattggctccgcctctgttgtcactgtcctcagggtgcggagccacctggccccactctggcctttcttgggaattctggctgaaattatcatccttgtggtgatcattgttgtgtatgagaagaggaagaggccagatgaggttcctgacgatgatgaaccagctggaccaatgaaaaccaactctaccaacaatcacaaagataaaaacttgcgccagagaaacacaaattaagtactgcttacaatatctttaggttcctgaaactggtggcaacatgacctgctaaaattttctgcttggacctctttggttctctcccctttcaagtgagcaacaccacaatgactgtctaaagcatgccttatttagcctctcctgtaagggtgatctagccaggtacattttaaacaatgcttcagtgtagaaggtgtaaactattttgggcttgatgtgctgtgaatgttgcttttttttttcctttgttaaaatatttaaatagaagtgaaaaggtcctctgaggatcagatcatgcatgcgccattttttacttaatgcagctgttaaattggcaaagctctaaaatgcactgctgccatctagtgatacacttttgtaaagtacagcaaaacctacagatatatacagtatataaatatatatatatatatatttatatttttgggggtgggagaaatccaaaataaagtaaatgcttgtttcatttttaagctgctgatattcattccttattgtatgttgtcagatgaggaaattgtgcagttctggtacataaagatgagtaatataaactgaaatctataattttaagggcttaacctgtgactttaataagctggaacagtccactgaatgggtataatgaattgcagtatatacgtatgattgctttttaagtgattatcttttcttctgttaagtcatgtaaattcataaatccttttgcactgatgtgttgaaccttattcttgtacattcattcaatcaaggcaaacttttataatttttcttttgtttccaatgaccttgaaatgttatagcatggtaatattctatgcaactatagttatactttttggtttgacactgtattttttcacattgatttactggttgatgatagattttataacctaacggttctcatgcggtgcgtaattgtagatgcatgtacttgtgtgttttgtgtaattattgaagtgcaatgatgtataaaaaagtggattcacctgtttttaaaaataaaacattgataaaaggaaaaaaaaaaaaaaaa

SEQ ID NO: 13541 - DNA, 2457 bp, Homo sapiens
acgacccggagcgaaggtctcgcgaggcctgggcgctgcggcggcaggaggaggacggggaaggacggagccgagccgcggctgcctccctcgctcactccctcgcgcactcgcccgccccctccctccctcccctcccttccccggccccggctctggccccggcccattcgctgttgggtcttctgctagggaggatgtcgggttcgtcgctgcccagcgccctggccctctcgctgttgctggtctctggctccctcctcccagggccaggcgccgctcagaacgctgggtttgtcaagtcgcccatgtcagaaactaagctcacgggggacgcctttgagctgtactgtgacgtggtcgggagccccacgccagagatccagtggtggtacgcagaagtcaaccgggcagagtctttcagacagctgtgggacggtgctcggaagcgccgtgtcaccgtaaacaccgcctacgggtcaaacggcgtgagtgtgctgagaataacccggctcaccttggaggactctgggacttacgagtgcagggccagcaacgaccccaagaggaatgacttgaggcaaaacccctccataacatggattcgagcccaggccaccataagcgtccttcagaagccaaggattgtcaccagtgaagaggtcattattcgagacagccctgttctccctgtcaccctgcagtgtaacctcacctccagctctcacacccttacatacagctactggacaaagaatggggtggaactgagtgccactcgtaagaatgccagcaacatggagtacaggatcaataagccgagagctgaggattcaggcgaataccactgcgtatatcactttgtcagcgctcctaaagcaaacgccaccattgaagtgaaagccgctcctgacatcactggccataaacggagtgagaacaagaatgaagggcaggatgccactatgtattgcaagtcagttggctacccccacccagactggatatggcgcaagaaggagaacgggatgcccatggacattgtcaatacctctggccgcttcttcatcatcaacaaggaaaattacactgagttgaacattgtgaacctgcagatcacggaagaccctggcgagtatgaatgtaatgccaccaacgccattggctccgcctctgttgtcactgtcctcagggtgcggagccacctggccccactctggcctttcttgggaattctggctgaaattatcatccttgtggtgatcattgttgtgtatgagaagaggaagaggccagatgaggttcctgacgatgatgaaccagctggaccaatgaaaaccaactctaccaacaatcacaaagataaaaacttgcgccagagaaacacaaattaagtactgcttacaatatctttaggttcctgaaactggtggcaacatgacctgctaaaattttctgcttggacctctttggttctctcccctttcaagtgagcaacaccacaatgactgtctaaagcatgccttatttagcctctcctgtaagggtgatctagccaggtacattttaaacaatgcttcagtgtagaaggtgtaaactattttgggcttgatgtgctgtgaatgttgcttttttttttcctttgttaaaatatttaaatagaagtgaaaaggtcctctgaggatcagatcatgcatgcgccattttttacttaatgcagctgttaaattggcaaagctctaaaatgcactgctgccatctagtgatacacttttgtaaagtacagcaaaacctacagatatatacagtatataaatatatatatatatatatttatatttttgggggtgggagaaatccaaaataaagtaaatgcttgtttcatttttaagctgctgatattcattccttattgtatgttgtcagatgaggaaattgtgcagttctggtacataaagatgagtaatataaactgaaatctataattttaagggcttaacctgtgactttaataagctggaacagtccactgaatgggtataatgaattgcagtatatacgtatgattgctttttaagtgattatcttttcttctgttaagtcatgtaaattcataaatccttttgcactgatgtgttgaaccttattcttgtacattcattcaatcaaggcaaacttttataatttttcttttgtttccaatgaccttgaaatgttatagcatggtaatattctatgcaactatagttatactttttggtttgacactgtattttttcacattgatttactggttgatgatagattttataacctaacggttctcatgcggtgcgtaattgtagatgcatgtacttgtgtgttttgtgtaattattgaagtgcaatgatgtataaaaaagtggattcacctgtttttaaaaataaaacattgataaaaggaaaaaaaaaaaaaaaa

SEQ ID NO: 13542 - DNA, 1360 bp, Homo sapiens
gaaacctcctcgtctgtgcacgaacaggtggccgactctggagcccaggctgttgctttccagtctggtggtgaatcctccatagtctggaacagccagctgaaaactctcctggccattggaggctggaacttcgggactgcccctttcactgccatggtttctactcctgagaaccgccagactttcatcacctcagtcatcaaattcctgcgccagtatgagtttgacgggctggactttgactgggagtaccctggctctcgtgggagccctcctcaggacaagcatctcttcactgtcctggtgcaggaaatgcgtgaagcttttgagcaggaggccaagcagatcaacaagcccaggctgatggtcactgctgcagtagctgctggcatctccaatatccagtctggctatgagatcccccaactgtcacagtacctggactacatccatgtcatgacctacgacctccatggctcctgggagggctacactggagagaacagccccctctacaaatacccgactgacaccggcagcaacgcctacctcaatgtggattatgtcatgaactactggaaggacaatggagcaccagctgagaagctcatcgttggattccctacctatggacacaacttcatcctgagcaacccctccaacactggaattggtgcccccacctctggtgctggtcctgctgggccctatgccaaggagtctgggatctgggcttactacgagatctgtaccttcctgaaaaatggagccactcagggatgggatgcccctcaggaagtgccttatgcctatcagggcaatgtgtgggttggctatgacaacatcaagagcttcgatattaaggctcaatggcttaagcacaacaaatttggaggcgccatggtctgggccattgatctggatgacttcactggcactttctgcaaccagggcaagtttcccctaatctccaccctgaagaaggccctcggcctgcagagtgcaagttgcacggctccagctcagcccattgagccaataactgctgctcccagtggcagcgggaacgggagcgggagtagcagctctggaggcagctcgggaggcagtggattctgtgctgtcagagccaacggcctctaccccgtggcaaataacagaaatgccttctggcactgcgtgaatggagtcacgtaccagcagaactgccaggccgggcttgtcttcgacaccagctgtgattgctgcaactgggcataaacctgacctggtctatattccctagagttccagtctcttttgcttaggacatgttgcccctacctaaagtcctgcaataaaatcagcagtcaaaaca

SEQ ID NO: 13543 - DNA, 1989 bp, Homo sapiens
attcgggcctaggctcatctccacagaggagaacacgcagggagcagagaccatggggcccctctcagcccctccctgcacacagcatataacctggaaagggctcctgctcacagcatcacttttaaacttctggaacccgcccaccacagcccaagtcacgattgaagcccagccaccaaaagtttctgaggggaaggatgttcttctacttgtccacaatttgccccagaatcttactggctacatctggtacaaaggacaaatcagggacctctaccattatgttacatcatatgtagtagacggtcaaataattaaatatgggcctgcatacagtggacgagaaacagtatattccaatgcatccctgctgatccagaatgtcacccaggaagacacaggatcctacactttacacatcataaagcgaggtgatgggactggaggagtaactggacgtttcaccttcaccttatacctggagactcccaaaccctccatctccagcagcaatttcaaccccagggaggccacggaggctgtgatcttaacctgtgatcctgagactccagatgcaagctacctgtggtggatgaatggtcagagcctccctatgactcacagcttgcagctgtctgaaaccaacaggaccctctacctatttggtgtcacaaactatactgcaggaccctatgaatgtgaaatacggaacccagtgagtgccagccgcagtgacccagtcaccctgaatctcctcccgaagctgcccaagccctacatcaccatcaataacttaaaccccagggagaataaggatgtctcaaccttcacctgtgaacctaagagtgagaactacacctacatttggtggctaaatggtcagagcctcccggtcagtcccagggtaaagcgacgcattgaaaacaggatcctcattctacccagtgtcacgagaaatgaaacaggaccctatcaatgtgaaatacgggaccgatatggtggcatccgcagtgacccagtcaccctgaatgtcctctatggtccagacctccccagaatttacccttcgttcacctattaccattcaggacaaaacctctacttgtcctgctttgcggactctaacccaccggcacagtattcttggacaattaatgggaagtttcagctatcaggacaaaagctttctatcccccagattactacaaagcatagcgggctctatgcttgctctgttcgtaactcagccactggcaaggaaagctccaaatccgtgacagtcagagtctctgactggacattaccctgaattctactagttcctccaattccatcttctcccatggaacctcaaagagcaagacccactctgttccagaagccctataagtcagagttggacaactcaatgtaaatttcatgggaaaatccttgtacctgatgtctgagccactcagaactcaccaaaatgttcaacaccataacaacagctgctcaaactgtaaacaaggaaaacaagttgatgacttcacactgtggacagtttttcccaagatgtcagaataagactccccatcatgatgaggctctcacccctcttagctgtccttgcttgtgcctgcctctttcacttggcaggataatgcagtcattagaatttcacatgtagtataggagcttctgagggtaacaacagagtgtcagatatgtcatctcaacctcaaacttttacataacatctcaggaggaaatgtggctctctccatcttgcatacagggctcccaatagaaatgaacacagagatattgcctgtgtgtttgcagagaagatggtttctataaagagtaggaaagctgaaattatagtagagtcccctttaaatgcacattgtgtggatggctctcaccatttcctaagagatacattgtaaaacgtgacagtaagactgattctagcagaataaaacatgtactacatttgctaaa

SEQ ID NO: 13544 - DNA, 4772 bp, Homo sapiens
ccgtgagttctgcccaggccctgtgagctcaccagagccacagactcacagcccagaggtggcttcttccttcaggaactgaagaacccccatgaacaccaacatctccaggttctgagaacagaacctgggaaattgatgacttcctcatgatgaccgatactcaggatggccctagcgagagctcccagatcatgaggaagaaggcctgaacgacatacaggagatgatcaaaacggagaagtcctaccctgagcgtcgcctgcggggcgtcctggaggagctgagctgtggctgctgccgcttcctctccctcgctgacaaggaccagggccactcatcccgcaccaggcttgaccgggagcgcctcaagtcctgcatgagggagctggaaaacatggggcagcaggccaggatgctgcgggcccaggtgaagcggcacacggtgcgggacaagctgaggctgtgccagaacttcctgcagaagctgcgcttcctggcggacgagccccagcacagcattcccgacatcttcatctggatgatgagcaacaacaagcgtgtcgcctatgcccgtgtgccctccaaggacctgctcttctccatcgtggaggaggagactggcaaggactgcgccaaggtcaagacgctcttccttaagctgccagggaagcggggcttcggctcggcaggctggacagtgcaggccaaggtggagctgtacctgtggctgggcctcagcaaacagcgcaaggagttcctgtgcggcctgccctgtggcttccaggaggtcaaggcagcccagggcctgggcctgcatgccttcccacccgtcagcctggtctacaccaagaagcaggcgttccagctccgagcgcacatgtaccaggcccgcagcctctttgccgccgacagcagcggactctcagacccctttgcccgcgtcttcttcatcaatcagagtcagtgcacagaggtgctgaatgagaccctgtgtcccacctgggaccagatgctggtgttcgacaacctggagctctatggtgaagctcatgagctgagggacgatccgcccatcattgtcattgaaatctatgaccaggattccatgggcaaagctgacttcatgggccggaccttcgccaaacccctggtgaagatggcagacgaggcgtactgcccaccccgcttcccacctcagctcgagtactaccagatctaccgtggcaacgccacagctggagacctgctggcggccttcgagctgctgcagattggaccagcagggaaggctgacctgccccccatcaatggcccggtggacgtggaccgaggtcccatcatgcccgtgcccatgggcatccggcccgtgctcagcaagtaccgagtggaggtgctgttctggggcctacgggacctaaagcgggtgaacctggcccaggtggaccggccacgggtggacatcgagtgtgcagggaagggggtgcagtcgtccctgatccacaattataagaagaaccccaacttcaacaccctcgtcaagtggtttgaagtggacctcccagagaacgagctgctgcacccgcccttgaacatccgtgtggtggactgccgggccttcggtcgctacacactggtgggctcccatgccgtcagctccctgcgacgcttcatctaccggcccccagaccgctcggcccccagctggaacaccacgggggaggttgtggtgactatggagccagaggtacccatcaagaaactggagaccatggtgaagctggacgcgacttctgaagctgttgtcaaggtggatgtggctgaggaggagaaggagaagaagaagaagaagaagggcactgcggaggagccagaggaggaggagccagacgagagcatgctggactggtggtccaagtactttgcctccattgacaccatgaaggagcaacttcgacaacaagagccctctggaattgacttggaggagaaggaggaagtggacaataccgagggcctgaaggggtcaatgaagggcaaggagaaggcaagggctgccaaagaggagaagaagaagaaaactcagagctctggctctggccaggggtccgaggcccccgagaagaagaaacccaagattgatgagcttaaggtataccccaaagagctggagtccgagtttgataactttgaggactggctgcacactttcaacttgcttcggggcaagaccggggatgatgaggatggctccaccgaggaggagcgcattgtgggacgcttcaagggctccctctgcgtgtacaaagtgccactcccagaggacgtgtcccgggaagccggctacgactccacctacggcatgttccagggcatcccgagcaatgaccccatcaatgtgctggtccgagtctatgtggtccgggccacggacctgcaccctgctgacatcaacggcaaagctgacccctacatcgccatccggctaggcaagactgacatccgcgacaaggagaactacatctccaagcagctcaaccctgtctttgggaagtcctttgacatcgaggcctccttccccatggaatccatgctgacggtggctgtgtatgactgggacctggtgggcactgatgacctcattggggaaaccaagatcgacctggagaaccgcttctacagcaagcaccgcgccacctgcggcatcgcccagacctactccacacatggctacaatatctggcgggaccccatgaagcccagccagatcctgacccgcctctgcaaagacggcaaagtggacggcccccactttgggccccctgggagagtgaaggtggccaaccgcgtcttcactgggccctctgagattgaggacgagaacggtcagaggaagcccacagacgagcatgtggcgctgttggccctgaggcactgggaggacatcccccgcgcaggctgccgcctggtgccagagcatgtggagacgaggccgctgctcaaccccgacaagccgggcatcgagcagggccgcctggagctgtgggtggacatgttccccatggacatgccagcccctgggacgcctctggacatctcacctcggaagcccaagaagtacgagctgcgggtcatcatctggaacacagatgaggtggtcttggaggacgacgacttcttcacaggggagaagtccagtgacatcttcgtgagggggtggctgaagggccagcaggaggacaagcaggacacagacgtccactaccactccctcactggcgagggcaacttcaactggcgctacctgttccccttcgactacctggcggcggaggagaagatcgtcatctccaagaaggagtccatgttctcctgggacgagaccgagtacaagatccccgcgcggctcaccctgcagatctgggatgcggaccacttctccgctgacgacttcctgggggccatcgagctggacctgaaccggttcccgcggggcgcaaagacagccaagcagtgcaccatggagatggccaccggggaggtggacgtgcccctcgtgtccatcttcaagcaaaagcgcgtcaaaggctggtggcccctcctggcccgcaatgagaacgatgagtttgagctcacgggcaaggtggaggctgagctgcatttactgacagcagaggaggcagagaagaacccagtgggcctggcccgcaatgaacctgaccccctagagaaacccaaccggcccgacacggccttcgtctggttcctcaaccctctcaagtccatcaagtacctcatctgcacccggtacaagtggctcatcatcaagatcgtgctggcgctgttggggctgctcatgttggggctcttcctctacagcctccctggctacatggtcaaaaagctccttggggcatgaaggccgccagctcccgccagccgctccccagccctgccgcatttcctttcagtggcttggactctttcccatctcccctggggagcctgaggagcccagcgtccacttttcatgccttgggccgagcctgcctcctgcttgcgggggccgcctgtcctcactgccccaggctgcggcttgcccagtcccgcccctctgacccctgcctgtgggctggggagccttggatggggtggggacctggaatgggtctttcttgccccacctggctgaggcgccacccttcttcaggcccaggctccagaggaagactcctgaaaccctccccaggttttccaagtacaggattgaagctttagtgaaattaaccaaggaccatgggtcagtgcccagggctttaaaaagaatgaacgagcaaaaggtatccccgccgtgacccctgcagatagcaccggtatttgatccgcagcaggggccagaccctgcccacaagtcccagcgcggatgtttctgccactgctgggctccacttggctcctctcacttcccagggggtcgcctgtcctgcctgtgggtttccatggcttcccagagttccctctgccccagccagcgcctccaggcccagctgaggagctgtgagaagcagcagaggggactccccatcccgggcacaccctgtcttcccacccctgcccccttgcccttccagccctttcagctgcaggtgggagctggcccgtcaagtgctgcccctgcctgtgtctgggtttctgttggctgtttttcttttcttggagtggtgatttttctctaaataaaagaagtcaagcactgaaaaaaaaaaaaaaaa

SEQ ID NO: 13545 - DNA, 4970 bp, Homo sapiens
ccgtgagttctgcccaggccctgtgagctcaccagagccacagactcacagcccagaggtggcttcttccttcaggaactgaagaacccccatgaacaccaacatctccaggttctgagaacagaacctgggaaattgatgacttcctcatgatgaccgatactcaggatggccctagcgagagctcccagatcatgaggaagaaggcctgaacgacatacaggagatgatcaaaacggagaagtcctaccctgagcgtcgcctgcggggcgtcctggaggagctgagctgtggctgctgccgcttcctctccctcgctgacaaggaccagggccactcatcccgcaccaggcttgaccgggagcgcctcaagtcctgcatgagggagctggaaaacatggggcagcaggccaggatgctgcgggcccaggtgaagcggcacacggtgcgggacaagctgaggctgtgccagaacttcctgcagaagctgcgcttcctggcggacgagccccagcacagcattcccgacatcttcatctggatgatgagcaacaacaagcgtgtcgcctatgcccgtgtgccctccaaggacctgctcttctccatcgtggaggaggagactggcaaggactgcgccaaggtcaagacgctcttccttaagctgccagggaagcggggcttcggctcggcaggctggacagtgcaggccaaggtggagctgtacctgtggctgggcctcagcaaacagcgcaaggagttcctgtgcggcctgccctgtggcttccaggaggtcaaggcagcccagggcctgggcctgcatgccttcccacccgtcagcctggtctacaccaagaagcaggcgttccagctccgagcgcacatgtaccaggcccgcagcctctttgccgccgacagcagcggactctcagacccctttgcccgcgtcttcttcatcaatcagagtcagtgcacagaggtgctgaatgagaccctgtgtcccacctgggaccagatgctggtgttcgacaacctggagctctatggtgaagctcatgagctgagggacgatccgcccatcattgtcattgaaatctatgaccaggattccatgggcaaagctgacttcatgggccggaccttcgccaaacccctggtgaagatggcagacgaggcgtactgcccaccccgcttcccacctcagctcgagtactaccagatctaccgtggcaacgccacagctggagacctgctggcggccttcgagctgctgcagattggaccagcagggaaggctgacctgccccccatcaatggcccggtggacgtggaccgaggtcccatcatgcccgtgcccatgggcatccggcccgtgctcagcaagtaccgagtggaggtgctgttctggggcctacgggacctaaagcgggtgaacctggcccaggtggaccggccacgggtggacatcgagtgtgcagggaagggggtgcagtcgtccctgatccacaattataagaagaaccccaacttcaacaccctcgtcaagtggtttgaagtggacctcccagagaacgagctgctgcacccgcccttgaacatccgtgtggtggactgccgggccttcggtcgctacacactggtgggctcccatgccgtcagctccctgcgacgcttcatctaccggcccccagaccgctcggcccccagctggaacaccacgggggaggttgtggtgactatggagccagaggtacccatcaagaaactggagaccatggtgaagctggacgcgacttctgaagctgttgtcaaggtggatgtggctgaggaggagaaggagaagaagaagaagaagaagggcactgcggaggagccagaggaggaggagccagacgagagcatgctggactggtggtccaagtactttgcctccattgacaccatgaaggagcaacttcgacaacaagagccctctggaattgacttggaggagaaggaggaagtggacaataccgagggcctgaaggggtcaatgaagggcaaggagaaggcaagggctgccaaagaggagaagaagaagaaaactcagagctctggctctggccaggggtccgaggcccccgagaagaagaaacccaagattgatgagcttaaggtataccccaaagagctggagtccgagtttgataactttgaggactggctgcacactttcaacttgcttcggggcaagaccggggatgatgaggatggctccaccgaggaggagcgcattgtgggacgcttcaagggctccctctgcgtgtacaaagtgccactcccagaggacgtgtcccgggaagccggctacgactccacctacggcatgttccagggcatcccgagcaatgaccccatcaatgtgctggtccgagtctatgtggtccgggccacggacctgcaccctgctgacatcaacggcaaagctgacccctacatcgccatccggctaggcaagactgacatccgcgacaaggagaactacatctccaagcagctcaaccctgtctttgggaagtcctttgacatcgaggcctccttccccatggaatccatgctgacggtggctgtgtatgactgggacctggtgggcactgatgacctcattggggaaaccaagatcgacctggagaaccgcttctacagcaagcaccgcgccacctgcggcatcgcccagacctactccacacatggctacaatatctggcgggaccccatgaagcccagccagatcctgacccgcctctgcaaagacggcaaagtggacggcccccactttgggccccctgggagagtgaaggtggccaaccgcgtcttcactgggccctctgagattgaggacgagaacggtcagaggaagcccacagacgagcatgtggcgctgttggccctgaggcactgggaggacatcccccgcgcaggctgccgcctggtgccagagcatgtggagacgaggccgctgctcaaccccgacaagccgggcatcgagcagggccgcctggagctgtgggtggacatgttccccatggacatgccagcccctgggacgcctctggacatctcacctcggaagcccaagaagtacgagctgcgggtcatcatctggaacacagatgaggtggtcttggaggacgacgacttcttcacaggggagaagtccagtgacatcttcgtgagggggtggctgaagggccagcaggaggacaagcaggacacagacgtccactaccactccctcactggcgagggcaacttcaactggcgctacctgttccccttcgactacctggcggcggaggagaagatcgtcatctccaagaaggagtccatgttctcctgggacgagaccgagtacaagatccccgcgcggctcaccctgcagatctgggatgcggaccacttctccgctgacgacttcctgggggccatcgagctggacctgaaccggttcccgcggggcgcaaagacagccaagcagtgcaccatggagatggccaccggggaggtggacgtgcccctcgtgtccatcttcaagcaaaagcgcgtcaaaggctggtggcccctcctggcccgcaatgagaacgatgagtttgagctcacgggcaaggtggaggctgagctgcatttactgacagcagaggaggcagagaagaacccagtgggcctggcccgcaatgaacctgaccccctagagaaacccaaccggcccgacacgagcttcatctggttcctgaaccctctcaagtcggctcgctacttcttgtggcacacgtatcgctggctgctcctcaaactgttgctgctcctgctgctgctcctcctcctcgccctgttcctctactctgtgcctggctacctggtcaagaaaatcctcggggcctgagcccagtggcctcctggccggcccgacacggccttcgtctggttcctcaaccctctcaagtccatcaagtacctcatctgcacccggtacaagtggctcatcatcaagatcgtgctggcgctgttggggctgctcatgttggggctcttcctctacagcctccctggctacatggtcaaaaagctccttggggcatgaaggccgccagctcccgccagccgctccccagccctgccgcatttcctttcagtggcttggactctttcccatctcccctggggagcctgaggagcccagcgtccacttttcatgccttgggccgagcctgcctcctgcttgcgggggccgcctgtcctcactgccccaggctgcggcttgcccagtcccgcccctctgacccctgcctgtgggctggggagccttggatggggtggggacctggaatgggtctttcttgccccacctggctgaggcgccacccttcttcaggcccaggctccagaggaagactcctgaaaccctccccaggttttccaagtacaggattgaagctttagtgaaattaaccaaggaccatgggtcagtgcccagggctttaaaaagaatgaacgagcaaaaggtatccccgccgtgacccctgcagatagcaccggtatttgatccgcagcaggggccagaccctgcccacaagtcccagcgcggatgtttctgccactgctgggctccacttggctcctctcacttcccagggggtcgcctgtcctgcctgtgggtttccatggcttcccagagttccctctgccccagccagcgcctccaggcccagctgaggagctgtgagaagcagcagaggggactccccatcccgggcacaccctgtcttcccacccctgcccccttgcccttccagccctttcagctgcaggtgggagctggcccgtcaagtgctgcccctgcctgtgtctgggtttctgttggctgtttttcttttcttggagtggtgatttttctctaaataaaagaagtcaagcactgaaaaaaaaaaaaaaaa

SEQ ID NO: 13546 - DNA, 3195 bp, Homo sapiens
acagcatggagtggggttacctgttggaagtgacctcgctgctggccgccttggcgctgctgcagcgctctagcggcgctgcggccgcctcggccaaggagctggcatgccaagagatcaccgtgccgctgtgtaagggcatcggctacaactacacctacatgcccaatcagttcaaccacgacacgcaagacgaggcgggcctggaggtgcaccagttctggccgctggtggagatccagtgctcgcccgatctcaagttcttcctgtgcagcatgtacacgcccatctgcctagaggactacaagaagccgctgccgccctgccgctcggtgtgcgagcgcgccaaggccggctgcgcgccgctcatgcgccagtacggcttcgcctggcccgaccgcatgcgctgcgaccggctgcccgagcaaggcaaccctgacacgctgtgcatggactacaaccgcaccgacctaaccaccgccgcgcccagcccgccgcgccgcctgccgccgccgccgcccggcgagcagccgccttcgggcagcggccacggccgcccgccgggggccaggcccccgcaccgcggaggcggcaggggcggtggcggcggggacgcggcggcgcccccagctcgcggcggcggcggtggcgggaaggcgcggccccctggcggcggcgcggctccctgcgagcccgggtgccagtgccgcgcgcctatggtgagcgtgtccagcgagcgccacccgctctacaaccgcgtcaagacaggccagatcgctaactgcgcgctgccctgccacaacccctttttcagccaggacgagcgcgccttcaccgtcttctggatcggcctgtggtcggtgctctgcttcgtgtccaccttcgccaccgtctccaccttccttatcgacatggagcgcttcaagtacccggagcggcccattatcttcctctcggcctgctacctcttcgtgtcggtgggctacctagtgcgcctggtggcgggccacgagaaggtggcgtgcagcggtggcgcgccgggcgcggggggcgctgggggcgcgggcggcgcggcggcgggcgcgggcgcggcgggcgcgggcgcgggcggcccgggcgggcgcggcgagtacgaggagctgggcgcggtggagcagcacgtgcgctacgagaccaccggccccgcgctgtgcaccgtggtcttcttgctggtctacttcttcggcatggccagctccatctggtgggtgatcttgtcgctcacatggttcctggcggccggtatgaagtggggcaacgaagccatcgccggctactcgcagtacttccacctggccgcgtggcttgtgcccagcgtcaagtccatcgcggtgctggcgctcagctcggtggacggcgacccggtggcgggcatctgctacgtgggcaaccagagcctggacaacctgcgcggcttcgtgctggcgccgctggtcatctacctcttcatcggcaccatgttcctgctggccggcttcgtgtccctgttccgcatccgctcggtcatcaagcaacaggacggccccaccaagacgcacaagctggagaagctgatgatccgcctgggcctgttcaccgtgctctacaccgtgcccgccgcggtggtggtcgcctgcctcttctacgagcagcacaaccgcccgcgctgggaggccacgcacaactgcccgtgcctgcgggacctgcagcccgaccaggcacgcaggcccgactacgccgtcttcatgctcaagtacttcatgtgcctagtggtgggcatcacctcgggcgtgtgggtctggtccggcaagacgctggagtcctggcgctccctgtgcacccgctgctgctgggccagcaagggcgccgcggtgggcgggggcgcgggcgccacggccgcggggggtggcggcgggccggggggcggcggcggcgggggacccggcggcggcggggggccgggcggcggcgggggctccctctacagcgacgtcagcactggcctgacgtggcggtcgggcacggcgagctccgtgtcttatccaaagcagatgccattgtcccaggtctgagcggaggggagggggcgcccaggaggggtggggaggggggcgaggagacccaagtgcagcgaagggacacttgatgggctgaggttcccaccccttcacagtgttgattgctattagcatgataatgaactcttaatggtatccattagctgggacttaaatgactcacttagaacaaagtacctggcattgaagcctcccagacccagccccttttcctccattgatgtgcggggagctcctcccgccacgcgttaatttctgttggctgaggagggtggactctgcggcgtttccagaacccgagatttggagccctccctggctgcacttggctgggtttgcagtcagatacacagatttcacctgggagaacctctttttctccctcgactcttcctacgtaaactcccacccctgacttaccctggaggaggggtgaccgccacctgatgggattgcacggtttgggtattcttaatgaccaggcaaatgccttaagtaaacaaacaagaaatgtcttaattatacaccccacgtaaatacgggtttcttacattagaggatgtatttatataattatttgttaaattgtaaaaaaaaaaagtgtaaaatatgtatatatccaaagatatagtgtgtacatttttttgtaaaaagtttagaggcttacccctgtaagaacagatataagtattctattttgtcaataaaatgacttttgataaatgatttaaccattgccctctcccccgcctcttctgagctgtcacctttaaagtgcttgctaaggacgcatggggaaaatggacattttctggcttgtcattctgtacactgaccttaggcatggagaaaattacttgttaaactctagttcttaagttgttagccaagtaaatatcattgttgaactgaaatcaaaattgagtttttgcaccttccccaaagacggtgtttttcatgggagctcttttctgatccatggataacaactctcactttagtggatgtaaatggaacttctgcaaggcagtaattccccttaggccttgttatttatcctgcatggtatcactaaaggtttcaaaaccctgaaaaaaaa

SEQ ID NO: 13547 - DNA, 3589 bp, Homo sapiens
actggcggccatggaactcaccggtaatagaggacacatctcttaactgggttgctctaagaactgatgtctaaaccgtctcagcatggcctgtagaggaggagctgggaatggccaccgtgcctcagctacactctctcgggttagccctggaagtctttacacatgtagaacccgtacccataatatatgcatggtatctgactttttctacccaaatatgggaggcgtggaaagccacatttaccagctctctcagtgcctgattgaaagagggcataaggttataattgtcacccatgcttatggaaatcgaaaaggcatccgttacctcaccagtggcctcaaagtctattacttgcctctgaaagtcatgtacaaccagtctacagccacgaccctctttcacagtctgccattgctcaggtacatatttgttcgggagagagtcacgataatccattcacatagttctttttctgctatggcccatgatgctctcttccacgccaagacaatggggcttcagacagtcttcacggaccattccctttttggatttgctgatgtcagctcggtgcttacaaacaagcttctaaccgtgtctctttgtgatacaaaccacatcatttgtgtgtcttatactagtaaggaaaatactgtactaagagcagcactgaatcctgaaatagtgtccgtcattcctaatgctgtagatcctactgacttcactccagacccatttagaaggcatgatagtataactattgttgttgtcagcagacttgtttacagaaaagggatcgatttgcttagtggtataatacctgaactctgtcagaaatatccagatttaaatttcataattggaggagagggaccaaagagaatcattttggaagaagttcgggaaagataccagctgcatgacagggtgcgtcttttgggagctttagaacacaaggatgttagaaatgtcttagttcaaggacatatttttctgaatacctcccttactgaagcattctgcatggcgatcgtggaagcagccagttgtggtttacaggttgtaagtaccagagttggtggaattcctgaggtgcttccagaaaaccttattattttatgtgagccttcagtaaaatctttgtgtgaaggattggaaaaggctattttccaactgaagtcagggacattgccagctccagaaaacatccataacatagtaaagactttctacacctggaggaatgttgcagaaagaactgaaaaggtatatgaccgggtatcagtggaagctgtgttgccaatggacaaacgactggacagacttatttctcactgcggcccagtaacaggctacatctttgctttgttggcagttttcaacttcctcttcctcattttcttgagatggatgactccagattctatcattgatgttgcaatagatgccactgggccacggggtgcctggactaataactattctcacagtaaaagagggggtgagaataatgagatatctgaaaccaggtagaaggaagcctagattgtaagattttaaacatttgtaatagttctataaagactatggaaaataaccttgcttttggggggtttttgtttttttagagttaatttagtaagttatgctacctctatatcattcaatattttctgttgaggaaagataaaaatgtatgcaattcctgagtgtagaaacttcttgcacttatttaaaatttaggagagaacatttaagccactcaggtatgcaatttttcagactactgaaatccctgtagcagagatgttttaacattatattttgagagctttgggtgctgaagggccaaacgttttctgggcattttttggccagtttttaatgtaacaccattagacactcaccagatgtttacaagttttctttaggggaactacaacaattatatgaactgttttatatcatgttcatatacatttattaggaatctaaatcatgtctttgaacatttattaggttcactcagtaggtgttacatgtaattaacaggttccttgagtaagatagtccatcagttaccagcacattttgaacccctgctctgtgtagaatgttgaactagatgcttcccgccattaaggaccaggggtgcattcactctttgtttaccattcaaatggcttacttcatcataattgtggttgatatgagatcaatatccaacatgccaaaaatgctcatgccagttaatgccaggaaaaaaatcaccgacacactactagtactttgttcctgttgtatgcattctcctaggtagagcctccatcttcagttgtgtttgtgaaggtattttttgctttttaaatactggggaccgatatcactgttgatagtgcagagaaaccctccacatttttcagtgcataattgagttttctataaatgccttcgtgttttctgagcagaatgtacgaggtgtgccatcccaaaaccagctgctaccctgtccttttaatgtaagtcactccccttcactgtggcctcgctgatgtctgataagtattgtcagtgtgcaaaaggctttacttcagaatggtttatttatagcaaactaagttgaaaattttagaaacagtctttgtgggtggatgttattaactgtcattgttgttgcccagagccatgggttttttaaccccaaattatccacatggtgtgtattatgaattctttgaactcttaaggtttttgtgagaaaaggactgtgaattcaaaacaataaggcacttgtgggtgcactacatagattctgacagtgttgtgattctgtataggatttttaaaaatgacaacattcacaaaatttattactttttaaaaaataacatgcctattaactggttgcactgatataaaagaaatatatttgtgttttgtttgtactaaaatgcaaaagcaagagtgcaatttttaaaatctagaagttaggggttttgttggagaaaaatggactgatctttaaactattcagtcttactgggatttttatgcatagaaactcacatataaacatgaaataaacagtgccagtattcataggaaagtgagaaactgtaatatttggccattattctattcaacaggttttagaggcatgccaccattttttccttatatttttgcttaatttttttaaattgtcatttaattcttaaactgtcatttatttgagatggaaataagatctaaagttagttgcctttgcctgtaaaacatgtgatttgcaaattattattttcctttttttttaacaaatggaagtaaatttgtttcacgtaaatcttaattttcaacctttctggataccttaattgtaactgtcagtttgcactggtcggtatatggaaacacattgctctaccctgctacttagttgattttaaagtgaatttacagtgatgagaaatttgtgaaaaatatattgtatttcttttgatgtttcaaaaggttgcctatgaaaaactgatttgttaaaacatgctacatgtccaaaaataaagaccagaatgacattttgat

SEQ ID NO: 13548 - DNA, 2416 bp, Homo sapiens
tgagtgggcagagctgacccggtgcgggtgggagtcagggcgcccggaaaacccggctctgggtagcagaccccgcccgggctggctcggcgccgggccttcgggcttccactcagtctttgaccctcggtcctcgctcagcggcccggcaggccgcacaactgtaaccgctgccccggccgccgcccgctccttctcgggccggcgggcacagagcgcagcgcggcggggccggcggcatggctgtgtcctggaggagctggctcgccaacgaaggggttaaacacctctgcctgttcatctggctctccatgaatgtcctgcttttctggaaaaccttcttgctgtataaccaagggccagagtatcactacctccaccagatgttggggctaggattgtgtctaagcagagcctcagcatctgttcttaacctcaactgcagccttatccttttacccatgtgccgaacactcttggcttacctccgaggatcacagaaggttccaagcaggagaaccaggagattgttggataaaagcagaacattccatattacctgtggtgttactatctgtattttctcaggcgtgcatgtggctgcccatctggtgaatgccctcaacttctcagtgaattacagtgaagactttgttgaactgaatgcagcaagataccgagatgaggatcctagaaaacttctcttcacaactgttcctggcctgacaggggtctgcatggtggtggtgctattcctcatgatcacagcctctacatatgcaataagagtttctaactatgatatcttctggtatactcataacctcttctttgtcttctacatgctgctgacgttgcatgtttcaggagggctgctgaagtatcaaactaatttagatacccaccctcccggctgcatcagtcttaaccgaaccagctctcagaatatttccttaccagagtatttctcagaacattttcatgaacctttccctgaaggattttcaaaaccggcagagtttacccagcacaaatttgtgaagatttgtatggaagagcccagattccaagctaattttccacagacttggctttggatttctggacctttgtgcctgtactgtgccgaaagactttacaggtatatccggagcaataagccagtcaccatcatttcggtcataagtcatccctcagatgtcatggaaatccgaatggtcaaagaaaattttaaagcaagacctggtcagtatattactctacattgtcccagtgtatctgcattagaaaatcatccatttaccctcacaatgtgtccaactgaaaccaaagcaacatttggggttcatcttaaaatagtaggagactggacagaacgatttcgagatttactactgcctccatctagtcaagactccgaaattctgcccttcattcaatctagaaattatcccaagctgtatattgatggtccttttggaagtccatttgaggaatcactgaactatgaggtcagcctctgcgtggctggaggcattggagtaactccatttgcatcaatactcaacaccctgttggatgactggaaaccatacaagcttagaagactatactttatttgggtatgcagagatatccagtccttccgttggtttgcagatttactctgtatgttgcataacaagttttggcaagagaacagacctgactatgtcaacatccagctgtacctcagtcaaacagatgggatacagaagataattggagaaaaatatcatgcactgaattcaagactgtttataggacgtcctcggtggaaacttttgtttgatgaaatagcaaaatataacagaggaaaaacagttggtgttttctgttgtggacccaattcactatccaagactcttcataaactgagtaaccagaacaactcatatgggacaagatttgaatacaataaagagtctttcagctgaaaacttttgccatgaagcaggactctaaagaaggaatgagtgcaatttctaagactttgaaactcagcggaatcaatcagctgtgttatgccaaagaatagtaaggttttcttatttatgattatttaaaatggaaatgtgagaatgtggcaagatgaccgtcacattacatgtttaatctggaaaccaaagagaccctgaagaatatttgatgtgatgattcacttttcagttctcaaattaaaagaaaactgttagatgcacactgttgattttcatggtggattcaagaactccctagtgaggagctgaacttgctcaatctaaggctgattgtcgtgttcctctttaaattgtttttggttgaacaaatgcaagattgaacaaaattaaaaattcattgaagctgaaaaaaaaaaaaaaaaaaaaaaaaaaaaaaa

SEQ ID NO: 13549 - DNA, 1930 bp, Homo sapiens
atcgaatgttgagagaagcagtgctctgatccagctcaggagaaaaaggagcgggttccgagtgagacttctggagccagctggacgtgccggtttgcccagtgcggcgcggctgcacgcaccgtccacaagagtctcagtcgcccaggctggagtgcagcagcacagtctcacctcattgcaacctccgcctcccgggttcgcgggttctccgcctcagcttcctagtagctgggattgcaggcactcaccaccatgcccggctaattttttgaatttttagtggagacgggatttcaccatgttggccatgctggtcttgaacccccgacctcggatgattcgcccgcctcggcctcccaaagtgctggaattacaggcgaaccttcactcagaagaaatgctgtggcccttccctttaccaacagaaaatggaacacaagagaccacatagctgaacaaattatagcctccttacaagtgagaaaccttcgaggctacatagttttcagccaaaggaaaataaccaacagcttctccacagtgtagactgaaacaagggaaacatgaacatcacaaactgtaccacagaggccagcatggctataagacccaagaccatcactgagaagatgctcatttgcatgactctggtggtcatcaccaccctcaccacgttgctgaacttggctgtgatcatggctattggcaccaccaagaagctccaccagcctgccaactacctaatctgttctctggccgtgacggacctcctggtggcagtgctcgtcatgcccctgagcatcatctacattgtcatggatcgctggaagcttgggtacttcctctgtgaggtgtggctgagtgtggacatgacctgctgcacctgctccatcctccacctctgtgtcattgccctggacaggtactgggccatcaccaatgctattgaatacgccaggaagaggacggccaagagggccgcgctgatgatccttaccgtctggaccatctccattttcatctccatgccccctctgttctggagaagccaccgccgcctaagccctccccctagtcagtgcaccatccagcacgaccatgttatctacaccatttactccacgctgggtgcgttttatatccccttgactttgatactgattctctattaccggatttaccacgcggccaagagcctttaccagaaaaggggatcaagtcggcacttaagcaacagaagcacagatagccagaattcttttgcaagttgtaaacttacacagactttctgtgtgtctgacttctccacctcagaccctaccacagagtttgaaaagttccatgcctccatcaggatcccccccttcgacaatgatctagatcacccaggagaacgtcagcagatctctagcaccagggaacggaaggcagcacgcatcctggggctgattctgggtgcattcattttatcctggctgccatttttcatcaaagagttgattgtgggtctgagcatctacaccgtgtcctcggaagtggccgactttctgacgtggctcggttatgtgaattctctgatcaaccctctgctctatacgagttttaatgaagactttaagctggcttttaaaaagctcattagatgccgagagcatacttagactgtaaaaagctaaaaggcacgactttttccagagcctcatgagtggatgggggtaaggggtgcaacttattaattcttgaacatacttggttcaggagagtttgtaagtatgtgtggtcttgtttccttgtttgtttgtttgttttgttctgttttgtttgaggattgttatttggcgtgctgttttctacctctggtcttatctgtgatacataatttcaaataaacattatcatacaaaaacaaaaaaaaaaaaaaaaaaaa

SEQ ID NO: 13550 - DNA, 2806 bp, Homo sapiens
gtgaaatcccattctctggctggagacacagatggcctcaaatgagagagatgctatatcgtggtaccaaaagaagattggagcctacgatcagcagatatgggaaaagtcaatcgaacagactcagattaagggtttgaaaaacaaaccgaaaaagatgggccacataaagccagacttgattgacgttgacttaatcagagggtcaacatttgccaaagcaaaacctgaaattccatggacatctctgactcggaaggggcttgttcgagttgtattttttccattgttcagcaattggtggattcaggttacctctttaagaatctttgtttggctgttactactttatttcatgcaagttatagcaattgtcttatatttgatgatgcctattgtgaacataagtgaagtacttggacccttgtgccttatgctactcatgggaactgtccactgtcaaattgtgtctactcagataacaagaccatcaggaaacaatggaaatcgaagaagaagaaaattacgaaaaactgtaaatggtgatgggagccgagaaaatggaaataactcctctgataaagtcagaggaatagaaactttggaatctgtacccattattggtggtttttgggagactatctttggcaacaggattaaaagagtaaaattaatatctaacaaagggactgaaactgacaatgacccaagttgtgtccatcctatcattaagaggagacaatgtcgaccagagattagaatgtgccaaacaagagagaaaccaaaattttcagatggagaaaagtgccgtagggaggcttttaggcgtttgggtaatggggtgtctgatgacctgtcaagtgaagaagatggtgaagcacggacacagatgatattattgcgtaggagtgtggaaggggcctcaagtgacaatggttgtgaagttaagaatagaaaatcaatactttcaaggcacctaaactctcaggtaaagaaaaccactacaaggtggtgtcatattgtgcgggattcagatagtctggctgaatcagaatttgaatcagcagccttcagccagggctctagatcgggtgtgagtggtggctctcgaagcctcaacatgtcaagaagagactcagaaagcacccgccatgactcggagactgaggacatgttatgggacgacctgctacatggcccagagtgccggtcatctgtcaccagtgacagtgagggggcccatgtgaatacccttcactcagggaccaaacgtgaccccaaagaggatgtttttcagcagaatcatttattctggcttcagaattcaagtccttcctctgatcgagttagtgcaataatctgggaggggaatgagtgcaaaaagatggatatgtctgtgttggaaataagtggcatcatcatgagcagggtcaatgcctatcagcaaggagtaggttatcagatgctgggaaatgttgtcactattggattagcattttttccattcttacatcgacttttccgtgagaagagccttgaccaactaaagtccatttcagctgaggagatcttgactctctttggtggggcaccacctgttacacctattattgtttggtcgataattaatttttttgaaagattgtgtcttacttggatgttttttttcatgatgtgtgtggcagagagaacatataaacagagatttttatttgcaaaactcttcagccatattacttctgccaggaaagctaggaaatatgaaatacctcatttcagacttaagaaggtggagaatattaaaatatggttatcactgcgttcctatctaaagagacgggggccacagcgttcagttgatgtggttgtatcctcggttttcctactgacactttcgattgctttcatttgttgtgctcaggttctccaaggacataaaacttccctgaatgatgcttataactgggagtttttgatctgggaaacagctttactactttttttattgcgtctggcctcactggggtctgaaaccaataagaaatacagcaatgtttcaatattacttacagaacagattaatttatatcttaagatggaaaaaaagccaaataagaaagaacagcttactctagtaaacaatgtattaaagctgtccaccaagttgttgaaagagctggacacaccatttagactctatggactgacaatgaatcccttaatctacaatatcacaagagtagttatcctttctgctgtctcaggtgttataagtgatcttctaggatttaatataagactgtggaaaattaaatcataagctgagttaaatgcctggactctcccctggctggtatcaaaacttacctatcaaggaaagtgatgactgcagaaaccagtgagatacccacctgcttgttcacatgcacaggtgctctcagctctgcaaagcgaatgaatggtgtttccggaggagcaagtccttttccaactgggtgtgcatgctaaaaacctgtattttcatgcttttcaaacaacatgaatagtcagctgactaaagactgtgtgtgttgtggtaacaccaaagacaattttgatagtttagcttcagtactgtgacagttatgtttactggacatagtctttttggcaactatgatagatgcccaaagcatgaagcaaagctattttatggaaatatgcaaattcaatacttttcattatagtctatagaactggagatttcatttctctatcaaagagagatcaagcgaactatttaggtaaatccgaataaaagactttt

SEQ ID NO: 13551 - DNA, 5706 bp, Homo sapiens
atttaagcgattttttttccctccttcatctccgggcctcggataagatgacggcttgggtgatgcacgaaataacgcacgtgattgattagacctggcttggcttggctagggaacgatccaggcgcgctggagaccccgcgtgaagatgaaatgacggctgccttggagttttcataagaaattgtccctggaggtgttggatgatcacagcttccttggagcattgcagttgctggaatccagtttcaggattaagggagggctgcctccttgcaatgggctgccaagaaaacggctgtgcttgttcttaacctcaggctctgtctgtgatcagtctgagagtctctcccaggtctactgctccctggaaagccctatctctctgcaggctcgcctctgggctttgtctccttggagccacatcactgggacagctgtggatgtggatgcagatttgaaccatgtcacggccccagggactgctatggcttcctttgttgttcaccccggtctgcgtcatgttaaactccaatgtcctcctgtggttaactgctcttgccatcaagttcaccctcattgacagccaagcacagtatccagttgtcaacacaaattatggcaaaatccggggcctaagaacaccgttacccaatgagatcttgggtccagtggagcagtacttaggggtcccctatgcctcaccccccactggagagaggcggtttcagcccccagaacccccgtcctcctggactggcatccgaaatactactcagtttgctgctgtgtgcccccagcacctggatgagagatccttactgcatgacatgctgcccatctggtttaccgccaatttggatactttgatgacctatgttcaagatcaaaatgaagactgcctttacttaaacatctacgtgcccacggaagatgatattcatgatcagaacagtaagaagcccgtcatggtctatatccatgggggatcttacatggagggcaccggcaacatgattgacggcagcattttggcaagctacggaaacgtcatcgtgatcaccattaactaccgtctgggaatactagggtttttaagtaccggtgaccaggcagcaaaaggcaactatgggctcctggatcagattcaagcactgcggtggattgaggagaatgtgggagcctttggcggggaccccaagagagtgaccatctttggctcgggggctggggcctcctgtgtcagcctgttgaccctgtcccactactcagaaggtctcttccagaaggccatcattcagagcggcaccgccctgtccagctgggcagtgaactaccagccggccaagtacactcggatattggcagacaaggtcggctgcaacatgctggacaccacggacatggtagaatgcctgcggaacaagaactacaaggagctcatccagcagaccatcaccccggccacctaccacatagccttcgggccggtgatcgacggcgacgtcatcccagacgacccccagatcctgatggagcaaggcgagttcctcaactacgacatcatgctgggcgtcaaccaaggggaaggcctgaagttcgtggacggcatcgtggataacgaggacggtgtgacgcccaacgactttgacttctccgtgtccaacttcgtggacaacctttacggctaccctgaagggaaagacactttgcgggagactatcaagttcatgtacacagactgggccgataaggaaaacccggagacgcggcggaaaaccctggtggctctctttactgaccaccagtgggtggcccccgccgtggccaccgccgacctgcacgcgcagtacggctcccccacctacttctatgccttctatcatcactgccaaagcgaaatgaagcccagctgggcagattcggcccatggtgatgaggtcccctatgtcttcggcatccccatgatcggtcccaccgagctcttcagttgtaacttttccaagaacgacgtcatgctcagcgccgtggtcatgacctactggacgaacttcgccaaaactggtgatccaaatcaaccagttcctcaggataccaagttcattcacacaaaacccaaccgctttgaagaagtggcctggtccaagtataatcccaaagaccagctctatctgcatattggcttgaaacccagagtgagagatcactaccgggcaacgaaagtggctttctggttggaactcgttcctcatttgcacaacttgaacgagatattccagtatgtttcaacaaccacaaaggttcctccaccagacatgacatcatttccctatggcacccggcgatctcccgccaagatatggccaaccaccaaacgcccagcaatcactcctgccaacaatcccaaacactctaaggaccctcacaaaacagggcctgaggacacaactgtcctcattgaaaccaaacgagattattccaccgaattaagtgtcaccattgccgtcggggcgtcgctcctcttcctcaacatcttagcttttgcggcgctgtactacaaaaaggacaagaggcgccatgagactcacaggcgccccagtccccagagaaacaccacaaatgatatcgctcacatccagaacgaagagatcatgtctctgcagatgaagcagctggaacacgatcacgagtgtgagtcgctgcaggcacacgacacactgaggctcacctgcccgccagactacaccctcacgctgcgccggtcgccagatgacatcccacttatgacgccaaacaccatcaccatgattccaaacacactgacggggatgcagcctttgcacacttttaacaccttcagtggaggacaaaacagtacaaatttaccccacggacattccaccactagagtatagctttgccctatttcccttcctatccctctgccctacccgctcagcaacatagaagagggaaggaaagagagaaggaaagagagagagaaagaaagtctccagaccaggaatgtttttgtcccactgacttaagacaaaaatgcaaaaaggcagtcatcccatcccggcagacccttatcgttggtgttttccagtattacaagatcaacttctgaccctgtgaaatgtgagaagtacacatttctgttaaaataactgctttaagatctctaccactccaatcgatgtttagtgtgataggacatcaccatttcaaggccccgggtgtttccaacgtcatggaagcagctgacacttctgaaactcagccaaggacacttgatattttttaattacaatggaagtttaaacatttctttctgtgccacacaatggatggctctccttaagtgaagaaagagtcaatgagattttgcccagcacatggagctgtaatccagagagaaggaaacgtagaaatttattattaaaagaatggactgtgcagcgaaatctgtacggttctgtgcaaagaggtgttttgccagcctgaactatatttaagagactttgtaaaaaagaaaaatgtatatagctgtgagtttaaacaaaaaccacaaacagacaaacaagaaaaaaagcttttattggtgttttcactttgaaagagcttttagcaaggttgtgcttttcattgtgctctgtacgtatataaatatatatatatatacacacacacacacacattagtcatatcacctctgtttcctccccaacaaaagaggcttttcttcttaattacttgtggtaaacaaagacatgggattttcttacatgagattctcatttgtaggaggatgtgatgtcccacagaagacccagacggtctgtgtggcctatttcccccgtcaggttgcacaggtgcatgcaagagcattcttaggagaccactgttttgaaaaacttttgacttgtacgtgttagccttcatgaaattgcagtacagagatgggtccccaaagtggagtgtatttacagcttgttaaattagagacatgcacacacaaagaatcagtagggagaaacaaaaatacaagtcccgttctgtagctctggccctttgaatatgtttaggaagagttgcttcccatttcagggccctgccaaaaaaagaagaaagcttgcctttggtggggctatgccccttggagtaaatacggctctgtgttccctagcagctgcgggagggtttggccgatgaagtacctgctcagcttagctaatcagattgaaggaagacatgtgtctttcctttttgtttaagcactcggtcccttatttatcagtaagcaggtttttaaaaatcttttatatcatttatgggatcaaacatatgattgtctgaaaacatcactttttgtggatttgtgtatccggtcaccaaacggtgaatattatagaagaatgggggaagaaaggatagaatattaaaactgctttgcatgggttttctgggaaattaggataacttcactgagaagacattgaatggaaattattcacccattttaaattggtgacctagggatcagagatttgtctttccaacagcttgtcattttttcatttctcttctcatttttcaggaaagttttgagtgttataaggtggaaggaaacatagtagcaatggatacttttttgaaaaattattgcattaccaagaaacagtagccaaagatatttgaagatcatgttcctcggctccattgtgggttattctagaaatccagtcttaaatctctccgctaaagtggacattccccataaaaattgtccagctgcctggctcttttgcaataacaacctttgattactgaatccctacactcaaactatagtgatatatcagtgtttgagagtgacctctagaaaaaagaaaagtgtttttagaaatgcgtacaagtcacccccaaatcctattgcttatcttgggttaaatttgagagtgattctctgtatataaatatgtgaaatattattatctcaacttagcacacgtgaagcaacatttctttcctacagagaggtgtcatggtaagatttcattccgaattcattgtttcatagagctatgatcaggccatttctgcaagcaatgtatgaccccacctgagcaaccacaaataggctctctgtgaaactacaaaggaagttatgtgtggcatccatgttggtttcgtctgtctgtaatgtgaattccagtatttgtttagtatttccagttgtctcctgctagcaatatgtacagtaacgcgtcaggcttgtgacatttgaataaggaaaaacagagttcctgttaagtgaataactttagcttttacaggggattatgatcaaaagtgattttagtacatcttaaatgatatcttatttctacatggaaagaagttatagaatcttcatagagttctatgagaaaaaatatacttgctatctataaaaaagagaaaaaagaaaaaaaatgagaaaaaagtaagaaaaaaaaaaatcctgtcctaggcttttactcttgatcttcaaaggcacgcagggtttaatggttccttgggttattattttgcagttttgttttttattttgccttaagtaatgatagaagatatatatggccggacacatatgtataaacttttcagcagcatttttaataataaaatatcacagtattttctaaaaaaaaaaaaaaaaaa

SEQ ID NO: 13552 - DNA, 5672 bp, Homo sapiens
agaaggggaaggctcctgggctttcaatacatcctcctgaatcatacctcgtttcgggttccctagaaaaatctggacgtgtaaaaagaactcttaacggccgatgcagctcttccaaagctaaggctgccttggagttttcataagaaattgtccctggaggtgttggatgatcacagcttccttggagcattgcagttgctggaatccagtttcaggattaagggagggctgcctccttgcaatgggctgccaagaaaacggctgtgcttgttcttaacctcaggctctgtctgtgatcagtctgagagtctctcccaggtctactgctccctggaaagccctatctctctgcaggctcgcctctgggctttgtctccttggagccacatcactgggacagctgtggatgtggatgcagatttgaaccatgtcacggccccagggactgctatggcttcctttgttgttcaccccggtctgcgtcatgttaaactccaatgtcctcctgtggttaactgctcttgccatcaagttcaccctcattgacagccaagcacagtatccagttgtcaacacaaattatggcaaaatccggggcctaagaacaccgttacccaatgagatcttgggtccagtggagcagtacttaggggtcccctatgcctcaccccccactggagagaggcggtttcagcccccagaacccccgtcctcctggactggcatccgaaatactactcagtttgctgctgtgtgcccccagcacctggatgagagatccttactgcatgacatgctgcccatctggtttaccgccaatttggatactttgatgacctatgttcaagatcaaaatgaagactgcctttacttaaacatctacgtgcccacggaagatgatattcatgatcagaacagtaagaagcccgtcatggtctatatccatgggggatcttacatggagggcaccggcaacatgattgacggcagcattttggcaagctacggaaacgtcatcgtgatcaccattaactaccgtctgggaatactagggtttttaagtaccggtgaccaggcagcaaaaggcaactatgggctcctggatcagattcaagcactgcggtggattgaggagaatgtgggagcctttggcggggaccccaagagagtgaccatctttggctcgggggctggggcctcctgtgtcagcctgttgaccctgtcccactactcagaaggtctcttccagaaggccatcattcagagcggcaccgccctgtccagctgggcagtgaactaccagccggccaagtacactcggatattggcagacaaggtcggctgcaacatgctggacaccacggacatggtagaatgcctgcggaacaagaactacaaggagctcatccagcagaccatcaccccggccacctaccacatagccttcgggccggtgatcgacggcgacgtcatcccagacgacccccagatcctgatggagcaaggcgagttcctcaactacgacatcatgctgggcgtcaaccaaggggaaggcctgaagttcgtggacggcatcgtggataacgaggacggtgtgacgcccaacgactttgacttctccgtgtccaacttcgtggacaacctttacggctaccctgaagggaaagacactttgcgggagactatcaagttcatgtacacagactgggccgataaggaaaacccggagacgcggcggaaaaccctggtggctctctttactgaccaccagtgggtggcccccgccgtggccaccgccgacctgcacgcgcagtacggctcccccacctacttctatgccttctatcatcactgccaaagcgaaatgaagcccagctgggcagattcggcccatggtgatgaggtcccctatgtcttcggcatccccatgatcggtcccaccgagctcttcagttgtaacttttccaagaacgacgtcatgctcagcgccgtggtcatgacctactggacgaacttcgccaaaactggtgatccaaatcaaccagttcctcaggataccaagttcattcacacaaaacccaaccgctttgaagaagtggcctggtccaagtataatcccaaagaccagctctatctgcatattggcttgaaacccagagtgagagatcactaccgggcaacgaaagtggctttctggttggaactcgttcctcatttgcacaacttgaacgagatattccagtatgtttcaacaaccacaaaggttcctccaccagacatgacatcatttccctatggcacccggcgatctcccgccaagatatggccaaccaccaaacgcccagcaatcactcctgccaacaatcccaaacactctaaggaccctcacaaaacagggcctgaggacacaactgtcctcattgaaaccaaacgagattattccaccgaattaagtgtcaccattgccgtcggggcgtcgctcctcttcctcaacatcttagcttttgcggcgctgtactacaaaaaggacaagaggcgccatgagactcacaggcgccccagtccccagagaaacaccacaaatgatatcgctcacatccagaacgaagagatcatgtctctgcagatgaagcagctggaacacgatcacgagtgtgagtcgctgcaggcacacgacacactgaggctcacctgcccgccagactacaccctcacgctgcgccggtcgccagatgacatcccacttatgacgccaaacaccatcaccatgattccaaacacactgacggggatgcagcctttgcacacttttaacaccttcagtggaggacaaaacagtacaaatttaccccacggacattccaccactagagtatagctttgccctatttcccttcctatccctctgccctacccgctcagcaacatagaagagggaaggaaagagagaaggaaagagagagagaaagaaagtctccagaccaggaatgtttttgtcccactgacttaagacaaaaatgcaaaaaggcagtcatcccatcccggcagacccttatcgttggtgttttccagtattacaagatcaacttctgaccctgtgaaatgtgagaagtacacatttctgttaaaataactgctttaagatctctaccactccaatcgatgtttagtgtgataggacatcaccatttcaaggccccgggtgtttccaacgtcatggaagcagctgacacttctgaaactcagccaaggacacttgatattttttaattacaatggaagtttaaacatttctttctgtgccacacaatggatggctctccttaagtgaagaaagagtcaatgagattttgcccagcacatggagctgtaatccagagagaaggaaacgtagaaatttattattaaaagaatggactgtgcagcgaaatctgtacggttctgtgcaaagaggtgttttgccagcctgaactatatttaagagactttgtaaaaaagaaaaatgtatatagctgtgagtttaaacaaaaaccacaaacagacaaacaagaaaaaaagcttttattggtgttttcactttgaaagagcttttagcaaggttgtgcttttcattgtgctctgtacgtatataaatatatatatatatacacacacacacacacattagtcatatcacctctgtttcctccccaacaaaagaggcttttcttcttaattacttgtggtaaacaaagacatgggattttcttacatgagattctcatttgtaggaggatgtgatgtcccacagaagacccagacggtctgtgtggcctatttcccccgtcaggttgcacaggtgcatgcaagagcattcttaggagaccactgttttgaaaaacttttgacttgtacgtgttagccttcatgaaattgcagtacagagatgggtccccaaagtggagtgtatttacagcttgttaaattagagacatgcacacacaaagaatcagtagggagaaacaaaaatacaagtcccgttctgtagctctggccctttgaatatgtttaggaagagttgcttcccatttcagggccctgccaaaaaaagaagaaagcttgcctttggtggggctatgccccttggagtaaatacggctctgtgttccctagcagctgcgggagggtttggccgatgaagtacctgctcagcttagctaatcagattgaaggaagacatgtgtctttcctttttgtttaagcactcggtcccttatttatcagtaagcaggtttttaaaaatcttttatatcatttatgggatcaaacatatgattgtctgaaaacatcactttttgtggatttgtgtatccggtcaccaaacggtgaatattatagaagaatgggggaagaaaggatagaatattaaaactgctttgcatgggttttctgggaaattaggataacttcactgagaagacattgaatggaaattattcacccattttaaattggtgacctagggatcagagatttgtctttccaacagcttgtcattttttcatttctcttctcatttttcaggaaagttttgagtgttataaggtggaaggaaacatagtagcaatggatacttttttgaaaaattattgcattaccaagaaacagtagccaaagatatttgaagatcatgttcctcggctccattgtgggttattctagaaatccagtcttaaatctctccgctaaagtggacattccccataaaaattgtccagctgcctggctcttttgcaataacaacctttgattactgaatccctacactcaaactatagtgatatatcagtgtttgagagtgacctctagaaaaaagaaaagtgtttttagaaatgcgtacaagtcacccccaaatcctattgcttatcttgggttaaatttgagagtgattctctgtatataaatatgtgaaatattattatctcaacttagcacacgtgaagcaacatttctttcctacagagaggtgtcatggtaagatttcattccgaattcattgtttcatagagctatgatcaggccatttctgcaagcaatgtatgaccccacctgagcaaccacaaataggctctctgtgaaactacaaaggaagttatgtgtggcatccatgttggtttcgtctgtctgtaatgtgaattccagtatttgtttagtatttccagttgtctcctgctagcaatatgtacagtaacgcgtcaggcttgtgacatttgaataaggaaaaacagagttcctgttaagtgaataactttagcttttacaggggattatgatcaaaagtgattttagtacatcttaaatgatatcttatttctacatggaaagaagttatagaatcttcatagagttctatgagaaaaaatatacttgctatctataaaaaagagaaaaaagaaaaaaaatgagaaaaaagtaagaaaaaaaaaaatcctgtcctaggcttttactcttgatcttcaaaggcacgcagggtttaatggttccttgggttattattttgcagttttgttttttattttgccttaagtaatgatagaagatatatatggccggacacatatgtataaacttttcagcagcatttttaataataaaatatcacagtattttctaaaaaaaaaaaaaaaaaa

SEQ ID NO: 13553 - DNA, 3347 bp, Homo sapiens
agcctcggcgtgcccccaggaccggtaaagttcctctcgccagccgcatccatgcttctggcgcggatgaacccgcaggtgcagcccgagaacaacggggcggacacgggtccagagcagccccttcgggcgcgcaaaactgcggagctgctggtggtgaaggagcgcaacggcgtccagtgcctgctggcgccccgcgacggcgacgcgcagccccgggagacctggggcaagaagatcgacttcctgctgtccgtagtcggcttcgcagtggacctggccaacgtgtggcgcttcccctacctctgctacaagaacggcggcggtgccttcttgatcccgtacacactgttccttatcatcgcggggatgcccctgttctacatggagctggctctgggacagtacaaccgggagggggctgccaccgtttggaaaatctgcccattcttcaaaggcgttggctatgctgtcatcctgatcgccctgtacgttggcttctactacaacgtcatcatcgcctggtcactctactacctcttctcctccttcaccctcaacctgccctggaccgactgtggccacacctggaacagccccaactgtaccgaccccaagctcctcaatggctccgtgcttggcaaccacaccaagtactccaagtacaagttcacgccggcagccgagttttatgagcgtggtgtcctgcaccttcacgagagcagcgggattcatgacatcggcctgccccagtggcagctcttgctctgtctgatggtcgtcgtcatcgtcttgtattttagcctctggaaaggggtgaagacatcaggaaaggtggtgtggatcacagccacgctgccttacttcgtgctgttcgtgctcctggtccatggcgtcacgctgcccggagcctccaatggcatcaatgcctacctgcacatcgacttctaccgcttgaaagaggccacggtatggattgatgccgcaactcagatatttttttccttgggggctggatttggagtattgattgcatttgccagttacaacaaatttgacaacaactgttacagggatgccctgctgaccagcagcatcaactgtatcaccagcttcgtctctgggttcgccatcttctccatccttggttacatggcccatgaacacaaggtcaacattgaggatgtggccacagaaggagctggcctagtgttcatcctgtatccagaggccatttctaccctgtctggatctacattctgggctgttgtgtttttcgtcatgctcctggcgctgggccttgacagctcaatgggaggcatggaggctgtcatcacgggcctggcagatgacttccaggtcctgaagcgacaccggaaactcttcacatttggcgtcaccttcagcactttccttctcgccctgttctgcataaccaagggtggaatttacgtcttgaccctcctggacacctttgctgcgggcacctccatcctttttgctgtcctcatggaagccatcggagtttcctggttttatggagtggacaggttcagcaacgacatccagcagatgatggggttcaggccgggtctatactggagactgtgctggaagttcgtcagtcctgccttcctcctgttcgtggttgtggtcagcatcatcaacttcaagccactcacctacgacgactacatcttcccgccctgggccaactgggtggggtggggcatcgccctgtcctccatggtcctggtgcccatctacgtcatctataagttcctcagcacgcagggctctctttgggagagactggcctatggcatcacgccagagaacgagcaccacctggtggctcagagggacatcagacagttccagttgcaacactggctggccatctgagcctgcctggaggagaaggaggaacccccatgccaatgtccaggtcacaggcatccgctgcgctcccacctcggacaccatcttgggattcctcccctggaagttgtcctttctgatcctctcttcttttcccatttacaaatgatttcgtgactgtagtttttgttcaccttctgtgcatctggcctgggggctgttagctcagaggagaggagcaaacaggaaaatgacttctgttctgtccccgctgttttgggggaagtctctcccactttgggatcctgctgaagctaggttcatgaggtcggaaatccccaccacatttgcctagactttgggcacaggagttcttagtccaccaaatcagagagaggatgggcttttgatcagatacccctcccaaaaaaaaaaaaaactaaaactaaagcaaaaatcaaacaaaatctggctgagtttagtggggtggttggggaaggtacatagaccctcctcttgcccaccctagacagccctctcatgtctgaacctcagcctgggagttagatttatttgtctctaaaatgaagtcagtggatagatgctttgagggattttgagtagaaacattcatagttaattttcactctggccaatctgagtttgatgtgtgtgttctggaacattcctccagcttttggtggtcagatggcccagagatatgggggacaggaggaagagggtaaatgaaccacagtgagcaggttctaggaggtacctgcatcagacaagctggtggaggccacgtggcaagccacatctactgaggcctcatgctgctcttgctctgtaagacacggagcccagaaacccatctgcacttcctgagacctgcctggggaaacgggggcagggaccaagtgaggcctcatgtgtgtcttcaccgtgctgtcctcacaaggccaggtgggtgcccaaagggagcctgacaggctgttgtgttaatttattgttcttgcacacctgcacagcctccctctggggatcccacctggagtggaccaggggtcttgagaaatggagagttggctgcaaaaactctcatgcactagatgtggcaccttggagggcagggtgagacaagcagcccagaaatactctctcaagtggaggggagaattttgagagtggatggaacagtttggtggtttcagagaatttctaggtttctacttggatctacttctgatacaaacttgcacttggtgccctctggtggtgtttagttttagttccgtaagagaaatgattcctagtttgctaaattggtggcatctttgggaggggtttctgtttatggttagagtctcttacacccttgttggagggattcttattctgactgtgggagctcctgttgcgggatcttgggaaaaaataaagaagccgctgcattcgcacgtcaa

SEQ ID NO: 13554 - DNA, 2064 bp, Homo sapiens
tgcaagtctgcagccagcagagctcacagttgttgcaaagtgctcagcactaagggagccagcgcacagcacagccaggaaggcgagcgagcccagccagcccagccagcccagccagcccggaggtcatttgattgcccgcctcagaacgatggatctgcatctcttcgactactcagagccagggaacttctcggacatcagctggccatgcaacagcagcgactgcatcgtggtggacacggtgatgtgtcccaacatgcccaacaaaagcgtcctgctctacacgctctccttcatttacattttcatcttcgtcatcggcatgattgccaactccgtggtggtctgggtgaatatccaggccaagaccacaggctatgacacgcactgctacatcttgaacctggccattgccgacctgtgggttgtcctcaccatcccagtctgggtggtcagtctcgtgcagcacaaccagtggcccatgggcgagctcacgtgcaaagtcacacacctcatcttctccatcaacctcttcggcagcattttcttcctcacgtgcatgagcgtggaccgctacctctccatcacctacttcaccaacacccccagcagcaggaagaagatggtacgccgtgtcgtctgcatcctggtgtggctgctggccttctgcgtgtctctgcctgacacctactacctgaagaccgtcacgtctgcgtccaacaatgagacctactgccggtccttctaccccgagcacagcatcaaggagtggctgatcggcatggagctggtctccgttgtcttgggctttgccgttcccttctccattatcgctgtcttctacttcctgctggccagagccatctcggcgtccagtgaccaggagaagcacagcagccggaagatcatcttctcctacgtggtggtcttccttgtctgctggctgccctaccacgtggcggtgctgctggacatcttctccatcctgcactacatccctttcacctgccggctggagcacgccctcttcacggccctgcatgtcacacagtgcctgtcgctggtgcactgctgcgtcaaccctgtcctctacagcttcatcaatcgcaactacaggtacgagctgatgaaggccttcatcttcaagtactcggccaaaacagggctcaccaagctcatcgatgcctccagagtctcagagacggagtactctgccttggagcagagcaccaaatgatctgccctggagaggctctgggacgggtttacttgtttttgaacagggtgatgggccctatggttttctagagcaaagcaaagtagcttcgggtcttgatgcttgagtagagtgaagaggggagcacgtgccccctgcatccattctctctttctcttgatgacgcagctgtcatttggctgtgcgtgctgacagttttgcaacaggcagagctgtgtcgcacagcagtgctgtgcgtcagagccagctgaggacaggcttgcctggacttctgtaagataggattttctgtgtttcctgaattttttatatggtgatttgtatttaaattttaagactttattttctcactattggtgtaccttataaatgtatttgaaagttaaatatattttaaatattgtttgggaggcatagtgctgacatatattcagagtgttgtagttttaaggttagcgtgacttcagttttgactaaggatgacactaattgttagctgttttgaaattatatatatataaatatatataaatatataaatatatgccagtcttggctgaaatgttttatttaccatagttttatatctgtgtggtgttttgtaccggcacgggatatggaacgaaaactgctttgtaatgcagtttgtgacattaatagtattgtaaagttacattttaaaataaacaaaaaactgttctggactgcaaatctgcacacacaacgaacagttgcatttcagagagttctctcaatttgtaagttatttttttttaataaagatttttgtttccaaaaaaaaaaaaaaaaaaaaaaaaaaaaaa

SEQ ID NO: 13555 - DNA, 3338 bp, Homo sapiens
cccagcccggccccgccgccccggctgcgcacgcgacgccccctccaggccccgctcctgcgccctatttggtcattcggggggcaagcggcgggaggggaaacgtgcgcggccgaaggggaagcggagccggcgccggctgcgcagaggagccgctctcgccgccgccacctcggctgggagcccacgaggctgccgcatcctgccctcggaacaatgggactcggcgcgcgaggtgcttgggccgcgctgctcctggggacgctgcaggtgctagcgctgctgggggccgcccatgaaagcgcagccatggcggagactctccaacatgtgccttctgaccatacaaatgaaacttccaacagtactgtgaaaccaccaacttcagttgcctcagactccagtaatacaacggtcaccaccatgaaacctacagcggcatctaatacaacaacaccagggatggtctcaacaaatatgacttctaccaccttaaagtctacacccaaaacaacaagtgtttcacagaacacatctcagatatcaacatccacaatgaccgtaacccacaatagttcagtgacatctgctgcttcatcagtaacaatcacaacaactatgcattctgaagcaaagaaaggatcaaaatttgatactgggagctttgttggtggtattgtattaacgctgggagttttatctattctttacattggatgcaaaatgtattactcaagaagaggcattcggtatcgaaccatagatgaacatgatgccatcatttaaggaaatccatggaccaaggatggaatacagattgatgctgccctatcaattaattttggtttattaatagtttaaaacaatattctctttttgaaaatagtataaacaggccatgcatataatgtacagtgtattacgtaaatatgtaaagattcttcaaggtaacaagggtttgggttttgaaataaacatctggatcttatagaccgttcatacaatggttttagcaagttcatagtaagacaaacaagtcctatctttttttttttggctggggtgggggcattggtcacatatgaccagtaattgaaagacgtcatcactgaaagacagaatgccatctgggcatacaaataagaagtttgtcacagcactcaggattttgggtatcttttgtagctcacataaagaacttcagtgcttttcagagctggatatatcttaattactaatgccacacagaaattatacaatcaaactagatctgaagcataatttaagaaaaacatcaacattttttgtgctttaaactgtagtagttggtctagaaacaaaatactccaagaaaaagaaaattttcaaataaaacccaaaataatagctttgcttagccctgttagggatccattggagcattaaggagcacatatttttattaacttcttttgagctttcaatgttgatgtaatttttgttctctgtgtaatttaggtaaactgcagtgtttaacataataatgttttaaagacttagttgtcagtattaaataatcctggcattatagggaaaaaacctcctagaagttagattatttgctactgtgagaatattgtcaccactggaagttactttagttcatttaattttaattttatattttgtgaatattttaagaactgtagagctgctttcaatatctagaaatttttaattgagtgtaaacacacctaactttaagaaaaagaaccgcttgtatgattttcaaaagaacatttagaattctatagagtcaaaactatagcgtaatgctgtgtttattaagccagggattgtgggacttcccccaggcaactaaacctgcaggatgaaaatgctatattttctttcatgcactgtcgatattactcagatttggggaaatgacatttttatactaaaacaaacaccaaaatattttagaataaattcttagaaagttttgagaggaatttttagagaggacatttcctccttcctgatttggatattccctcaaatccctcctcttactccatgctgaaggagaagtactctcagatgcattatgttaatggagagaaaaagcacagtattgtagagacaccaatattagctaatgtattttggagtgttttccattttacagtttatattccagcactcaaaactcagggtcaagttttaacaaaagaggtatgtagtcacagtaaatactaagatggcatttctatctcagagggccaaagtgaatcacaccagtttctgaaggtcctaaaaatagctcagatgtcctaatgaacatgcacctacatttaataggagtacaataaaactgttgtcagcttttgttttacagagaacgctagatattaagaattttgaaatggatcatttctacttgctgtgcattttaaccaataatctgatgaatatagaaaaaaatgatccaaaatatggatatgattggatgtatgtaacacatacatggagtatggaggaaattttctgaaaaatacatttagattagtttagtttgaaggagaggtgggctgatggctgagttgtatgttactaacttggccctgactggttgtgcaaccattgcttcatttctttgcaaaatgtagttaagatatactttattctaatgaaggccttttaaatttgtccactgcattcttggtatttcactacttcaagtcagtcagaacttcgtagaccgacctgaagtttctttttgaatacttgtttctttagcactttgaagatagaaaaaccactttttaagtactaagtcatcatttgccttgaaagtttcctctgcattgggtttgaagtagtttagttatgtctttttctctgtatgtaagtagtataatttgttactttcaaatacccgtactttgaatgtaggtttttttgttgttgttatctataaaaattgagggaaatggttatgcaaaaaaatattttgctttggaccatatttcttaagcataaaaaaatgctcagttttgcttgcattccttgagaatgtatttatctgaagatcaaaacaaacaatccagatgtataagtactaggcagaagccaattttaaaatttccttgaataatccatgaaaggaataattcaaatacagataaacagagttggcagtatattatagtgataattttgtattttcaamaaaaaaaaagttaaactcttcttttctttttattataatgaccagcttttggtatttcattgttaccaagttctatttttagataaaattgttctccttctaaaaaaaaaaaaaaaaaaaaaaa

SEQ ID NO: 13556 - DNA, 9931 bp, Homo sapiens
cagtttcttaatccagtctatcactgatggacatttggatatggagagcagatggtcaacattctcctcataaccttccagggaatggaagatacccgttgaagccctcccaggctgtgtgaccccacgttggggacaggtcacaaaacctaagccttgtgcctactggaaagaagaagcagtggagtccttgacagaagcagtggtgctggaacctggtgctaggcgctgggccaagcactttacatactgtgtgttatgtaatcttcacagcaatatgagacttagacaatgaaagaacacatcatatatcagaagctttatggattgattctcatgtcgagttttatctttctctcagatacactttcactaaaaggaaaaaagctggatttttttggaagaggtgacacatatgtaagcctgatagataccattcctgaactcagccgattcacagcatgcattgatctggtattcatggatgacaactcaaggtattggatggccttctcttatattactaataacgccctcctgggcagagaagacatagaccttggacttgcaggagaccatcagcagctaatactatacagattgggaaagaccttttctatccgtcaccacctggcttcatttcaatggcatacaatatgcttgatatgggatggtgtgaagggcaaattagaactcttcctgaataaagaaaggatactggaagtaacggatcaaccacacaacctgacacctcatgggactctgttcctagggcactttctcaagaatgagagcagcgaggttaaaagcatgatgcgtagctttcctggcagcttgtactactttcaactctgggaccacatcctggaaaacgaagagtttatgaagtgtttagatggaaatatagttagttgggaagaagacgtctggcttgtcaacaagatcatcccaactgttgacaggacactgcgctgctttgttcctgaaaatatgacaattcaagaaaaaagtacaactgtttcacaacagatagatatgaccactccatcccaaattactggagtaaaaccacaaaatactgcacattcctctacactattgtctcaaagcatacctatatttgcaactgattacacaaccatatcatattccaatacaacatctccacctctggaaacaatgactgcacaaaaaatcttaaagacactggtagatgagacagctacatttgcagtggatgttttatcaacttcatcagccatctctctgcctacccagagtatatccatagacaatactaccaattccatgaaaaaaacgaaatctccatcttcagaaagcacaaagacaacaaaaatggttgaagccatggctactgaaatctttcaaccacctacaccttctaatttcctatccacatccagatttaccaagaattcagttgtatctacaacttcagcaattaaatctcagtcggctgttacgaagacaacatctttattttcaactattgagtcaacatctatgtctacaacaccttgtctcaaacaaaaatccacaaatactggggcactccctatctccacagctggccaggagttcattgaatctacagctgccggaactgtaccttggtttacagtggaaaagacttcacctgcatctactcatgttgggactgcatcatcattcccacctgagcctgtgctcatctccacagctgctccagtagattctgtatttcctagaaaccagacagcatttccattggcaacaactgatatgaaaatagcatttacagtccattcattgactctcccaactaggcttattgagaccacacctgccccaaggacagctgaaacagaattgacatctacaaattttcaggatgtctctttacccagagtggaagatgccatgtctacttccatgtcgaaagagacctcctctaagaccttttctttcttaacatccttttcatttactgggactgagagtgtacagacagttattgatgctgaagctacacgtacagccttaactcctgaaatcacacttgcatctacagtggctgaaactatgctttcctccacaatcacaggacgagtttacacccagaatacacctacagctgatggacacttgcttactttgatgtccactagatcagcttccacatccaaggcacctgagtcaggtcccacatccacaactgatgaagctgcccatctgttctccagcaatgagaccatttggacttctaggccagaccaggccctgctggcatctatgaacacaaccaccatactcacatttgtgcctaatgaaaattttacatcagcatttcatgagaatactacttatacagaatatttatccgcaactaccaatatcaccccactgaaagcatctccagagggcaaaggtaccactgccaatgatgctactacagccagatatacaacagctgtatccaaattgacatcaccatggtttgctaatttctccatagtttctggaaccacatccataaccaatatgcctgaatttaaacttaccactttactactaaaaacaatacctatgtctacaaaacctgcaaatgaacttcctttgacaccaagggagactgttgttccatcagtagatataatatctactcttgcttgcattcaaccaaatttttctactgaggaaagtgcttctgagaccacacaaacagaaataaatggtgcaattgtatttggaggtacaacgacccctgtaccaaagtcagcaacaacacaaagattaaatgccactgtgacaagaaaagaagcaacttcccattatcttatgagaaaatcaactatagcagcagtggctgaggtttctccattttcaacaatgctggaagtgacagacgaatcagcacaaagggtgacagcttctgtcactgtttcctcttttcctgatatagaaaagctaagtaccccattggataataaaactgcaacaactgaggtgagagaaagttggcttttgacaaaattggtgaaaaccacacctaggagttcatacaatgaaatgacagaaatgtttaattttaaccacacctatgtagcacattggacttcagagacatctgagggaatttcagctggatctcccacttctgggagcacacatatattcggtgaacccctgggtgcttctaccacaaggatatcagaaaccagtttctccactacccctacagacaggacagctacgtccttgtctgatggtatcttacctccacagcctacagctgctcattcctcagcaacccctgtgcctgttactcatatgttctcattgccagttaatggcagttctgtggtggctgaggagactgaggttaccatgtctgagccttctacactggccagggctttttctacatctgtgctctcagatgtctcaaatctatcctcaactacaatgaccacagcattggtaccacctttggatcagactgcttccacaaccattgttattgtgcctacccatggagacttgattcgtaccacttcagaggccacggtaatctctgtcaggaagacatccatggcagttccttctctgacagaaacaccatttcattcactgagactctccactcctgtgacagctaaggctgagaccacccttttctctacctcagttgatacagtaaccccatctacacacactcttgtctgctcaaaacctccccctgacaacattcctcctgcgtcctccactcatgtgatctcaactacgtctacaccagaagcaactcaaccaatatctcaagtagaggagacttctacctatgctctcagcttcccatatactttcagtggtggtggagttgttgccagcttggctactggcaccacagagacctctgttgttgatgagaccacaccctcacacatctctgccaataagttgactacttcagtaaacagtcacatttcttcatctgccacatatcgtgtacacacaccagtgtccatccagttggtgactagcacctctgtcttatcttccgacaaagaccagatgaccatatccctgggaaaaacccctagaactatggaggtgacagaaatgtccccatcaaagaattcttttatttcatactcccggggtactccatctttggaaatgacagatacaggatttcctgagaccacaaaaatttccagtcaccaaacacattcgccttcagagattccacttgggactccctctgatggaaatttggcttcatctcccacttctggaagcacacagattacaccaaccttgacctcaagtaacacagtaggtgttcacattccagaaatgtctaccagtcttgggaaaacagctctcccctcacaagctctgacaatcaccacttttttgtgtcctgaaaaggaaagcacgagtgcccttccagcatatactcccaggactgtggaaatgatagtaaactccacctatgtgactcactctgtctcatatggccaggatacttcatttgtagataccacaacttccagctcaacaaggatatcaaatcctatggacatcaatacaactttttcacacttgcattcacttaggacacaacctgaggtgacttcagttgcctctttcatttctgaaagcacacagactttccctgagtccttgtctctttccacagctggactatataatgacggttttacagttctctccgacaggatcactacagccttttctgttccaaatgtacctacaatgcttcctagagaatcctctatggcaacgtccactcctatttaccagatgtcctcattgccagttaatgtaactgccttcacctccaaaaaagtttctgacactcccccaatagtgataactaaatcttctaaaacaatgcatccaggttgtttgaaaagtccctgtacagccacttctgggcctatgtctgagatgtcctcaataccagttaataactctgctttcacacctgcaacagtctcttctgacacttccacaagagttgggttattctctactttattgtcttcagttacccccaggactactatgaccatgcaaacatctacattggatgtcacacctgtgatatatgctggggctacttcaaaaaacaaaatggtttcctctgctttcactacagaaatgatagaggcaccttccaggatcacacctacgacctttctctctccaacagagccaactttgccctttgtaaaaaccgttcccaccaccattatggctgggatagtgactccatttgtaggcaccactgccttctctccactcagttctaagagcactggagctatttcctccattccaaagaccacattttcaccatttctatcagcaactcaacagtcatcacaagcagatgaggctacaactttgggcatattatctgggattactaacaggtccctatctactgtgaacagtggtacaggggtagctctcacagatacttattccagaatcactgttcctgaaaatatgctttcacctactcatgcagatagtctccatacttccttcaatattcaggtttccccatctctgactagctttaagagtgcttctggacccacaaaaaatgttaaaacaaccaccaattgcttttcttctaatactagaaagatgacttccttgttagaaaagacttccttaacaaactatgccacatctttgaatacccctgtttcataccctccatggaccccatccagtgcaactctaccctctttgacatcatttgtttattcacctcatagtactgaagctgagatctctactccaaagacctctcctcctcccacatcccaaatggttgaatttccagttctgggaacaagaatgacatctagtaatacccaacctctgcttatgacttcctggaacatacccacagctgaaggttctcagtttccaatttccaccactattaatgtacctacatccaatgagatggaaacagagactctacaccttgttcctgggcctttgtcaacattcacagcctctcagactggtctagtatctaaagatgtcatggcaatgtcatcaattcctatgtcaggaattcttcctaaccatgggctttctgagaacccttcattatcaacatctttaagagctatcacttccacattggctgacgttaagcacacatttgagaaaatgaccacatctgtaactcctgggaccacactcccatcaattctttctggtgccacttcaggatctgtaatttcaaagtcacccattctgacatggctcttatctagtctcccttctggctcccctccggcaactgtatctaatgcccctcatgttatgacttcctctacagtagaggtgtcaaaatcaacatttctgacatctgacatgatatcagcgcacccattcactaacttgacaacactaccctctgctactatgagcaccatactcacccgaaccattcctacacctacactgggtggtatcactactggcttcccaacttctctccctatgtctataaatgtcacagatgacattgtgtacatttccacacaccctgaggcatcctccagaaccacaataactgccaaccccaggactgtgtctcatccttcatccttcagcagaaagactatgtcaccttctacaactgaccacactctatctgttggtgccatgcctctgcctagctctacaataacatcttcatggaacagaattccaactgcatcatcaccctctactttaattattcctaagcccacactggactcccttctaaatataatgactactacatccactgttcctggagcctcatttccactcatatccactggggtgacatatccttttacagcaactgtgtcttcaccaatatcgtccttttttgaaacaacttggctggactccacaccttcctttctatctacggaagcatcgacttcgcctactgccaccaagtccacagtttccttctacaatgttgaaatgagcttctctgtctttgttgaagagccaaggatccctattaccagtgttataaatgaatttacggaaaattcgttgaattctatatttcagaacagtgaattttctcttgctactctggaaacccaaattaaaagcagggacatttcagaggaagagatggtcatggatcgagctattttggaacagagagaaggacaagaaatggctacaatttcctatgtaccatacagttgtgtttgtcaggtcatcataaaagccagctcttccttagcatcctctgaattgatgagaaaaatcaaaagtaaaatacatggcaacttcacacatggaaacttcacacaagatcaattgacgttattagtaaactgtgaacacgttgcagtgaaaaaactagagcctggaaattgcaaagctgatgaaacagcctctaaatacaaagggacctataagtggctattaaccaaccctacggagacagcccaaaccagatgcataaaaaatgaggatggaaatgccacaagattctgttcaatcagcatcaacacgggcaaatctcagtgggaaaagccaaagtttaaacaatgcaaattgcttcaagaacttcctgacaagattgtggatcttgctaatattaccataagtgatgagaatgctgaggatgttgcagagcatattttaaatttgataaatgaatccccagccctgggtaaagaagagacaaagattattgtttctaaaatatcagatatttcacaatgtgatgagataagtatgaacctaactcatgttatgttacaaataatcaacgttgttttggaaaagcaaaacaattccgcctctgatctgcatgaaataagcaatgaaattctgaggataattgagcgtactggtcacaagatggagttttctgggcagatagcaaatctgacggtggccgggctggctttggctgtgctgcggggggaccacacgtttgatggcatggctttcagcattcactcctatgaagaaggcacagaccctgagattttcctaggcaatgtccctgtgggagggattttggcttccatatatttgcctaaatcactgacggagagaattcctcttagcaacttacaaacgatcttgtttaatttctttggccaaacttcactctttaagaccaaaaatgtcactaaagcattaaccacctatgttgtgagtgccagcatttcagatgatatgttcattcaaaacttagctgacccagtggttatcactctgcagcatattggaggaaaccagaattatggtcaagttcactgtgccttttgggattttgagaataataatgggctgggtggatggaattcgtcaggctgtaaagtaaaggaaacaaatgtaaattacacaatctgtcagtgtgaccacctcacccattttggagtcttaatggatttatccaggtctacagtggattcagtgaatgaacagatattagcgcttataacatacaccggatgtggaatctcctccatttttctgggagttgcagtggtgacatacatagcttttcacaaacttcgaaaagattatcctgccaaaattctgatcaacctgtgcacagcactactgatgctaaacctggtatttttgatcaattcttggttgtcatcatttcagaaagtgggagtttgtatcacagctgcagtggcacttcattacttcctgcttgtttcttttacttggatgggcctggaggcagtccacatgtatttggctctagtcaaagtcttcaacatatacattccaaattatatccttaaattttgtctagttggttggggaatcccggctatcatggtggcaatcacagtcagtgtgaaaaaagatctgtatggaactctgagcccaacaactccgttttgttggattaaagatgattctatcttttacatctcagtggtggcttatttttgcctcatatttctcatgaatctctccatgttctgcactgttcttgttcaactgaattctgtgaaatcccaaatccagaagactcggcggaagatgatcctgcatgacctcaaaggcacaatgagcctgacattcttacttggcctcacctgggggtttgcattttttgcttggggacccatgaggaactttttcttgtatttgtttgccatttttaacactttgcaaggattcttcatttttgtgtttcactgtgtgatgaaggagagtgtgcgggagcagtggcagatacacctctgctgtgggtggttgcgattggataactcttctgatgggagcagccggtgtcagataaaggttggatataaacaggagggactaaagaaaatctttgagcacaaactgttgacgccatctctcaagtcaactgcaactagctccactttcaaatctttaggctctgcacaaggcacaccttcagaaataagctttccaaatgatgactttgacaaagatccttactgttcctctccttgatttgtgaagttgtgcctaattatgtaaaaagaatataatacctgtggaaataaaaatgaattccaagtgtatacttgctcgggtgatgggtgcaccaaaatctcacaaatcaccactaaataatgtactcatgtaaccaaatgctacctgttccaccaaaacctatggaaatttaaaaaaaacaaaaataaaaagcaaaacaaaaatcccaaaatgaattccattcacaaacagaatttttcaataaatcccagtagagatacttgcctcctcccaacccctgattggggaaaaggttgaatttgtgaaacaatctgctccaaccttctattttaattattattttgtaaggggaagaataacatttgataaatattaaagtcagaataattctcct

SEQ ID NO: 13557 - DNA, 2709 bp, Homo sapiens
atgaggattatttccagacagattgtcttgttattttctggattttggggactcgccatgggagcctttccgagcagcgtgcaaataggtggtctcttcatccgaaacacagatcaggaatacactgcttttcgattagcaatttttcttcataacaccgcccccaatgcgtcggaagctccttttaatttggtacctcatgtggacaacattgagacagccaacagttttgctgtaacaaacgccttctgttcccagtattctagaggagtatttgccatttttggactctatgataagaggtcggtacataccttgacctcattctgcagcgccttacatatctccctcatcacaccaagtttccctactgagggggagagccagtttgtgctgcaactaagaccttcgttacgaggagcactcttgagtttgctggatcactacgaatggaactgttttgtcttcctgtatgacacagacaggggatactcgatactccaagctattatggaaaaagcaggacaaaatggttggcatgtcagcgctatatgtgtggaaaattttaatgatgtcagctataggcaacttctagaagaacttgacagaagacaagagaagaagtttgtaatagactgtgagatagagagacttcaaaacatattagaacagattgtaagtgttggaaagcatgttaaaggctaccattatatcattgcaaacttgggattcaaggatatttctcttgagaggtttatacatggtggagccaatgttactggattccagttggtggattttaatacacccatggtaaccaaactaatggatcgctggaagaaactagatcagagagagtatccaggatctgagactcctccaaagtacacctctgctctgacttatgatggagtccttgtgatggctgaaactttccgaagtcttaggaggcagaaaattgatatctcaaggagaggaaagtctggggattgtctggcaaatcctgctgctccatggggccagggaattgacatggagaggacactcaaacaggttcgaattcaagggctgacagggaatgttcagtttgaccactatggacgtagagtcaattacacaatggatgtgtttgagctgaaaagcacaggacctagaaaggttggttactggaatgatatggataagttagtcttgattcaagatgtaccaactcttggcaatgacacagctgctattgagaacagaacagtggttgtaaccacaattatggaatccccatatgttatgtacaagaaaaatcatgaaatgtttgaaggaaatgacaagtatgaaggatactgtgtagatttggcatctgaaattgcaaaacatattggtatcaagtataaaattgccattgtccctgatggaaaatatggagcaagggatgcagacacaaaaatctggaatgggatggtaggagaacttgtttatgggaaagcagagattgctattgcccctctgacaatcactttggtacgagaggaggtcattgacttttctaagcccttcatgagtttgggcatatctatcatgatcaaaaagcctcagaaatccaaaccaggagtgttttccttcttggatcctctggcctatgagatttggatgtgcatagtctttgcctacattggtgtcagcgtggtcttattcctagttagtagatttagtccatatgagtggcacacagaagagccagaggacggaaaggaaggacccagcgaccagcctcccaatgagtttggcatctttaacagcctctggttttccctgggtgcttttatgcagcaaggatgtgacatttcacccagatccctctcaggtcgaattgttggaggtgtttggtggttctttacactcatcattatatcatcttatactgctaacctggctgctttcctgacggttgagcgaatggtctctcccatagaaagtgcagaagacctggccaaacaaacagaaattgcctatggaacactggattcaggatcaacaaaagaattcttcagaagatcaaaaatagcagtgtatgaaaagatgtggacctacatgcgatcagcagagccatcagtattcactaggactacagctgagggagtagctcgtgtccgcaaatccaagggcaaatttgcctttctcctggagtccactatgaatgataacattgagcagcgaaagccatgtgacacgatgaaagtgggaggaaatctggattccaaaggctatggagtagcaacgcccaagggttcctcattaagaactcctgtaaaccttgccgttttgaaactcagtgaggcaggcgtcttagacaagctgaaaaacaaatggtggtacgataaaggtgaatgtggacccaaagactctggaagcaaggacaagacgagtgccttgagcctgagcaatgtagcaggcgtcttctacattctggttggcggcttgggcttggcaatgctggtggctttgatagagttctgttacaagtccagggcagaagcgaagagaatgaagctgaccttttctgaagccataagaaacaaagccagattatccatcactgggagtgtgggagagaatggccgcgtcttgacgcctgactgcccaaaggctgtacacactggaactgcaatcagacaaagttcaggattggctgtcattgcatcggacctaccataa

SEQ ID NO: 13558 - DNA, 4131 bp, Homo sapiens
atcccgcccgcatacagcccgcatcccgccggggaagcgagcccagtccagcgctgcccgtccagtcctcgcccaagatttaaagcccgcaagttttgttcttgagaccagcgactttagctccgatgcgggaaggaaagccgacctccgatttggacatttaaagagctgggcttgaacttcgtgagtttcgctctaaactgcccttgaaatgaagctggacttggaggtggcatggaatattcacatgggagagccgcatgaggccgcccaccacgcttcctgaaggatgcccgtgtggaagaattttgacgtgccagtgtcctcgttctacagggtgttccattcttccgcaatctcagaaaaatgggactaaaagaaactattttgtaaaataagaagacttccatttttaatgaccaacatgtattaagatggacacctactctacgaaacacgaagttctatggtctcgaagaagcccgtgcctgtttaaaactgatcctaactaaaaacagacttgagtggatatgagaatgttggttagtggcagaagagtcaaaaaatggcagttaattattcagttatttgctacttgttttttagcgagcctcatgtttttttgggaaccaatcgataatcacattgtgagccatatgaagtcatattcttacagatacctcataaatagctatgactttgtgaatgataccctgtctcttaagcacacctcagcggggcctcgctaccaatacttgattaaccacaaggaaaagtgtcaagctcaagacgtcctccttttactgtttgtaaaaactgctcctgaaaactatgatcgacgttccggaattagaaggacgtggggcaatgaaaattatgttcggtctcagctgaatgccaacatcaaaactctgtttgccttaggaactcctaatccactggagggagaagaactacaaagaaaactggcttgggaagatcaaaggtacaatgatataattcagcaagactttgttgattctttctacaatcttactctgaaattacttatgcagttcagttgggcaaatacctattgtccacatgccaaatttcttatgactgctgatgatgacatatttattcacatgccaaatctgattgagtaccttcaaagtttagaacaaattggtgttcaagacttttggattggtcgtgttcatcgtggtgcccctcccattagagataaaagcagcaaatactacgtgtcctatgaaatgtaccagtggccagcttaccctgactacacagccggagctgcctatgtaatctccggtgatgtagctgccaaagtctatgaggcatcacagacactaaattcaagtctttacatagacgatgtgttcatgggcctctgtgccaataaaatagggatagtaccgcaggaccatgtgtttttttctggagagggtaaaactccttatcatccctgcatctatgaaaaaatgatgacatctcatggacacttagaagatctccaggacctttggaagaatgctacagatcctaaagtaaaaaccatttccaaaggtttttttggtcaaatatactgcagattaatgaagataattctcctttgtaaaattagctatgtggacacatacccttgtagggctgcgtttatctaatagtacttgaatgttgtatgttttcactgtcactgagtcaaacctggatgaaaaaaacctttaaatgttcgtctataccctaagtaaaatgaggacgaaagacaaatattttgaaagcctagtccatcagaatgtttctttgattctagaagctgtttaatatcacttatctacttcattgcctaagttcatttcaaagaatttgtatttagaaaaggtttatattattagtgaaaacaaaactaaagggaagttcaagttctcatgtaatgccacatatatacttgaggtgtagagatgttattaagaagttttgatgttagaataattgcttttggaaaataccaaatgaacgtacagtacaacatttcaaggaaatgaatatattgttagaccaggtaagcaagtttatttttgttaaagagcacttggtggaggtagtaggggcagggaaaggtcagcataggagagaaagttcatgaatctggtaaaacagtctcttgttcttaagaggagatgtagaaaaatgtgtacaatgttattataaacagacaaatcacgtcttaccacatccatgtagctactggtgttagagtcattaaaatacctttttttgcatcttttttcaaagtttaatgtgaacttttagaaaagtgattaatgttgccctaatactttatatgtttttaatggatttttttttaagtattagaaaatgacacataacacgggcagctggttgctcatagggtccttctctagggagaaaccattgttaattcaaataagctgattttaatgacgttttcaactggtttttaaatattcaatattggtctgtgtttaagtttgttatttgaatgtaatttacatagaggaatataataatggagagacttcaaatggaaagacagaacattacaagcctaatgtctccataattttataaaatgaaatcttagtgtctaaatccttgtactgattactaaaattaacccactcctccccaacaaggtcttataaaccacagcactttgttccaagttcagagttttaaattgagagcattaaacatcaaagttataatatctaaaacaatttatttttcatcaataactgtcagaggtgatctttattttctaaatatttcaaacttgaaaacagagtaaaaaagtgatagaaaagttgccagtttggggttaaagcatttttaaagctgcatgttccttgtaatcaaagagatgtgtctgagatctaatagagtaagttacatttattttacaaagcaggataaaaatgtggctataatacacactacctcccttcactacagaaagaactaggtggtgtctactgctagggagattatatgaaggccaaaataatgacttcagcaagagtgactgaactcactctaaggcctttgactgcagaggcacctgttagggaaaatcagatgtctcatataataaggtgatgtcggaaacacgcaaaacaaaacgaaaaaagatttctcagtatacacaactgaatgatgatacttacaatttttagcaggtagctttttaatgtttacagaaattttaatttttttctattttgaaatttgaggcttgtttacattgcttagataatttagaatttttaactaatgtcaaaactacagtgtcaaacattctaggttgtagttactttcagagtagatacagggttttagatcattacagtttaagttttctgaccaattaaaaaaacatagagaacaaaagcatatttgaccaagcaacaagcttataattaatttttattagttgattgattaatgatgtattgccttttgcccatatataccctgtgtatctatacttggaagtgtttaaggttgccattggttgaaaacataagtgtctctggccatcaaagtgatcttgtttacagcagtgcttttgtgaaacaattatttatttgctgaaagagctcttctgaactgtgtccttttaatttttgcttagaatagaatggaacaagtttaaatttcaaggaaatatgaaggcacttcctttttttctaagaaggaagttgctagatgattccttcatcacacttacttaaagtactgagaagagtatctgtaaataaaagggttccaaccttttaaaaaagaaggaaaaaactttttggtgctccagtgtagggctatctttttaaaaaatgtcaacaaagggaaaataaactatcagcttggatggtcacttgaatagaagatggttatacacagtgttattgttaaaatttttttaccttttggttggtttgcatcttttttccatattgttaattttataccaaaatgttaaatatttgtattacttgaattttgctcttgtatggcaaaataattagtgagtttaaaaaaaatctatagtttccaataaacaactgaaaaattatcatgaaaaaaaaa

SEQ ID NO: 13559 - DNA, 9146 bp, Homo sapiens
ctggtggtccagtacctccaaagatatggaatacactcctgaaatatcctgaaaacttttttttttcagaatcctttaataagcagttatgtcaatctgaaagttgcttacttgtactttatattaatagctattcttgtttttcttatccaaagaaaaatcctctaatccccttttcacatgatagttgttaccatgtttaggcattagtcacatcaacccctctcctctcccaaacttctcttcttcaaatcaaactttattagtccctcctttataatgattccttgcctcgttttatccagatcaattttttttcactttgatgcccagagctgaagaaatggactactgtataaattattcattgccaagagaataattgcattttaaacccatattataacaaagaataatgattatattttgtgatttgtaacaaataccctttattttcccttaactattgaattaaatattttaattatttgtattctctttaactatcttggtatattaaagtattatcttttatatatttatcaatggtggacacttttataggtactctgtgtcatttttgatactgtaggtatcttatttcatttatctttattcttaatgtacgaattcataatatttgattcagaacaaatttatcactaattaacagagtgtcaattatgctaacatctcatttactgattttaatttaaaacagtttttgttaacatgcatgtttagggttggcttcttaataatttcttcttcctcttctctctctcctcttcttttggtcagtgttgtgcgggttaatacaacaaactgtaacaagtgtacctggtatggacttgttgtccgggacgtacattttcgcggtcctgctagcatgcgtggtgttccactctggcgcccaggagaaaaactacaccatccgagaagaaatgccagaaaacgtcctgataggcgacttgttgaaagaccttaacttgtcgctgattccaaacaagtccttgacaactgctatgcagttcaagctagtgtacaagaccggagatgtgccactgattcgaattgaagaggatactggtgagatcttcactactggcgctcgcattgatcgtgagaaattatgtgctggtatcccaagggatgagcattgcttttatgaagtggaggttgccattttgccggatgaaatatttagactggttaagatacgttttctgatagaagatataaatgataatgcaccattgttcccagcaacagttatcaacatatcaattccagagaactcggctataaactctaaatatactctcccagcggctgttgatcctgacgtaggaataaacggagttcaaaactacgaactaattaagagtcaaaacatttttggcctcgatgtcattgaaacaccagaaggagacaagatgccacaactgattgttcaaaaggagttagatagggaagagaaggatacctacgtgatgaaagtaaaggttgaagatggtggctttcctcaaagatccagtactgctattttgcaagtgagtgttactgatacaaatgacaaccacccagtctttaaggagacagagattgaagtcagtataccagaaaatgctcctgtaggcacttcagtgacacagctccatgccacagatgctgacataggtgaaaatgccaagatccacttctctttcagcaatctagtctccaacattgccaggagattatttcacctcaatgccaccactggacttatcacaatcaaagaaccactggatagggaagaaacaccaaaccacaagttactggttttggcaagtgatggtggattgatgccagcaagagcaatggtgctggtaaatgttacagatgtcaatgataatgtcccatccattgacataagatacatcgtcaatcctgtcaatgacacagttgttctttcagaaaatattccactcaacaccaaaattgctctcataactgtgacggataaggatgcggaccataatggcagggtgacatgcttcacagatcatgaaatccctttcagattaaggccagtattcagtaatcagttcctcctggagactgcagcatatcttgactatgagtccacaaaagaatatgccattaaattactggctgcagatgctggcaaacctcctttgaatcagtcagcaatgctcttcatcaaagtgaaagatgaaaatgacaatgctccagttttcacccagtctttcgtaactgtttctattcctgagaataactctcctggcatccagttgacgaaagtaagtgcaatggatgcagacagtgggcctaatgctaagatcaattacctgctaggccctgatgctccacctgaattcagcctggattgtcgtacaggcatgctgactgtagtgaagaaactagatagagaaaaagaggataaatatttattcacaattctggcaaaagataacggggtaccacccttaaccagcaatgtcacagtctttgtaagcattattgatcagaatgacaatagcccagttttcactcacaatgaatacaacttctatgtcccagaaaaccttccaaggcatggtacagtaggactaatcactgtaactgatcctgattatggagacaattctgcagttacgctctccattttagatgagaatgatgacttcaccattgattcacaaactggtgtcatccgaccaaatatttcatttgatagagaaaaacaagaatcttacactttctatgtaaaggctgaggatggtggtagagtatcacgttcttcaagtgccaaagtaaccataaatgtggttgatgtcaatgacaacaaaccagttttcattgtccctccttccaactgttcttatgaattggttctaccgtccactaatccaggcacagtggtctttcaggtaattgctgttgacaatgacactggcatgaatgcagaggttcgttacagcattgtaggaggaaacacaagagatctgtttgcaatcgaccaagaaacaggcaacataacattgatggagaaatgtgatgttacagaccttggtttacacagagtgttggtcaaagctaatgacttaggacagcctgattctctcttcagtgttgtaattgtcaatctgttcgtgaatgagtcggtgaccaatgctacactgattaatgaactggtgcgcaaaagcactgaagcaccagtgaccccaaatactgagatagctgatgtatcctcaccaactagtgactatgtcaagatcctggttgcagctgttgctggcaccataactgtcgttgtagttattttcatcactgctgtagtaagatgtcgccaggcaccacaccttaaggctgctcagaaaaacaagcagaattctgaatgggctaccccaaacccagaaaacaggcagatgataatgatgaagaaaaagaaaaagaagaagaagcattcccctaagaacttgctgcttaattttgtcactattgaagaaactaaggcagatgatgttgacagtgatggaaacagagtcacactagaccttcctattgatctagaagagcaaacaatgggaaagtacaattgggtaactacacctactactttcaagcccgacagccctgatttggcccgacactacaaatctgcctctccacagcctgccttccaaattcagcctgaaactcccctgaattcgaagcaccacatcatccaagaactgcctctcgataacacctttgtggcctgtgactctatctccaagtgttcctcaagcagttcagatccctacagcgtttctgactgtggctatccagtgacgaccttcgaggtacctgtgtccgtacacaccagaccgccaatgaaggaggttgtgcgatcttgcacccccatgaaagagtctacaactatggagatctggattcatccccaaccacagtcccagcggcgtgtcacatttcacctgccagaaggctctcaggaaagcagcagtgatggtggactgggagaccatgatgcaggcagccttaccagcacatctcatggcctgccccttggctatcctcaggaggagtactttgatcgtgctacacccagcaatcgcactgaaggggatggcaactccgatcctgaatctactttcatacctggactaaagaaagctgcagaaataactgttcaaccaactgtggaagaggcctctgacaactgcactcaagaatgtctcatctatggccattctgatgcctgctggatgccggcatctctggatcattccagctcttcgcaagcacaggcctctgctctatgccacagcccaccactgtcacaggcctctactcagcaccacagcccacgagtgacacagaccattgctctctgccacagccctccagtgacacagaccatcgcattgtgccacagcccaccaccgatacaggtgtctgctctccaccacagtcctcctctagtgcaggctactgcacttcaccacagcccaccatcagcacaggcctcagccctctgctacagccctcctttagcacaggctgctgcaatcagccacagctctcctctgccacaggttattgccctccatcgtagtcaggcccaatcatcagtcagtttgcagcaaggttgggtgcaaggtgctgatgggctatgctctgttgatcagggagtgcaaggtagtgcaacatctcagttttacaccatgtctgaaagacttcatcccagtgatgattcaattaaagtcattcctttgacaaccttcactccacgccaacaggccagaccgtccagaggtgattcccccattatggaagaacatcccttgtaaagctaaaatagttacttcaaattttcagaaaagatgtatatagtcaaaatttaagatacaattccaatgagtattctgattatcagatttgtaaataactatgtaaatagaaacagataccagaataaatctacagctagacccttagtcaatagttaaccaaaaaattgcaatttgtttaattcagaatgtgtatttaaaaagaaaaggaatttaacaatttgcatccccttgtacagtaaggcttatcatgacagagcgcactatttctgatgtacagtattttttgttgtttttatcatcatgtgcaatattactgatttgtttccatgctgattgtgtggaaccagtatgtagcaaatggaaagcctagaaatatcttattttctaagtttacctttagtttacctaaacttttgttcagataacgttaaaaggtatacgtactctagcctttttttgggctttctttttgatttttgtttgttgttttcagtttttttgttgttgttagtgagtctcccttcaaaatacgcagtaggtagtgtaaatactgcttgtttgtgtctctctgctgtcatgttttctaccttattccaatactatattgttgataaaatttgtatatacattttcaataaagaatatgtataaactgtacagatctagatctacaacctatttctctactctttagtagagttcgagacacagaagtgcaataactgccctaattaagcaactatttgttaaaaagggcctctttttactttaatagtttagtgtaaagtacatcagaaataaagctgtatctgccattttaagcctgtagtccattattacttgggtctttacttctgggaatttgtatgtaacagcctagaaaattaaaaggaggtggatgcatccaaagcacgagtcacttaaaatatcgacggtaaactactattttgtagagaaactcaggaagatttaaatgttgatttgacagctcaataggctgttaccaaagggtgttcagtaaaaataacaaatacatgtaactgtagataaaaccatatactaaatctataagactaagggatttttgttattctagctcaacttactgaagaaaaccactaataacaacaagaatatcaggaaggaacttttcaagaaatgtaattataaatctacatcaaacagaattttaaggaaaaatgcagagggagaaataaggcacatgactgcttcttgcagtcaacaagaaataccaataacacacacagaacaaaaaccatcaaaatctcatatatgaaataaaatatattcttctaagcaaagaaacagtactattcatagaaaacattagttttcttctgttgtctgttatttccttcttgtatcctcttaactggccattatcttgtatgtgcacattttataaatgtacagaaacatcaccaacttaattttcttccatagcaaaactgagaaaataccttgtttcagtataacactaaaccaagagacaattgatgtttaatgggggcggttggggtgggggggggagtcaatatctcctattgattaacttagacatagattttgtaatgtataacttgatatttaatttatgattaaactgtgtgtaaattttgtaacataaactgtggtaattgcataatttcattggtgaggatttccactgaatattgagaaagtttcttttcatgtgcccagcaggttaagtagcgttttcagaatatacattattcccatccattgtaaagttccttaagtcatatttgactgggcgtgcagaataacttcttaacttttaactatcagagtttgattaataaaattaattaatgttttttctccttcgtgttgttaatgttccaagggatttggagcatactggttttccaggtgcatgtgaatcccgaaggactgatgatatttgaatgtttattaaattattatcatacaaatgtgttgatattgtggctattgttgatgttgaaaattttaaacttggggaagattaagaaaagaaccaatagtgacaaaaatcagtgcttccagtagattttagaacattctttgcctcaaaaaacctgcaaagatgatgtgagattttttcttgtgttttaattattttcacattttctctctgcaaaactttagttttctgatgatctacacacacacacacacacacacgtgcacacacacacacatttaaatgatataaaaagaagaggttgaaagattattaaataacttatcaggcatctcaatggttactatctatgttagtgaaaatcaaataggactcaaagttggatatttgggatttttcttctgacagtataatttattgagttactagggaggttcttaaatcctcatatctggaaacttgtgacgttttgacacctttcctatagatgatataggaatgaaccaatacgcttttattaccctttctaactctgattttataatcagacttagattgtgtttagaatattaaatgactgggcaccctcttcttggtttttaccagagaggctttgaatggaagcaggctgagagtagccaaagaggcaaggggtattagcccagttattctcccctatgccttccttctctttctaagcgtccactaggtctggccttggaaacctgttacttctagggcttcagatctgatgatatctttttcatcacattacaagttatttctctgactgaatagacagtggtataggttgacacagcacacaagtggctattgtgatgtatgatgtatgtagtcctacaactgcaaaacgtcttactgaaccaacaatcaaaaaatggttctgttttaaaaaggattttgtttgatttgaaattaaaacttcaagctgaatgacttatatgagaataatacgttcaatcaaagtagttattctattttgtgtccatattccattagattgtgattattaattttctagctatggtattactatatcacacttgtgagtatgtattcaaatactaagtatcttatatgctacgtgcatacacattcttttcttaaactttacctgtgttttaactaatattgtgtcagtgtattaaaaattagcttttacatatgatatctacaatgtaataaatttagagagtaattttgtgtattcttatttacttaacattttacttttaattatgtaaatttggttagaaaataataataaatggttagtgctattgtgtaatggtagcagttacaaagagcctctgccttcccaaactaatatttatcacacatggtcattaaatgggaaaaaaatagactaaacaaatcacaaattgttcagttcttaaaatgtaattatgtcacacacacaaaaaatccttttcaatcctgagaaaattaaaggcgttttactcacatggctatttcaacattagttttttttgtttgtttctttttcatggtattactgaaggtgtgtatactccctaatacacatttatgaaaatctacttgtttaggcttttatttatactcttctgatttatattttttattataattattatttcttatctttcttcttttatattttttggaaaccaaatttatagttagtttaggtaaactttttattatgaccattagaaactattttgaatgcttccaactggctcaattggccgggaaaacatgggagcaagagaagctgaaatatatttctgcaagaacctttctatattatgtgccaattaccacaccagatcaattttatgcagaggccttaaaatattctttcacagtagctttcttacactaaccgtcatgtgcttttagtaaatatgatttttaaaagcagttcaagttgacaacagcagaaacagtaacaaaaaaatctgctcagaaaaatgtatgtgcacaaataaaaaaaattaatggcaattgtttagtgattgtaagtgatactttttaaagagtaaactgtgtgaaatttatactatccctgcttaaaatattaagatttttatgaaatatgtatttatgtttgtattgtgggaagattcctcctctgtgatatcatacagcatctgaaagtgaacagtatcccaaagcagttccaaccatgctttggaagtaagaaggttgactattgtatggccaaggatggcagtatgtaatccagaagcaaacttgtattaattgttctatttcaggttctgtattgcatgttttcttattaatatatattaataaaagttatgagaaat

SEQ ID NO: 13560 - DNA, 9176 bp, Homo sapiens
ctggtggtccagtacctccaaagatatggaatacactcctgaaatatcctgaaaacttttttttttcagaatcctttaataagcagttatgtcaatctgaaagttgcttacttgtactttatattaatagctattcttgtttttcttatccaaagaaaaatcctctaatccccttttcacatgatagttgttaccatgtttaggcattagtcacatcaacccctctcctctcccaaacttctcttcttcaaatcaaactttattagtccctcctttataatgattccttgcctcgttttatccagatcaattttttttcactttgatgcccagagctgaagaaatggactactgtataaattattcattgccaagagaataattgcattttaaacccatattataacaaagaataatgattatattttgtgatttgtaacaaataccctttattttcccttaactattgaattaaatattttaattatttgtattctctttaactatcttggtatattaaagtattatcttttatatatttatcaatggtggacacttttataggtactctgtgtcatttttgatactgtaggtatcttatttcatttatctttattcttaatgtacgaattcataatatttgattcagaacaaatttatcactaattaacagagtgtcaattatgctaacatctcatttactgattttaatttaaaacagtttttgttaacatgcatgtttagggttggcttcttaataatttcttcttcctcttctctctctcctcttcttttggtcagtgttgtgcgggttaatacaacaaactgtaacaagtgtacctggtatggacttgttgtccgggacgtacattttcgcggtcctgctagcatgcgtggtgttccactctggcgcccaggagaaaaactacaccatccgagaagaaatgccagaaaacgtcctgataggcgacttgttgaaagaccttaacttgtcgctgattccaaacaagtccttgacaactgctatgcagttcaagctagtgtacaagaccggagatgtgccactgattcgaattgaagaggatactggtgagatcttcactactggcgctcgcattgatcgtgagaaattatgtgctggtatcccaagggatgagcattgcttttatgaagtggaggttgccattttgccggatgaaatatttagactggttaagatacgttttctgatagaagatataaatgataatgcaccattgttcccagcaacagttatcaacatatcaattccagagaactcggctataaactctaaatatactctcccagcggctgttgatcctgacgtaggaataaacggagttcaaaactacgaactaattaagagtcaaaacatttttggcctcgatgtcattgaaacaccagaaggagacaagatgccacaactgattgttcaaaaggagttagatagggaagagaaggatacctacgtgatgaaagtaaaggttgaagatggtggctttcctcaaagatccagtactgctattttgcaagtgagtgttactgatacaaatgacaaccacccagtctttaaggagacagagattgaagtcagtataccagaaaatgctcctgtaggcacttcagtgacacagctccatgccacagatgctgacataggtgaaaatgccaagatccacttctctttcagcaatctagtctccaacattgccaggagattatttcacctcaatgccaccactggacttatcacaatcaaagaaccactggatagggaagaaacaccaaaccacaagttactggttttggcaagtgatggtggattgatgccagcaagagcaatggtgctggtaaatgttacagatgtcaatgataatgtcccatccattgacataagatacatcgtcaatcctgtcaatgacacagttgttctttcagaaaatattccactcaacaccaaaattgctctcataactgtgacggataaggatgcggaccataatggcagggtgacatgcttcacagatcatgaaatccctttcagattaaggccagtattcagtaatcagttcctcctggagactgcagcatatcttgactatgagtccacaaaagaatatgccattaaattactggctgcagatgctggcaaacctcctttgaatcagtcagcaatgctcttcatcaaagtgaaagatgaaaatgacaatgctccagttttcacccagtctttcgtaactgtttctattcctgagaataactctcctggcatccagttgacgaaagtaagtgcaatggatgcagacagtgggcctaatgctaagatcaattacctgctaggccctgatgctccacctgaattcagcctggattgtcgtacaggcatgctgactgtagtgaagaaactagatagagaaaaagaggataaatatttattcacaattctggcaaaagataacggggtaccacccttaaccagcaatgtcacagtctttgtaagcattattgatcagaatgacaatagcccagttttcactcacaatgaatacaacttctatgtcccagaaaaccttccaaggcatggtacagtaggactaatcactgtaactgatcctgattatggagacaattctgcagttacgctctccattttagatgagaatgatgacttcaccattgattcacaaactggtgtcatccgaccaaatatttcatttgatagagaaaaacaagaatcttacactttctatgtaaaggctgaggatggtggtagagtatcacgttcttcaagtgccaaagtaaccataaatgtggttgatgtcaatgacaacaaaccagttttcattgtccctccttccaactgttcttatgaattggttctaccgtccactaatccaggcacagtggtctttcaggtaattgctgttgacaatgacactggcatgaatgcagaggttcgttacagcattgtaggaggaaacacaagagatctgtttgcaatcgaccaagaaacaggcaacataacattgatggagaaatgtgatgttacagaccttggtttacacagagtgttggtcaaagctaatgacttaggacagcctgattctctcttcagtgttgtaattgtcaatctgttcgtgaatgagtcggtgaccaatgctacactgattaatgaactggtgcgcaaaagcactgaagcaccagtgaccccaaatactgagatagctgatgtatcctcaccaactagtgactatgtcaagatcctggttgcagctgttgctggcaccataactgtcgttgtagttattttcatcactgctgtagtaagatgtcgccaggcaccacaccttaaggctgctcagaaaaacaagcagaattctgaatgggctaccccaaacccagaaaacaggcagatgataatgatgaagaaaaagaaaaagaagaagaagcattcccctaagaacttgctgcttaattttgtcactattgaagaaactaaggcagatgatgttgacagtgatggaaacagagtcacactagaccttcctattgatctagaagagcaaacaatgggaaagtacaattgggtaactacacctactactttcaagcccgacagccctgatttggcccgacactacaaatctgcctctccacagcctgccttccaaattcagcctgaaactcccctgaattcgaagcaccacatcatccaagaactgcctctcgataacacctttgtggcctgtgactctatctccaagtgttcctcaagcagttcagatccctacagcgtttctgactgtggctatccagtgacgaccttcgaggtacctgtgtccgtacacaccagaccgccaatgaaggaggttgtgcgatcttgcacccccatgaaagagtctacaactatggagatctggattcatccccaaccacagcggaaatctgaagggaaagtggcaggaaagtcccagcggcgtgtcacatttcacctgccagaaggctctcaggaaagcagcagtgatggtggactgggagaccatgatgcaggcagccttaccagcacatctcatggcctgccccttggctatcctcaggaggagtactttgatcgtgctacacccagcaatcgcactgaaggggatggcaactccgatcctgaatctactttcatacctggactaaagaaagctgcagaaataactgttcaaccaactgtggaagaggcctctgacaactgcactcaagaatgtctcatctatggccattctgatgcctgctggatgccggcatctctggatcattccagctcttcgcaagcacaggcctctgctctatgccacagcccaccactgtcacaggcctctactcagcaccacagcccacgagtgacacagaccattgctctctgccacagccctccagtgacacagaccatcgcattgtgccacagcccaccaccgatacaggtgtctgctctccaccacagtcctcctctagtgcaggctactgcacttcaccacagcccaccatcagcacaggcctcagccctctgctacagccctcctttagcacaggctgctgcaatcagccacagctctcctctgccacaggttattgccctccatcgtagtcaggcccaatcatcagtcagtttgcagcaaggttgggtgcaaggtgctgatgggctatgctctgttgatcagggagtgcaaggtagtgcaacatctcagttttacaccatgtctgaaagacttcatcccagtgatgattcaattaaagtcattcctttgacaaccttcactccacgccaacaggccagaccgtccagaggtgattcccccattatggaagaacatcccttgtaaagctaaaatagttacttcaaattttcagaaaagatgtatatagtcaaaatttaagatacaattccaatgagtattctgattatcagatttgtaaataactatgtaaatagaaacagataccagaataaatctacagctagacccttagtcaatagttaaccaaaaaattgcaatttgtttaattcagaatgtgtatttaaaaagaaaaggaatttaacaatttgcatccccttgtacagtaaggcttatcatgacagagcgcactatttctgatgtacagtattttttgttgtttttatcatcatgtgcaatattactgatttgtttccatgctgattgtgtggaaccagtatgtagcaaatggaaagcctagaaatatcttattttctaagtttacctttagtttacctaaacttttgttcagataacgttaaaaggtatacgtactctagcctttttttgggctttctttttgatttttgtttgttgttttcagtttttttgttgttgttagtgagtctcccttcaaaatacgcagtaggtagtgtaaatactgcttgtttgtgtctctctgctgtcatgttttctaccttattccaatactatattgttgataaaatttgtatatacattttcaataaagaatatgtataaactgtacagatctagatctacaacctatttctctactctttagtagagttcgagacacagaagtgcaataactgccctaattaagcaactatttgttaaaaagggcctctttttactttaatagtttagtgtaaagtacatcagaaataaagctgtatctgccattttaagcctgtagtccattattacttgggtctttacttctgggaatttgtatgtaacagcctagaaaattaaaaggaggtggatgcatccaaagcacgagtcacttaaaatatcgacggtaaactactattttgtagagaaactcaggaagatttaaatgttgatttgacagctcaataggctgttaccaaagggtgttcagtaaaaataacaaatacatgtaactgtagataaaaccatatactaaatctataagactaagggatttttgttattctagctcaacttactgaagaaaaccactaataacaacaagaatatcaggaaggaacttttcaagaaatgtaattataaatctacatcaaacagaattttaaggaaaaatgcagagggagaaataaggcacatgactgcttcttgcagtcaacaagaaataccaataacacacacagaacaaaaaccatcaaaatctcatatatgaaataaaatatattcttctaagcaaagaaacagtactattcatagaaaacattagttttcttctgttgtctgttatttccttcttgtatcctcttaactggccattatcttgtatgtgcacattttataaatgtacagaaacatcaccaacttaattttcttccatagcaaaactgagaaaataccttgtttcagtataacactaaaccaagagacaattgatgtttaatgggggcggttggggtgggggggggagtcaatatctcctattgattaacttagacatagattttgtaatgtataacttgatatttaatttatgattaaactgtgtgtaaattttgtaacataaactgtggtaattgcataatttcattggtgaggatttccactgaatattgagaaagtttcttttcatgtgcccagcaggttaagtagcgttttcagaatatacattattcccatccattgtaaagttccttaagtcatatttgactgggcgtgcagaataacttcttaacttttaactatcagagtttgattaataaaattaattaatgttttttctccttcgtgttgttaatgttccaagggatttggagcatactggttttccaggtgcatgtgaatcccgaaggactgatgatatttgaatgtttattaaattattatcatacaaatgtgttgatattgtggctattgttgatgttgaaaattttaaacttggggaagattaagaaaagaaccaatagtgacaaaaatcagtgcttccagtagattttagaacattctttgcctcaaaaaacctgcaaagatgatgtgagattttttcttgtgttttaattattttcacattttctctctgcaaaactttagttttctgatgatctacacacacacacacacacacacgtgcacacacacacacatttaaatgatataaaaagaagaggttgaaagattattaaataacttatcaggcatctcaatggttactatctatgttagtgaaaatcaaataggactcaaagttggatatttgggatttttcttctgacagtataatttattgagttactagggaggttcttaaatcctcatatctggaaacttgtgacgttttgacacctttcctatagatgatataggaatgaaccaatacgcttttattaccctttctaactctgattttataatcagacttagattgtgtttagaatattaaatgactgggcaccctcttcttggtttttaccagagaggctttgaatggaagcaggctgagagtagccaaagaggcaaggggtattagcccagttattctcccctatgccttccttctctttctaagcgtccactaggtctggccttggaaacctgttacttctagggcttcagatctgatgatatctttttcatcacattacaagttatttctctgactgaatagacagtggtataggttgacacagcacacaagtggctattgtgatgtatgatgtatgtagtcctacaactgcaaaacgtcttactgaaccaacaatcaaaaaatggttctgttttaaaaaggattttgtttgatttgaaattaaaacttcaagctgaatgacttatatgagaataatacgttcaatcaaagtagttattctattttgtgtccatattccattagattgtgattattaattttctagctatggtattactatatcacacttgtgagtatgtattcaaatactaagtatcttatatgctacgtgcatacacattcttttcttaaactttacctgtgttttaactaatattgtgtcagtgtattaaaaattagcttttacatatgatatctacaatgtaataaatttagagagtaattttgtgtattcttatttacttaacattttacttttaattatgtaaatttggttagaaaataataataaatggttagtgctattgtgtaatggtagcagttacaaagagcctctgccttcccaaactaatatttatcacacatggtcattaaatgggaaaaaaatagactaaacaaatcacaaattgttcagttcttaaaatgtaattatgtcacacacacaaaaaatccttttcaatcctgagaaaattaaaggcgttttactcacatggctatttcaacattagttttttttgtttgtttctttttcatggtattactgaaggtgtgtatactccctaatacacatttatgaaaatctacttgtttaggcttttatttatactcttctgatttatattttttattataattattatttcttatctttcttcttttatattttttggaaaccaaatttatagttagtttaggtaaactttttattatgaccattagaaactattttgaatgcttccaactggctcaattggccgggaaaacatgggagcaagagaagctgaaatatatttctgcaagaacctttctatattatgtgccaattaccacaccagatcaattttatgcagaggccttaaaatattctttcacagtagctttcttacactaaccgtcatgtgcttttagtaaatatgatttttaaaagcagttcaagttgacaacagcagaaacagtaacaaaaaaatctgctcagaaaaatgtatgtgcacaaataaaaaaaattaatggcaattgtttagtgattgtaagtgatactttttaaagagtaaactgtgtgaaatttatactatccctgcttaaaatattaagatttttatgaaatatgtatttatgtttgtattgtgggaagattcctcctctgtgatatcatacagcatctgaaagtgaacagtatcccaaagcagttccaaccatgctttggaagtaagaaggttgactattgtatggccaaggatggcagtatgtaatccagaagcaaacttgtattaattgttctatttcaggttctgtattgcatgttttcttattaatatatattaataaaagttatgagaaat

SEQ ID NO: 13561 - DNA, 4603 bp, Homo sapiens
ctggtggtccagtacctccaaagatatggaatacactcctgaaatatcctgaaaacttttttttttcagaatcctttaataagcagttatgtcaatctgaaagttgcttacttgtactttatattaatagctattcttgtttttcttatccaaagaaaaatcctctaatccccttttcacatgatagttgttaccatgtttaggcattagtcacatcaacccctctcctctcccaaacttctcttcttcaaatcaaactttattagtccctcctttataatgattccttgcctcgttttatccagatcaattttttttcactttgatgcccagagctgaagaaatggactactgtataaattattcattgccaagagaataattgcattttaaacccatattataacaaagaataatgattatattttgtgatttgtaacaaataccctttattttcccttaactattgaattaaatattttaattatttgtattctctttaactatcttggtatattaaagtattatcttttatatatttatcaatggtggacacttttataggtactctgtgtcatttttgatactgtaggtatcttatttcatttatctttattcttaatgtacgaattcataatatttgattcagaacaaatttatcactaattaacagagtgtcaattatgctaacatctcatttactgattttaatttaaaacagtttttgttaacatgcatgtttagggttggcttcttaataatttcttcttcctcttctctctctcctcttcttttggtcagtgttgtgcgggttaatacaacaaactgtaacaagtgtacctggtatggacttgttgtccgggacgtacattttcgcggtcctgctagcatgcgtggtgttccactctggcgcccaggagaaaaactacaccatccgagaagaaatgccagaaaacgtcctgataggcgacttgttgaaagaccttaacttgtcgctgattccaaacaagtccttgacaactgctatgcagttcaagctagtgtacaagaccggagatgtgccactgattcgaattgaagaggatactggtgagatcttcactactggcgctcgcattgatcgtgagaaattatgtgctggtatcccaagggatgagcattgcttttatgaagtggaggttgccattttgccggatgaaatatttagactggttaagatacgttttctgatagaagatataaatgataatgcaccattgttcccagcaacagttatcaacatatcaattccagagaactcggctataaactctaaatatactctcccagcggctgttgatcctgacgtaggaataaacggagttcaaaactacgaactaattaagagtcaaaacatttttggcctcgatgtcattgaaacaccagaaggagacaagatgccacaactgattgttcaaaaggagttagatagggaagagaaggatacctacgtgatgaaagtaaaggttgaagatggtggctttcctcaaagatccagtactgctattttgcaagtgagtgttactgatacaaatgacaaccacccagtctttaaggagacagagattgaagtcagtataccagaaaatgctcctgtaggcacttcagtgacacagctccatgccacagatgctgacataggtgaaaatgccaagatccacttctctttcagcaatctagtctccaacattgccaggagattatttcacctcaatgccaccactggacttatcacaatcaaagaaccactggatagggaagaaacaccaaaccacaagttactggttttggcaagtgatggtggattgatgccagcaagagcaatggtgctggtaaatgttacagatgtcaatgataatgtcccatccattgacataagatacatcgtcaatcctgtcaatgacacagttgttctttcagaaaatattccactcaacaccaaaattgctctcataactgtgacggataaggatgcggaccataatggcagggtgacatgcttcacagatcatgaaatccctttcagattaaggccagtattcagtaatcagttcctcctggagactgcagcatatcttgactatgagtccacaaaagaatatgccattaaattactggctgcagatgctggcaaacctcctttgaatcagtcagcaatgctcttcatcaaagtgaaagatgaaaatgacaatgctccagttttcacccagtctttcgtaactgtttctattcctgagaataactctcctggcatccagttgacgaaagtaagtgcaatggatgcagacagtgggcctaatgctaagatcaattacctgctaggccctgatgctccacctgaattcagcctggattgtcgtacaggcatgctgactgtagtgaagaaactagatagagaaaaagaggataaatatttattcacaattctggcaaaagataacggggtaccacccttaaccagcaatgtcacagtctttgtaagcattattgatcagaatgacaatagcccagttttcactcacaatgaatacaacttctatgtcccagaaaaccttccaaggcatggtacagtaggactaatcactgtaactgatcctgattatggagacaattctgcagttacgctctccattttagatgagaatgatgacttcaccattgattcacaaactggtgtcatccgaccaaatatttcatttgatagagaaaaacaagaatcttacactttctatgtaaaggctgaggatggtggtagagtatcacgttcttcaagtgccaaagtaaccataaatgtggttgatgtcaatgacaacaaaccagttttcattgtccctccttccaactgttcttatgaattggttctaccgtccactaatccaggcacagtggtctttcaggtaattgctgttgacaatgacactggcatgaatgcagaggttcgttacagcattgtaggaggaaacacaagagatctgtttgcaatcgaccaagaaacaggcaacataacattgatggagaaatgtgatgttacagaccttggtttacacagagtgttggtcaaagctaatgacttaggacagcctgattctctcttcagtgttgtaattgtcaatctgttcgtgaatgagtcggtgaccaatgctacactgattaatgaactggtgcgcaaaagcactgaagcaccagtgaccccaaatactgagatagctgatgtatcctcaccaactagtgactatgtcaagatcctggttgcagctgttgctggcaccataactgtcgttgtagttattttcatcactgctgtagtaagatgtcgccaggcaccacaccttaaggctgctcagaaaaacaagcagaattctgaatgggctaccccaaacccagaaaacaggcagatgataatgatgaagaaaaagaaaaagaagaagaagcattcccctaagaacttgctgcttaattttgtcactattgaagaaactaaggcagatgatgttgacagtgatggaaacagagtcacactagaccttcctattgatctagaagagcaaacaatgggaaagtacaattgggtaactacacctactactttcaagcccgacagccctgatttggcccgacactacaaatctgcctctccacagcctgccttccaaattcagcctgaaactcccctgaattcgaagcaccacatcatccaagaactgcctctcgataacacctttgtggcctgtgactctatctccaagtgttcctcaagcagttcagatccctacagcgtttctgactgtggctatccagtgacgaccttcgaggtacctgtgtccgtacacaccagaccggtaggtatccaagtttctaacacaactttctaactatttttttattattattttcagttgatgtagaactttacaaaatctattgacttcaaagagggatcaaaacaatcatattctacagatgtacccaatagatatatggattcaattaagtttggtagaagatgagaacaaaataactactgatttaggaaaattggatgcagaataataattatagtaggggcaattttgtctgtagatggcagtatgacaattcttgctagagaatatattgaaaaaaacttcaacacaaagggttgtagcactgtcctcagtaccattgtgtgcatgaggatcagaatagtctgggctagatacatcacattaaagcttttcagaatctgataaatagctctaaatactaatgatattgagaagcctagcttcacttgggaaaatctgtggctgttcacagaaattcagcaccaagttattccccccatactctaccaggccttcaggtcctcataaagaaaagtgtcgttttcagattaggaactcaaaattattttggtgcatcaaatctacagtcacacaatataacaagaatgggattagaaaaatgaaagcctactcattctcatctttaagccagagaatgaaatatatatgaggtctctggatagctatttaaatatttgcatatttatgcaaggtattttgagcccttcagaagacattct

SEQ ID NO: 13562 - DNA, 4710 bp, Homo sapiens
cccctttctccccctctgttaagtccctccccctcgccattcaaaagggctggctcggcactggctccttgcagtcggcgaactgtctgggcgggaggagccgtgagcagtagctgcactcagctgcccgcgcggcaaagaggaaggcaagccaaacagagtgcgcagagtggcagtgccagcggcgacacaggcagcacaggcagcccgggctgcctgaatagcctcagaaacaacctcagcgactccggctgctctgcggactgcgagctgtggcggtagagcccgctacagcagtcgcagtctccgtggagcgggcggaagccttttttctccctttcgtttacctcttcattctactctaaaggcatcgttattaggaaaatcctgttgtgaataagaaggattccacagatcacataccagagcggttttgcctcagctgctctcaactttgtaatcttgtgaagaagctgacaagcttggctgattgcagtgcactatgaggactgaatgacagtgggttttaattcagatatttcaagtgttgtgcgggttaatacaacaaactgtcacaagtgtttgttgtccgggacgtacattttcgcggtcctgctagtatgcgtggtgttccactctggcgcccaggagaaaaactacaccatccgagaagaaattccagaaaacgtcctgataggcaacttgttgaaagaccttaacttgtcgctgattccaaacaagtccttgacaactactatgcagttcaagctagtgtacaagaccggagatgtgccactgattcgaattgaagaggatactggtgagatcttcactaccggcgctcgcattgatcgtgagaaattatgtgctggtatcccaagggatgagcattgcttttatgaagtggaggttgccattttgccggatgaaatatttagactggttaagatacgttttctgatagaagatataaatgataatgcaccattgttcccagcaacagttatcaacatatcaattccagagaactcggctataaactctaaatatactctcccagcggctgttgatcctgacgtaggcataaacggagttcaaaactacgaactaattaagagtcaaaacatttttggcctcgatgtcattgaaacaccagaaggagacaagatgccacaactgattgttcaaaaggagttagatagggaagagaaggatacctatgtgatgaaagtaaaggttgaagatggtggctttcctcaaagatccagtactgctattttgcaagtaagtgttactgatacaaatgacaaccacccagtctttaaggagacagagattgaagtcagtataccagaaaatgctcctgtaggcacttcagtgacacagctccatgccacagatgctgacataggtgaaaatgccaagatccacttctctttcagcaatctagtctccaacattgccaggagattatttcacctcaatgccaccactggacttatcacaatcaaagaaccactggatagggaagaaacaccaaaccacaagttactggttttggcaagtgatggtggattgatgccagcaagagcaatggtgctggtaaatgttacagatgtcaatgataatgtcccatccattgacataagatacatcgtcaatcctgtcaatgacacagttgttctttcagaaaatattccactcaacaccaaaattgctctcataactgtgacggataaggatgcggaccataatggcagggtgacatgcttcacagatcatgaaattcctttcagattaaggccagtattcagtaatcagttcctcctggagaatgcagcatatcttgactatgagtccacaaaagaatatgccattaaattactggctgcagatgctggcaaacctcctttgaatcagtcagcaatgctcttcatcaaagtgaaagatgaaaatgacaatgctccagttttcacccagtctttcgtaactgtttctattcctgagaataactctcctggcatccagttgatgaaagtaagtgcaacggatgcagacagtgggcctaatgctgagatcaattacctgctaggccctgatgctccacctgaattcagcctggatcgtcgtacaggcatgctgactgtagtgaagaaactagatagagaaaaagaggataaatatttattcacaattctggcaaaagataatggggtaccacccttaaccagcaatgtcacagtctttgtaagcattattgatcagaatgacaatagcccagttttcactcacaatgaatacaaattctatgtcccagaaaaccttccaaggcatggtacagtaggactaatcactgtaactgatcctgattatggagacaattctgcagttacgctctccattttagatgagaatgatgacttcaccattgattcacaaactggtgtcatccgaccaaatatttcatttgatagagaaaaacaagaatcttacactttctatgtaaaggctgaggatggtggtagagtatcacgttcttcaagtgccaaagtaaccataaatgtggttgatgtcaatgacaacaaaccagttttcattgtccctccttacaactattcttatgaattggttctaccgtccactaatccaggcacagtggtctttcaggtaattgctgttgacaatgacactggcatgaatgcagaggttcgttacagcattgtaggaggaaacacaagagatctgtttgcaatcgaccaagaaacaggcaacataacattgatggagaaatgtgatgttacagaccttggtttacacagagtgttggtcaaagctaatgacttaggacagcctgattctctcttcagtgttgtaattgtcaatctgttcgtgaatgagtcagtgaccaatgctacactgattaatgaactggtgcgcaaaagcattgaagcaccagtgaccccaaatactgagatagctgatgtatcctcaccaactagtgactatgtcaagatcctggttgcagctgttgctggcaccataactgtcgttgtagttattttcatcactgctgtagtaagatgtcgccaggcaccacaccttaaggctgctcagaaaaacatgcagaattctgaatgggctaccccaaacccagaaaacaggcagatgataatgatgaagaaaaagaaaaagaagaagaagcattcccctaagaacctgctgcttaatgttgtcactattgaagaaactaaggcagatgatgttgacagtgatggaaacagagtcacactagaccttcctattgatctagaagagcaaacaatgggaaagtacaattgggtaactacacctactactttcaagcctgacagccctgatttggcccgacactacaaatctgcctctccacagcctgccttccaaattcagcctgaaactcccctgaatttgaagcaccacatcatccaagaactgcctctcgataacacctttgtggcctgtgactctatctccaattgttcctcaagcagttcagatccctacagcgtttctgactgtggctatccagtgacaaccttcgaggtacctgtgtccgtacacaccagaccgactgattccaggacatgaactattgaaatctgcagtgagatgtaactttctaggaacaacaaaattccattccccttccaaaaaatttcaatgattgtgatttcaaaattaggctaagatcattaattttgtaatctagatttcccattataaaagcaagcaaaaatcatcttaaaaatgatgtcctagtgaaccttgtgctttctttagctgtaatctggcaatggaaatttaaaatttatggaagagacagtgcagcgcaataacagagtactctcatgctgtttctctgtttgctctgaatcaacagccatgatgtaatataaggctgtcttggtgtatacacttatggttaatatatcagtcatgaaacatgcaattacttgccctgtctgattgttgaataattaaaacattatctccaggagtttggaagtgagctgaactagccaaactactctctgaaaggtatccagggcaagagacatttttaagaccccaaacaaacaaaaaacaaaaccaaaacactctggttcagtgttttgaaaatattgactaacataatattgctgagaaaatcatttttattacccaccactctgcttaaaagttgagtgggccgggcgcggtggctcacgcctgtaattccagcactttgggaggccgaggcgggtggatcacgaggtcaggatattgagaccatcctggctaacatggtgaaaccccatctccactaaaaatacaaaaaattagctgggcgtggtggcgggcgcctgtagtcccagctactcgggaggctgaggcaggagaatggcgtgaacccgggaggcggagcttgcagtgagccgagatggcgccactgcactccagcctgggtgacagagcaagactctgtctcaaaaagaaaaaaatgttcagtgatagaaaataattttactaggtttttatgttgattgtactcatgctgttccactccttttaattattaaaaagttatttttggctgggtgtggtggctcatacctgtaatcccagcactttgggaggccgaggcgggtggatcacctgaggtcaggagttcaagaccagtctggccaacat

SEQ ID NO: 13563 - DNA, 9056 bp, Homo sapiens
ggtggtccagtacctccaaagatatggaatacactcctgaaatatcctgaaaccttttttttttcagaatcctttaataagcagttatgtcaatctgaaagttgcttacttgtactttatattaatagctattcttgtttttcttatccaaagaaaaatcctctaatccccttttcacatgatagttgttaccatgtttaggcgttagtcacatcaacccctctcctctcccaaacttctcttcttcaaatcaaactttattagtccctcctttataatgattccttgcctccttttatccagatcaattttttttcactttgatgcccagagctgaagaaatggactattgtataaattattcattgccaagagaataattgcattttaaacccatgttataacaaagaataatgattatattttgtgatttgtaacaaataccctttattttcccttaactattgaattaaatattttaattatttgtattctctttaactatcttggtatattaaagtattatcttttatatatttatcaatggtggacacttttataggtactctgtgtcatttttgatactgtaggtatcttatttcatttatctttattcttaatgtacgaattcataatatttgattcagaacagatttatcactaattaacagagtgtcaattatgctaacatctcatttactgattttaatttaaaacagtttttgttaacatgcatgtttagggttggcttcttaataatttcttcttcctcttctctctctcctcttcttttggtcagtgttgtgcgggttaatacaacaaactgtcacaagtgtttgttgtccgggacgtacattttcgcggtcctgctagtatgcgtggtgttccactctggcgcccaggagaaaaactacaccatccgagaagaaattccagaaaacgtcctgataggcaacttgttgaaagaccttaacttgtcgctgattccaaacaagtccttgacaactactatgcagttcaagctagtgtacaagaccggagatgtgccactgattcgaattgaagaggatactggtgagatcttcactaccggcgctcgcattgatcgtgagaaattatgtgctggtatcccaagggatgagcattgcttttatgaagtggaggttgccattttgccggatgaaatatttagactggttaagatacgttttctgatagaagatataaatgataatgcaccattgttcccagcaacagttatcaacatatcaattccagagaactcggctataaactctaaatatactctcccagcggctgttgatcctgacgtaggcataaacggagttcaaaactacgaactaattaagagtcaaaacatttttggcctcgatgtcattgaaacaccagaaggagacaagatgccacaactgattgttcaaaaggagttagatagggaagagaaggatacctatgtgatgaaagtaaaggttgaagatggtggctttcctcaaagatccagtactgctattttgcaagtaagtgttactgatacaaatgacaaccacccagtctttaaggagacagagattgaagtcagtataccagaaaatgctcctgtaggcacttcagtgacacagctccatgccacagatgctgacataggtgaaaatgccaagatccacttctctttcagcaatctagtctccaacattgccaggagattatttcacctcaatgccaccactggacttatcacaatcaaagaaccactggatagggaagaaacaccaaaccacaagttactggttttggcaagtgatggtggattgatgccagcaagagcaatggtgctggtaaatgttacagatgtcaatgataatgtcccatccattgacataagatacatcgtcaatcctgtcaatgacacagttgttctttcagaaaatattccactcaacaccaaaattgctctcataactgtgacggataaggatgcggaccataatggcagggtgacatgcttcacagatcatgaaattcctttcagattaaggccagtattcagtaatcagttcctcctggagaatgcagcatatcttgactatgagtccacaaaagaatatgccattaaattactggctgcagatgctggcaaacctcctttgaatcagtcagcaatgctcttcatcaaagtgaaagatgaaaatgacaatgctccagttttcacccagtctttcgtaactgtttctattcctgagaataactctcctggcatccagttgatgaaagtaagtgcaacggatgcagacagtgggcctaatgctgagatcaattacctgctaggccctgatgctccacctgaattcagcctggatcgtcgtacaggcatgctgactgtagtgaagaaactagatagagaaaaagaggataaatatttattcacaattctggcaaaagataatggggtaccacccttaaccagcaatgtcacagtctttgtaagcattattgatcagaatgacaatagcccagttttcactcacaatgaatacaaattctatgtcccagaaaaccttccaaggcatggtacagtaggactaatcactgtaactgatcctgattatggagacaattctgcagttacgctctccattttagatgagaatgatgacttcaccattgattcacaaactggtgtcatccgaccaaatatttcatttgatagagaaaaacaagaatcttacactttctatgtaaaggctgaggatggtggtagagtatcacgttcttcaagtgccaaagtaaccataaatgtggttgatgtcaatgacaacaaaccagttttcattgtccctccttacaactattcttatgaattggttctaccgtccactaatccaggcacagtggtctttcaggtaattgctgttgacaatgacactggcatgaatgcagaggttcgttacagcattgtaggaggaaacacaagagatctgtttgcaatcgaccaagaaacaggcaacataacattgatggagaaatgtgatgttacagaccttggtttacacagagtgttggtcaaagctaatgacttaggacagcctgattctctcttcagtgttgtaattgtcaatctgttcgtgaatgagtcagtgaccaatgctacactgattaatgaactggtgcgcaaaagcattgaagcaccagtgaccccaaatactgagatagctgatgtatcctcaccaactagtgactatgtcaagatcctggttgcagctgttgctggcaccataactgtcgttgtagttattttcatcactgctgtagtaagatgtcgccaggcaccacaccttaaggctgctcagaaaaacatgcagaattctgaatgggctaccccaaacccagaaaacaggcagatgataatgatgaagaaaaagaaaaagaagaagaagcattcccctaagaacctgctgcttaatgttgtcactattgaagaaactaaggcagatgatgttgacagtgatggaaacagagtcacactagaccttcctattgatctagaagagcaaacaatgggaaagtacaattgggtaactacacctactactttcaagcctgacagccctgatttggcccgacactacaaatctgcctctccacagcctgccttccaaattcagcctgaaactcccctgaatttgaagcaccacatcatccaagaactgcctctcgataacacctttgtggcctgtgactctatctccaattgttcctcaagcagttcagatccctacagcgtttctgactgtggctatccagtgacaaccttcgaggtacctgtgtccgtacacaccagaccgtcccagcggcgtgtcacatttcacctgccagaaggctctcaggaaagcagcagtgatggtggactgggagaccatgatgcaggcagccttaccagcacatcccatggcctgccccttggctatcctcaggaggagtactttgatcgtgctacacccagcaatcgcactgaaggggatggcaactccgatcctgaatctactttcatacctggactaaagaaagaaataactgttcaaccaactgtggaagaggcctctgacaactgcactcaagaatgtctcatctatggccattctgatgcctgctggatgccggcatctctggatcattccagctcttcacaagcacaggcctctgctctatgccacagcccaccactgtcacaggcctctactcagcaccacagcccaccagtgacacagaccattgttctctgccacagccctccagtgacacagaccatcgcattgtgccacagcccaccaccgatacaggtgtctgctctccaccacagtcctcctctagtgcagggtactgcacttcaccacagcccaccatcagcacaggcctcagccctctgctacagccctcctttagcacaggctgctgcaatcagccacagctcttctctgccacaggttattgccctccatcgtagtcaggcccaatcatcagtcagtttgcagcaaggttgggtgcaaggtgctaatggactatgctctgttgatcagggagtgcaaggtagtgcaacatctcagttttacaccatgtctgaaagacttcatcccagtgatgattcaattaaagtcattcctttgacaaccttcgctccacgccaacaggccagaccgtccagaggtgattcccccattatggaaacacatcccttgtaaagctaaaatagttacttcaaattttcagaaaagatgtatatagtcaaaatttaagatacaattccaatgagtattctgattatcagatttgtaaataactatgtaaatagaaacagataccagaataaatctacagctagacccttagtcaatagttaaccaaaaaattgcaatttgtttaattcagaatgtgtatttaaaaagaaaaggaatttaacaatttgcatccccttgtacagtaaggcttatcatgacagagcgtactatttctgatgtacagtattttttgttgtttttatcatcatgtgcaatattactgatttgtttccatgctgattgtgtggaaccagtatgtagcaaatggaaagcctagaaatatcttattttctaagtttacctttagtttacctaaacttttgttcagataatgttaaaaggtatacgtactctagccttttttggggctttctttttgatttttgtttgtggttttcagtttttttgttgttgttagtgagtctcccttcaaaatacacagtaggtagtgtaaatactgcttgtttgtgtctctctgctgtcatgttttctaccttattccaatactatattgttgataaaatttgtatatacattttcaataaagaatatgtataaactgtacagatctagatctacaacctatttctctactctttagtagagttcgagacacagaagtgcaataactgccctaattaagcaactatttgttaaaaagggcccctttttactttaatagtttagtgtaaagtacatcagaaataaaactgtatctgacattttaagcctgtagtccattattacttgggtctttacttctgggaatttgtatgtaacagcctagaaaattaaaaggaggtggatgcatccaaagcacgagtcacttaaaatatcgacggtaaactactattttgtagagaaactcaggaagatttaaatgttgatttgacagctcaataggctgttaccaaagggtgttcagtaaaaataacaaatacatgtaactgtagataaaaccacatactaaatctataagactaagggatttttgttattctagctcaacttactgaagaaaaccactaataacaacaagaatatcaggaaggaacttttcaagaaatgtaattataaatctacatcaaacagaattttaaggaaaaatgcagagggagaaataaggcacatgactgcttcttgcagtcaagaagaaataccaataacacacacagaacaaaaaccatcaaaatctcatatatgaaataaaatatattcttctaagcaaagaaacagtactattcatagaaaacattagttttctcctgttgtctgttatttccttcttttatcctcttaactggccattatcttgtatgtgcacattttataaatgtacagaaacatcaccaacttgattttcttccatagcaaaactgagaaaataccttgtttcagtataacactaaaccaagagacaattgatgtttaatgggggcggttggggttgggggggagtcaatatctcctattgattaacttagacatagattttgtaatgtataacttgatatttaatttatgattaaactgtaattttgtaacataaactgtggtaattgcataatttcattggtgaggatttcctttgaatattgagaaagtttcttttcatgtgcccagcaggttaagtagcgttttcagaatatacattattcccatccattgtaaagttccttaagtcatatttgactgggcgtgcagaataacttcttaactattaactatcagagtttgattaataaaattaattaattttttttctccttcgtgttgttaatgttccaagggatttggagcatactggttttccaggtgcatgtgaatcccgaaggactgatgatatttgaatgtttattaaattattatcacacaaatgtgttgatattgtggctattgttgatgttgaaaattgtaaacttggggaagattaagaaaagaaccaatagtgacaaaaatcagtgcttccagtagattttagaacattctttgcctcaaaaaacctgcaaagatgatgtgagattttttcttgtgttttaattattttcacattttctctctgcaaacctttagttttctgatgatctacacacacacatacacacacacacacacacacgtgcacacacacacatttaaaggatataaaaagaagaggttgaaagattattaaataacttatcaggcatctcaatggttactatctatgttagtgaaaatcaaataggactcaaagttggatatttgggatttttcttctgacagtataatttattgagttactagggaggttcttaaatcctcatatctggaaacttgtgaagttttgacacctttcctatagatataggaatgaaccaatacgcttttattaccctttctaactctgattttataatcagacttagattgtgtttagaatattaaatgactgggcaccctcttcttggtttttaccagagaggctttgaatggaagcaggctgagagtagccaaagaggcaaggggtattagcccagttattctcccctatgccttctcttcctaagcgtccactaggtctggccttggaaatctgttacttctacggcttcagatctgatgatatctttttcatcacattacaagttatttctttgactgaatagacagtggtataggttgacacagcacacaagtggctattgtgatgtatgatgtatgtagtcccacaactgcaaaacgtcttactgaagcaacaatcgaaaaatggttctgttttaaaaaggattttgtttgatttgaaattaaaacttcaaactgaatgacttatatgagaataatatgttcaatcaaagtagttattctattttgtgtccatattccattagattgtgattattaattttctagctatggtattactatatcacacttgtgagtatgtattcaaatactaagtatcttatatgctacgtgcatacacattcttttcttaaactttacctgtgttttaactaatattgtgtcagtgtattaaaaattagcttttacatatgatatctacaatgtaataaatttagagagtaattttgtgtattcttatttacttaacattttacttttaattatgtaaatttggttagaaaataataataaatggttagtgctattgtgtaatggtagcagttacaaagagcctctgccttcccaaactaatatttatcacacatggtcattaaatgggaaaaaaatagactaaacaaatcacaaattgttcagttcttaaaatgtaattatgtcacacacacaaaaaaatccttttcaatcctgagaaaattaaaggtgttttactcacatggatatttcaacattagttttttttgtttgtttctttttcatggtattactgaaggtgtgtatactccctaatacacatttatgaaaatctacttgtttagacttttatttatactcttctgatttatattttttattataattattatttcttatcttcttttatattttttggaaaccaaatttatagttagtttaggtaaactttttattatgaccattagaaactattttgaatgtttccaactggctcaattggctgggaaaacatgggaacaagagaagctgaaatatatttctgcaagaacctttctatattatgtgccaattaccacaccagatcaattttatgcagaggccttaaaatattctttcacagtagctttcttacactaaccgtcatgtgcttttagtaaatatgatttttaaaagcagttcaagttgacaacagcagaaacagtaacaaaaaaatctgctcagaaaaatgtatgtgcacaaataaaaaaaattaatggcaattgtttagtgactgtaagtgatactttttaaagagtaaactgtgtgaaatttatactatccctgcttaaaatattaagatttttatgaaatatgtatttatgtttgtattgtgggaagattcctcctctgtgatatcatacagcatctgaaagtgaacagtatcccaaagcagttccaagcatgctttggaagtaagaaggttgactattgtatggccaaggatggcagtatgtaatccagaagcaaacttgtattaattgttctatttcaggttctgtattgcatgttttcttattaatatatattaataaaagttatgagaaataaaaaaaaaaaaaaaaaaaa

SEQ ID NO: 13564 - DNA, 4964 bp, Homo sapiens
ggtggtccagtacctccaaagatatggaatacactcctgaaatatcctgaaaccttttttttttcagaatcctttaataagcagttatgtcaatctgaaagttgcttacttgtactttatattaatagctattcttgtttttcttatccaaagaaaaatcctctaatccccttttcacatgatagttgttaccatgtttaggcgttagtcacatcaacccctctcctctcccaaacttctcttcttcaaatcaaactttattagtccctcctttataatgattccttgcctccttttatccagatcaattttttttcactttgatgcccagagctgaagaaatggactattgtataaattattcattgccaagagaataattgcattttaaacccatgttataacaaagaataatgattatattttgtgatttgtaacaaataccctttattttcccttaactattgaattaaatattttaattatttgtattctctttaactatcttggtatattaaagtattatcttttatatatttatcaatggtggacacttttataggtactctgtgtcatttttgatactgtaggtatcttatttcatttatctttattcttaatgtacgaattcataatatttgattcagaacagatttatcactaattaacagagtgtcaattatgctaacatctcatttactgattttaatttaaaacagtttttgttaacatgcatgtttagggttggcttcttaataatttcttcttcctcttctctctctcctcttcttttggtcagtgttgtgcgggttaatacaacaaactgtcacaagtgtttgttgtccgggacgtacattttcgcggtcctgctagtatgcgtggtgttccactctggcgcccaggagaaaaactacaccatccgagaagaaattccagaaaacgtcctgataggcaacttgttgaaagaccttaacttgtcgctgattccaaacaagtccttgacaactactatgcagttcaagctagtgtacaagaccggagatgtgccactgattcgaattgaagaggatactggtgagatcttcactaccggcgctcgcattgatcgtgagaaattatgtgctggtatcccaagggatgagcattgcttttatgaagtggaggttgccattttgccggatgaaatatttagactggttaagatacgttttctgatagaagatataaatgataatgcaccattgttcccagcaacagttatcaacatatcaattccagagaactcggctataaactctaaatatactctcccagcggctgttgatcctgacgtaggcataaacggagttcaaaactacgaactaattaagagtcaaaacatttttggcctcgatgtcattgaaacaccagaaggagacaagatgccacaactgattgttcaaaaggagttagatagggaagagaaggatacctatgtgatgaaagtaaaggttgaagatggtggctttcctcaaagatccagtactgctattttgcaagtaagtgttactgatacaaatgacaaccacccagtctttaaggagacagagattgaagtcagtataccagaaaatgctcctgtaggcacttcagtgacacagctccatgccacagatgctgacataggtgaaaatgccaagatccacttctctttcagcaatctagtctccaacattgccaggagattatttcacctcaatgccaccactggacttatcacaatcaaagaaccactggatagggaagaaacaccaaaccacaagttactggttttggcaagtgatggtggattgatgccagcaagagcaatggtgctggtaaatgttacagatgtcaatgataatgtcccatccattgacataagatacatcgtcaatcctgtcaatgacacagttgttctttcagaaaatattccactcaacaccaaaattgctctcataactgtgacggataaggatgcggaccataatggcagggtgacatgcttcacagatcatgaaattcctttcagattaaggccagtattcagtaatcagttcctcctggagaatgcagcatatcttgactatgagtccacaaaagaatatgccattaaattactggctgcagatgctggcaaacctcctttgaatcagtcagcaatgctcttcatcaaagtgaaagatgaaaatgacaatgctccagttttcacccagtctttcgtaactgtttctattcctgagaataactctcctggcatccagttgatgaaagtaagtgcaacggatgcagacagtgggcctaatgctgagatcaattacctgctaggccctgatgctccacctgaattcagcctggatcgtcgtacaggcatgctgactgtagtgaagaaactagatagagaaaaagaggataaatatttattcacaattctggcaaaagataatggggtaccacccttaaccagcaatgtcacagtctttgtaagcattattgatcagaatgacaatagcccagttttcactcacaatgaatacaaattctatgtcccagaaaaccttccaaggcatggtacagtaggactaatcactgtaactgatcctgattatggagacaattctgcagttacgctctccattttagatgagaatgatgacttcaccattgattcacaaactggtgtcatccgaccaaatatttcatttgatagagaaaaacaagaatcttacactttctatgtaaaggctgaggatggtggtagagtatcacgttcttcaagtgccaaagtaaccataaatgtggttgatgtcaatgacaacaaaccagttttcattgtccctccttacaactattcttatgaattggttctaccgtccactaatccaggcacagtggtctttcaggtaattgctgttgacaatgacactggcatgaatgcagaggttcgttacagcattgtaggaggaaacacaagagatctgtttgcaatcgaccaagaaacaggcaacataacattgatggagaaatgtgatgttacagaccttggtttacacagagtgttggtcaaagctaatgacttaggacagcctgattctctcttcagtgttgtaattgtcaatctgttcgtgaatgagtcagtgaccaatgctacactgattaatgaactggtgcgcaaaagcattgaagcaccagtgaccccaaatactgagatagctgatgtatcctcaccaactagtgactatgtcaagatcctggttgcagctgttgctggcaccataactgtcgttgtagttattttcatcactgctgtagtaagatgtcgccaggcaccacaccttaaggctgctcagaaaaacatgcagaattctgaatgggctaccccaaacccagaaaacaggcagatgataatgatgaagaaaaagaaaaagaagaagaagcattcccctaagaacctgctgcttaatgttgtcactattgaagaaactaaggcagatgatgttgacagtgatggaaacagagtcacactagaccttcctattgatctagaagagcaaacaatgggaaagtacaattgggtaactacacctactactttcaagcctgacagccctgatttggcccgacactacaaatctgcctctccacagcctgccttccaaattcagcctgaaactcccctgaatttgaagcaccacatcatccaagaactgcctctcgataacacctttgtggcctgtgactctatctccaattgttcctcaagcagttcagatccctacagcgtttctgactgtggctatccagtgacaaccttcgaggtacctgtgtccgtacacaccagaccgactgattccaggacatgaactattgaaatctgcagtgagatgtaactttctaggaacaacaaaattccattccccttccaaaaaatttcaatgattgtgatttcaaaattaggctaagatcattaattttgtaatctagatttcccattataaaagcaagcaaaaatcatcttaaaaatgatgtcctagtgaaccttgtgctttctttagctgtaatctggcaatggaaatttaaaatttatggaagagacagtgcagcgcaataacagagtactctcatgctgtttctctgtttgctctgaatcaacagccatgatgtaatataaggctgtcttggtgtatacacttatggttaatatatcagtcatgaaacatgcaattacttgccctgtctgattgttgaataattaaaacattatctccaggagtttggaagtgagctgaactagccaaactactctctgaaaggtatccagggcaagagacatttttaagaccccaaacaaacaaaaaacaaaaccaaaacactctggttcagtgttttgaaaatattgactaacataatattgctgagaaaatcatttttattacccaccactctgcttaaaagttgagtgggccgggcgcggtggctcacgcctgtaattccagcactttgggaggccgaggcgggtggatcacgaggtcaggatattgagaccatcctggctaacatggtgaaaccccatctccactaaaaatacaaaaaattagctgggcgtggtggcgggcgcctgtagtcccagctactcgggaggctgaggcaggagaatggcgtgaacccgggaggcggagcttgcagtgagccgagatggcgccactgcactccagcctgggtgacagagcaagactctgtctcaaaaagaaaaaaatgttcagtgatagaaaataattttactaggtttttatgttgattgtactcatgctgttccactccttttaattattaaaaagttatttttggctgggtgtggtggctcatacctgtaatcccagcactttgggaggccgaggcgggtggatcacctgaggtcaggagttcaagaccagtctggccaacat

SEQ ID NO: 13565 - DNA, 4723 bp, Homo sapiens
cccctttctccccctcggttaagtccctccccctcgccattcaaaagggctggctcggcactggctccttgcagtcggcgaactgtcggggcgggaggagccgtgagcagtagctgcactcagctgcccgcgcggcaaagaggaaggcaagccaaacagagtgcgcagagtggcagtgccagcggcgacacaggcagcacaggcagcccgggctgcctgaatagcctcagaaacaacctcagcgactccggctgctctgcggactgcgagctgtggcggtagagcccgctacagcagtcgcagtctccgtggagcgggcggaagccttttttctccctttcgtttacctcttcattctactctaaaggcatcgttattaggaaaatcctgttgcgaataagaaggattccacagatcacataccggagaggttttgcctcagctgctctcaactttgtaatcttgtgaagaagctgacaagcttggctgattgcagagcactatgaggactgaacgacagtgggttttaattcagatatttcaagtgttgtgcgggttaatacaacaaactgtaacaagtgtacctggtatggacttgttgtccgggacgtacattttcgcggtcctgctagcatgcgtggtgttccactctggcgcccaggagaaaaactacaccatccgagaagaaatgccagaaaacgtcctgataggcgacttgttgaaagaccttaacttgtcgctgattccaaacaagtccttgacaactgctatgcagttcaagctagtgtacaagaccggagatgtgccactgattcgaattgaagaggatactggtgagatcttcactactggcgctcgcattgatcgtgagaaattatgtgctggtatcccaagggatgagcattgcttttatgaagtggaggttgccattttgccggatgaaatatttagactggttaagatacgttttctgatagaagatataaatgataatgcaccattgttcccagcaacagttatcaacatatcaattccagagaactcggctataaactctaaatatactctcccagcggctgttgatcctgacgtaggaataaacggagttcaaaactacgaactaattaagagtcaaaacatttttggcctcgatgtcattgaaacaccagaaggagacaagatgccacaactgattgttcaaaaggagttagatagggaagagaaggatacctacgtgatgaaagtaaaggttgaagatggtggctttcctcaaagatccagtactgctattttgcaagtgagtgttactgatacaaatgacaaccacccagtctttaaggagacagagattgaagtcagtataccagaaaatgctcctgtaggcacttcagtgacacagctccatgccacagatgctgacataggtgaaaatgccaagatccacttctctttcagcaatctagtctccaacattgccaggagattatttcacctcaatgccaccactggacttatcacaatcaaagaaccactggatagggaagaaacaccaaaccacaagttactggttttggcaagtgatggtggattgatgccagcaagagcaatggtgctggtaaatgttacagatgtcaatgataatgtcccatccattgacataagatacatcgtcaatcctgtcaatgacacagttgttctttcagaaaatattccactcaacaccaaaattgctctcataactgtgacggataaggatgcggaccataatggcagggtgacatgcttcacagatcatgaaatccctttcagattaaggccagtattcagtaatcagttcctcctggagactgcagcatatcttgactatgagtccacaaaagaatatgccattaaattactggctgcagatgctggcaaacctcctttgaatcagtcagcaatgctcttcatcaaagtgaaagatgaaaatgacaatgctccagttttcacccagtctttcgtaactgtttctattcctgagaataactctcctggcatccagttgacgaaagtaagtgcaatggatgcagacagtgggcctaatgctaagatcaattacctgctaggccctgatgctccacctgaattcagcctggattgtcgtacaggcatgctgactgtagtgaagaaactagatagagaaaaagaggataaatatttattcacaattctggcaaaagataacggggtaccacccttaaccagcaatgtcacagtctttgtaagcattattgatcagaatgacaatagcccagttttcactcacaatgaatacaacttctatgtcccagaaaaccttccaaggcatggtacagtaggactaatcactgtaactgatcctgattatggagacaattctgcagttacgctctccattttagatgagaatgatgacttcaccattgattcacaaactggtgtcatccgaccaaatatttcatttgatagagaaaaacaagaatcttacactttctatgtaaaggctgaggatggtggtagagtatcacgttcttcaagtgccaaagtaaccataaatgtggttgatgtcaatgacaacaaaccagttttcattgtccctccttccaactgttcttatgaattggttctaccgtccactaatccaggcacagtggtctttcaggtaattgctgttgacaatgacactggcatgaatgcagaggttcgttacagcattgtaggaggaaacacaagagatctgtttgcaatcgaccaagaaacaggcaacataacattgatggagaaatgtgatgttacagaccttggtttacacagagtgttggtcaaagctaatgacttaggacagcctgattctctcttcagtgttgtaattgtcaatctgttcgtgaatgagtcggtgaccaatgctacactgattaatgaactggtgcgcaaaagcactgaagcaccagtgaccccaaatactgagatagctgatgtatcctcaccaactagtgactatgtcaagatcctggttgcagctgttgctggcaccataactgtcgttgtagttattttcatcactgctgtagtaagatgtcgccaggcaccacaccttaaggctgctcagaaaaacaagcagaattctgaatgggctaccccaaacccagaaaacaggcagatgataatgatgaagaaaaagaaaaagaagaagaagcattcccctaagaacttgctgcttaattttgtcactattgaagaaactaaggcagatgatgttgacagtgatggaaacagagtcacactagaccttcctattgatctagaagagcaaacaatgggaaagtacaattgggtaactacacctactactttcaagcccgacagccctgatttggcccgacactacaaatctgcctctccacagcctgccttccaaattcagcctgaaactcccctgaattcgaagcaccacatcatccaagaactgcctctcgataacacctttgtggcctgtgactctatctccaagtgttcctcaagcagttcagatccctacagcgtttctgactgtggctatccagtgacgaccttcgaggtacctgtgtccgtacacaccagaccgactgattccaggacatcaactattgaaatctgcagtgagatataactttctaggaacaacaaaattccattccccttccaaaaaatttcaatgattgtgatttcaaaattaggctaagatcattaattttgtaatctagatttcccattataaaagcaagcaaaaatcatcttaaaaatgatgtcctagtgaaccttgtgctttctttagctgtaatctggcaatggaaatttaaaatttatggaagagacagtgcagcacaataacagagtactctcatgctgtttctctgtttgctctgaatcaacagccatgatgtaatataaggctgtcttggtgtatacacttatggttaatatatcagtcatgaaacatgcaattacttgccctgtctgattgttgaataattaaaacattatctccaggagtttggaagtgagctgaactagccaaactactctctgaaaggtatccagggcaagagacatttttaagaccccaaacaaacaaaaaacaaaaccaaaacactctggttcagtgttttgaaaatattcactaacataatattgctgagaaaatcatttttattacccaccactctgcttaaaagttgagtgggccgggcgcggtggctcacgcctgtaatcccagcactttgggaggccgaggcgggtggatcacgaggtcaggagattgagaccatcctggctaacacggtgaaaccccatctccactaaaaatacaaaaaattagcctggcgtggtggcgggcgcctgtagtcccagctactcgggaggctgaggcaggagaatagcgtgaacccgggaggcggagcttgcagtgagccgagatggcgccactgcactccagcctgggtgacagagcaagactctgtctcaaaaagaaaaaaatgttcaatgatagaaaataattttactaggtttttatgttgattgtactcatgctgttccactccttttaattattaaaaagttatttttggctgggtgtggtggctcacacctgtaatcccagcactttgggaggccgaggtgggtggatcacctgaggtcaggagttcaagaccagtctggccaacat

SEQ ID NO: 13566 - DNA, 2991 bp, Homo sapiens
gtggcttgccggcttcggggaaggtgcggcaggcggtgctgcggcctggcacagcaggtttggggtgcgggaggcgggcggggtaggagcgcggcgggcggggccgggcggcgggcggggctggcggggcggccgggccatgcagggcgcagagccggctaaaccctgctgagacccggctccgtgcgtccaggggcggctaatgcccctcacgctgtctacgctgctgcaaccgggccgcatctggacggggcgccgcgcggcggagccgacgccgggccacaatgctgcttggagcctctctggtgggggtgctgctgttctccaagctggtgctgaaactgccctggacccaggtgggattctccctgttgttcctctacttgggatctggcggctggcgcttcatccgggtcttcatcaagaccatcaggcgcgatatctttggcggcctggtcctcctgaaggtgaaggcaaaggtgcgacagtgcctgcaggagcggcggacagtgcccattttgtttgcctctaccgttcggcgccaccccgacaagacggccctgatcttcgagggcacagatacccactggaccttccgccagctggatgagtactcaagcagtgtagccaacttcctgcaggcccggggcctggcctcgggcgatgtggctgccatcttcatggagaaccgcaatgagttcgtgggcctatggctgggcatggccaagctcggtgtggaggcagccctcatcaacaccaacctgcggcgggatgctctgctccactgcctcaccacctcgcgcgcacgggcccttgtctttggcagcgaaatggcctcagccatctgtgaggtccatgccagcctggacccctcgctcagcctcttctgctctggctcctgggagcccggtgcggtgcctccaagcacagaacacctggaccctctgctgaaagatgctcccaagcaccttcccagttgccctgacaagggcttcacagataaactgttctacatctacacatccggcaccacagggctgcccaaggccgccatcgtggtgcacagcaggtattaccgcatggctgccctggtgtactatggattccgcatgcggcccaacgacatcgtctatgactgcctccccctctaccactcagcaggaaacatcgtgggaatcggccagtgcctgctgcatggcatgacggtggtgattcggaagaagttctcagcctcccggttctgggacgattgtatcaagtacaactgcacgattgtgcagtacattggtgaactgtgccgctacctcctgaaccagccaccgcgggaggcagaaaaccagcaccaggttcgcatggcactaggcaatggcctccggcagtccatctggaccaacttttccagccgcttccacataccccaggtggctgagttctacggggccacagagtgcaactgtagcctgggcaacttcgacagccaggtgggggcctgtggtttcaatagccgcatcctgtccttcgtgtaccccatccggttggtacgtgtcaacgaggacaccatggagctgatccgggggcccgacggcgtctgcattccctgccagccaggtgagccgggccagctggtgggccgcatcatccagaaagaccccctgcgccgcttcgatggctacctcaaccagggcgccaacaacaagaagattgccaaggatgtcttcaagaagggggaccaggcctaccttactggtgatgtgctggtgatggacgagctgggctacctgtacttccgagaccgcactggggacacgttccgctggaaaggtgagaacgtgtccaccaccgaggtggaaggcacactcagccgcctgctggacatggctgacgtggccgtgtatggtgtcgaggtgccaggaaccgagggccgggccggaatggctgctgtggccagccccactggcaactgtgacctggagcgctttgctcaggtcttggagaaggaactgcccctgtatgcgcgccccatcttcctgcgcctcctgcctgagctgcacaaaacaggaacctacaagttccagaagacagagctacggaaggagggctttgacccggctattgtgaaagacccgctgttctatctagatgcccagaagggccgctacgtcccgctggaccaagaggcctacagccgcatccaggcaggcgaggagaagctgtgattccccccatccctctgagggccggcggatgctggatccggagccccaggttccgccccagagcggtcctggacaaggccagaccaaagcaagcagggcctggcacctccatcctgaggtgctgcccctccatccaaaactgccaagtgactcattgccttcccaacccttccagaggctttctgtgaaagtctcatgtccaagttccgtcttctgggctgggcaggccctctggttcccaggctgagactgacgggttttctcaggatgatgtcttgggtgagggtagggagaggacaaggggtcaccgagcccttcccagagagcagggagcttataaatggaaccagagcagaagtccccagactcaggaagtcaacagagtgggcagggacagtggtagcatccatctggtggccaaagagaatcgtagccccagagctgcccaagttcactgggctccacccccacctccaggaggggaggagaggacctgacatctgtaggtggcccctgatgccccatctacagcaggaggtcaggaccacgcccctggcctctccccactcccccatcctcctccctgggtggctgcctgattatccctcaggcagggcctctcagtccttgtgggtctgtgtcacctccatctcagtcttggcctggctatgaggggaggaggaatgggagagggggctcaggggccaataaactctgccttgagtcctcctaaaaaaaaaaaaaaaaaaaaaaaaaaaaaaaaaaaaaaaaaaaa

SEQ ID NO: 13567 - DNA, 894 bp, Homo sapiens
cagtctcaatgggggcactggggctggagggcaggggtgggaggctccaggggaggggttccctcctgctagctgtggcaggagccacttctctggtgaccttgttgctggcggtgcctatcactgtcctggctgtgctggccttagtgccccaggatcagggaggactggtaacggagacggccgaccccggggcacaggcccagcaaggactggggtttcagaagctgccagaggaggagccagaaacagatctcagccccgggctcccagctgcccacctcataggcgctccgctgaaggggcaggggctaggctgggagacgacgaaggaacaggcgtttctgacgagcgggacgcagttctcggacgccgaggggctggcgctcccgcaggacggcctctattacctctactgtctcgtcggctaccggggccgggcgccccctggcggcggggacccccagggccgctcggtcacgctgcgcagctctctgtaccgggcggggggcgcctacgggccgggcactcccgagctgctgctcgagggcgccgagacggtgactccagtgctggacccggccaggagacaagggtacgggcctctctggtacacgagcgtggggttcggcggcctggtgcagctccggaggggcgagagggtgtacgtcaacatcagtcaccccgatatggtggacttcgcgagagggaagaccttctttggggccgtgatggtggggtgagggaatatgagtgcgtggtgcgagtgcgtgaatattgggggcccggacgcccaggaccccatggcagtgggaaaaatgtaggagactgtttggaaattgattttgaacctgatgaaaataaagaatggaaagcttcagtgctgccgataaa

SEQ ID NO: 13568 - DNA, 2358 bp, Homo sapiens
ggagaggatcccggagccggtgagaattctctgttttttctctaccatcctttccaggccttttcctcacctaatgagtcgtagagacgagggcccagagagtctgtaaagtggctggtgaaagattagtgtcccagggccctacatccgggaggtggttcgggataaagagaactagtcttgggaacaatgtaggtgggaacttaagggaatgggagagcggcccatagaggtggacggagggcgcgattggagtaaagcggaccctgtgtaggtatagagttgagtcaagtggagtcactgcctctgtccctctggtcagcgtgatggccagaggcctggggggcccccactgggtggccgtgggactgctgacctgggcgaccttggggcttctggtggctggactcgggggtcatgacgacctgcacgacgatctgcaagaggacttccatggccacagccacaggcactcacatgaagatttccaccatggtcacagccatgcccatggtcatggccacactcacgagagcatctggcatggacatacccacgatcacgaccatggacattcacatgaggatttacaccatggccatagccatggctactcccatgagagcctctaccacagaggacatggacatgaccatgagcatagccatggaggctatggggagtctggggctccaggcatcaagcaggacctggatgctgtcactctctgggcttatgcactgggggccacagtgctgatctcagcagctccattttttgtcctcttccttatccccgtggagtcgaactctccccggcatcgctctctacttcagatcttgctcagttttgcttccggtgggctcctgggagatgctttcctgcacctcattcctcatgctcttgaacctcattctcaccacactctggagcaacccggacatggacactcccacagtggccagggccccattctgtctgtgggcctgtgggttctcagtggaattgttgcctttcttgtcgtggagaaatttgtgagacatgtgaaaggaggacatggtcacagtcatggacatggacacgctcacagtcatacacgtggaagtcatggacatggaagacaagagcgttctaccaaggagaagcagagctcagaggaagaaggaaaggaaacaagaggggttcagaagaggcgaggagggagcacagtacccaaagatgggccagtgagacctcagaacgctgaagaagaaaaaagaggcttagacctgcgtgtgtcggggtacctgaatctggctgctgacttggcacacaacttcactgatggtctggccattggggcttcctttcgagggggccggggactagggatcctgaccacaatgactgtcctgctacatgaagtgccccacgaggtcggggactttgccatcttggtccagtctggctgcaccaaaaagcaggcgatgcgtctgcaactactgacagcagtaggggcactggcaggcacagctgtgcccttctcactgaaggaggagcagtggacagtgaaattgcaggtggtgcaggtcctggctgggtcctgccatttactgcaggtggctttatctacgtagcaacagtgtctgtgttgcccgagctgctgagggaggcatcaccattgcaatcacttctggaggtgctggggctgctggggggagttatcatgatggtgctgattgcccaccttgagtgaggggtggataaactaccctgccccaaacctctacccctaactccaggtcaggggtgcgtagaggttgggggccctggccagggacatctgccaaaggaaggaactgtagcctgggagcaatggttactttggcattagggccttcaagggctggcagtcttacagaggctggagcggtgagaatgagaggccagagggaccatagtgttgggcactgtctgaccatgttgcatttggaaggctaaatggggccatgaagaaggctggaagggacagggggtgatggcagcctacctggtgtcccctaccccacctgttctcggagaaccaagttgctacacaggaagttctccaaggtccagtttcctttctcccaccagttggtggaggcttcagggaagaccagagtcctggacagagagggtaacaggaggagtcggggataaacatcaaacatcaatcgtgtgtcctgatttgggagtgattggggggatggggtgggagagggttaattggtattctcatggcctgattttttttgtttctattccttttatatcactgtgtttgaatcgagggggaggggtggtaaccggaaataaagacctccgatcttccgcccc

SEQ ID NO: 13569 - DNA, 3847 bp, Homo sapiens
caaaaccacagataatgttcagcccagcacagtaggggtcaatttggtccacttgctcagtgacaaaaagaaaaaaaaagtgggctgtcactaaagattttgactcacaagagaggggctggtctggaggtgggaggagggagtgacgagtcaaggaggagacagggacgcaggagggtgcaaggaagtgtcttaactgagacgggggtaaggcaagagagggtggaggaaattctgcaggagacaggcttcctccagggtctggagaacccagaggcagctcctcctgagtgctgggaaggactctgggcatcttcagcccttcttactctctgaggctcaagccagaaattcaggctgcttgcagagtgggtgacagagccacggagctggtgtccctgggaccctctgcccgtcttctctccactccccagcatggaggaaggtggtgattttgacaactactatggggcagacaaccagtctgagtgtgagtacacagactggaaatcctcgggggccctcatccctgccatctacatgttggtcttcctcctgggcaccacgggcaacggtctggtgctctggaccgtgtttcggagcagccgggagaagaggcgctcagctgatatcttcattgctagcctggcggtggctgacctgaccttcgtggtgacgctgcccctgtgggctacctacacgtaccgggactatgactggccctttgggaccttcttctgcaagctcagcagctacctcatcttcgtcaacatgtacgccagcgtcttctgcctcaccggcctcagcttcgaccgctacctggccatcgtgaggccagtggccaatgctcggctgaggctgcgggtcagcggggccgtggccacggcagttctttgggtgctggccgccctcctggccatgcctgtcatggtgttacgcaccaccggggacttggagaacaccactaaggtgcagtgctacatggactactccatggtggccactgtgagctcagagtgggcctgggaggtgggccttggggtctcgtccaccaccgtgggctttgtggtgcccttcaccatcatgctgacctgttacttcttcatcgcccaaaccatcgctggccacttccgcaaggaacgcatcgagggcctgcggaagcggcgccggctgctcagcatcatcgtggtgctggtggtgacctttgccctgtgctggatgccctaccacctggtgaagacgctgtacatgctgggcagcctgctgcactggccctgtgactttgacctcttcctcatgaacatcttcccctactgcacctgcatcagctacgtcaacagctgcctcaaccccttcctctatgcctttttcgacccccgcttccgccaggcctgcacctccatgctctgctgtggccagagcaggtgcgcaggcacctcccacagcagcagtggggagaagtcagccagctactcttcggggcacagccaggggcccggccccaacatgggcaagggtggagaacagatgcacgagaaatccatcccctacagccaggagacccttgtggttgactagggctgggagcagagagaagcctggcgccctcggccctccccggcctttgcccttgctttctgaaaatcaggtagtgtggctactccttgtcctatgcacatcctttaactgtcccctgattctgccccgccctgtcctcctctactgctttattctttctcagaggtttgtggtttaggggaaagagactgggctctacagacctgaccctgcacaagccatttaatctcactcagcctcagtttctccattggtatgaaatgggggaaagtcatattgatcctaaaatgttgaagcctgagtctggacgcagtaaaagcttgtttccctctgctgctttcttagatctgcaatcgtctttcctcccttctttccttgtagtttttcccccaccactctctgcagctgccgctccttatccctgccttctggcaccaatcccctcctacagctcgtccccctccctccatccatccttctcccctgtctactttcttgttctgaagggctactaagggttaaggatcccaaagcttgcagagactgaccctgtttaagctttctatcctgttttctgagtgtgaggcagggaatgggctggggccgggggtgggctgtgtgtcagcagataattagtgctccagcccttagatctgggagctccagagcttgccctaaaattggatcacttccctgtcattttgggcattggggctagtgtgattcctgcagttcccccatggcaccatgacactgactagatatgctttctccaaattgtccgcagaccctttcatccttcctctattttctatgagaattggaaggcagcagggctgatgaatggatgtactccttggtttcattatgtgagtggggagttgggaagggcaactagagagagaggatggaggggtgtctgcatttagtccagacactgcttggctcgctccccgagtcctcctgtttctgacttcctgcataactgtgagctgaagggtttcctcatctccccatcttaccccatcatactgatttctttcttgggcactggtgctacttggtgccaagaatcatgttgtttgggatggagatgcctgcctcttgtctgtgtgtgttgtacttatatgtctatatggatgagcctggcatgaacagcagtgtgcctgggtcatttggacaaatctcctcccaccccccaatccactgcaactctgctgttcacacattacccttggcagggggtggtggggggcagggacacactgaggcaatgaaaaatgtagaataaaaatgagtccaccccctactggatttgggggctccaacggctggtccgtgctttaggagcgaagttaatgtttgcaccaggcttcctgtagggagatccctccccaaagcagctggcgccaaggcttgggggcgtcctactgagctgggttcctgctccttcttgggctccatgaaggaagtaagaggctagttgagagcctcccttggcccctttccggtgcctccccgcctggcttcaaatttatgagcattgccctcatcgtcctttcttgttccagggtcagtggccctcttcctaaggaggcctcctgcttgccatgggccaaaaggcacggggtgggttttttctctccctaccctcaggattggacctcttggcttctgctggattggggatctgggaatagggactggagcaagtgtgcagatagcatgatgtctacactgccagagagaccgtgaggatgaaattaatagtggggcctttgtgagctagaggctgggagtgtctattccgggttttgttcttggaggactatgaaagtgaaggacaagacatgagcgatggagataagaaaagcccagcttgatgtgaatggacatcttgaccctccctggaatgacgccagctctgggggcagagggaggaggagaggggaaggggctcctcacagcctagtctccccatcttaagatagcatctttcacagagtcacctcctctgcccagagctgtcctcaaagcatccagtgaacactggaagaggcttctagaagggaagaaattgtccctctgaggccgccgtgggtgacctgcagagacttcctgcctggaactcatctgtgaactgggacagaagcagaggaggctgcctgctgtgatacccccttacctcccccagtgccttcttcagaatatctgcactgtcttctgatcctgttagtcactgtggttcatcaaataaaactgtttgtgc

SEQ ID NO: 13570 - DNA, 2575 bp, Homo sapiens
acaagccatgagcagcgacccgcgggcgacgcgctgtccctggcagccgctgagcccgaccccgcaggcagctcgccgctccctagcaccttctccagtcgacactctcgcgcccggagaaacatgattcccgtgacagaattccggcagttctctgagcagcagcctgccttccgagtgctgaagccatggtgggatgtgtttaccgattacctctcagtagccatgctcatgattggcgtgtttggatgtactttacaggtcatgcaagacaagataatctgccttccgaaaagagtgcagcctgctcagaaccactcttccctttcgaatgtctctcaagcagttgccagtaccactccactgcctccacctaaaccatctcctgctaaccccatcactgtggaaatgaaaggcctgaagacagatttggaccttcagcagtacagctttataaatcagatgtgttatgagcgagccctccactggtatgccaagtatttcccttaccttgtcctcatccataccctggtctttatgctctgcagtaacttttggttcaaattccctggttccagctccaaaatagaacatttcatctccattctggggaagtgttttgactctccttggaccacacgggctttatctgaagtgtctggggaggactcagaagaaaaggacaacaggaagaacaacatgaacaggtccaacaccatccaatctggtccagaaggcagcctggtcaactctcagtctttaaagtccattcctgagaagtttgtagttgataaatccactgcaggggctctggataaaaaggaaggtgagcaggctaaggccttatttgagaaggtgaagaagttcaggctgcatgtggaagaaggtgatattctatatgccatgtatgttcgccagactgtacttaaagttatcaaattcctaatcatcattgcatataatagtgctctggtttccaaggtccagtttacagtggactgtaatgtggacattcaggacatgactggatataaaaacttttcttgcaatcataccatggcacacttgttctcaaaactgtccttttgctatctgtgctttgttagtatctatggattgacgtgcctttataccttatactggctgttctaccgttctctacgggaatattcctttgagtatgtccgtcaggagactggaattgatgatattccagatgtgaaaaatgactttgcttttatgcttcatatgatagatcagtatgaccctctctattccaagagatttgcagtgttcctgtctgaagtcagtgaaaacaaattaaagcagctgaacttaaataacgaatggactcctgataaactgaggcagaagctacagacaaatgcccataatcgactggaattgcctcttatcatgctctctggccttccagacactgtttttgaaatcacagagttgcaatctctaaaacttgaaatcattaagaacgtaatgataccagccaccattgcacagctagacaatcttcaagagctctctctgcaccagtgttctgtcaaaatccacagtgcggcgctctctttcctgaaggaaaacctcaaggtcttgagcgtcaagtttgatgacatgagggaactccccccctggatgtatgggctccgaaatctggaagagctgtacctagttggctctctaagtcatgatatttccagaaatgtcacccttgagtctctgcgggatctcaaaagccttaaaattctctctatcaaaagcaacgtttccaaaatccctcaggcagtggttgatgtttccagccatctccagaagatgtgcatacataatgatggcaccaagctggtgatgctcaacaacttaaagaagatgaccaatctgacagagctggagctggtccactgtgacctggagcgtattcctcatgctgtgttcagcctactcagcctccaggaattggacctgaaggaaaacaatctgaaatctatagaagaaatcgttagctttcagcacttaagaaagttgacagtgctaaaactgtggcataacagcatcacctacatcccagagcatataaagaaactcaccagcctggaacgcctgtcctttagtcacaataaaatagaggtgctgccttcccacctcttcctatgcaacaagatccgatacttggacttatcgtacaatgacattcgatttatcccccctgaaattggagttctacaaagtttacagtatttttccatcacatgtaacaaagtggaaagccttccagatgaactctacttctgcaagaaacttaaaactctgaagattggaaaaaacagcctatctgtactttcaccgaaaattggaaatttgctatttctttcctacttagatgtaaaaggtaatcactttgaaatcctccctcctgaactgggtgactgtcgggctctgaagcgagctggtttagttgtagaagatgctctgtttgaaactctgccttctgacgtccgggagcaaatgaaaacagaataacttatttttcgttaaagtttgactgaaacacgcttctacc

SEQ ID NO: 13571 - DNA, 2503 bp, Homo sapiens
actcgggaaggccacacagccagtgacgaagctgtgattcacacaggcctgggtgactccagcatggctttcctctccaggacgtcaccggtggcagctgcttccttccagagccggcaggaggccagaggctccatcctgcttcagagctgccagctgcccccgcaatggctgagcaccgaagcatggacgggagaatggaagcagccacacgggggggctctcacctccaggctgcagcccagacgccccccaggccggggccaccatcagcaccaccaccaccacccaaggaggggcaccaggaggggctggtggagctgcccgcctcgttccgggagctgctcaccttcttctgcaccaatgccaccatccacggcgccatccgcctggtctgctcccgcgggaaccgcctcaagacgacgtcctgggggctgctgtccctgggagccctggtcgcgctctgctggcagctggggctcctctttgagcgtcactggcaccgcccggtcctcatggccgtctctgtgcactcggagcgcaagctgctcccgctggtcaccctgtgtgacgggaacccacgtcggccgagtccggtcctccgccatctggagctgctggacgagtttgccagggagaacattgactccctgtacaacgtcaacctcagcaaaggcagagccgccctctccgccactgtcccccgccacgagccccccttccacctggaccgggagatccgtctgcagaggctgagccactcgggcagccgggtcagagtggggttcagactgtgcaacagcacgggcggcgactgcttttaccgaggctacacgtcaggcgtggcggctgtccaggactggtaccacttccactatgtggatatcctggccctgctgcccgcggcatgggaggacagccacgggagccaggacggccacttcgtcctctcctgcagttacgatggcctggactgccaggcccgacagttccggaccttccaccaccccacctacggcagctgctacacggtcgatggcgtctggacagctcagcgccccggcatcacccacggagtcggcctggtcctcagggttgagcagcagcctcacctccctctgctgtccacgctggccggcatcagggtcatggttcacggccgtaaccacacgcccttcctggggcaccacagcttcagcgtccggccagggacggaggccaccatcagcatccgagaggacgaggtgcaccggctcgggagcccctacggccactgcaccgccggcggggaaggcgtggaggtggagctgctacacaacacctcctacaccaggcaggcctgcctggtgtcctgcttccagcagctgatggtggagacctgctcctgtggctactacctccaccctctgccggcgggggctgagtactgcagctctgcccggcaccctgcctggggacactgcttctaccgcctctaccaggacctggagacccaccggctcccctgtacctcccgctgccccaggccctgcagggagtctgcattcaagctctccactgggacctccaggtggccttccgccaagtcagctggatggactctggccacgctaggtgaacaggggctgccgcatcagagccacagacagaggagcagcctggccaaaatcaacatcgtctaccaggagctcaactaccgctcagtggaggaggcgcccgtgtactcggtgccgcagctgctctcggccatgggcagcctctgcagcctgtggtttggggcctccgtcctctccctcctggagctcctggagctgctgctcgatgcttctgccctcaccctggtgctaggcggccgccggctccgcagggcgtggttctcctggcccagagccagccctgcctcaggggcgtccagcatcaagccagaggccagtcagatgcccccgcctgcaggcggcacgtcagatgacccggagcccagcgggcctcatctcccacgggtgatgcttccaggggttctggcgggagtctcagccgaagagagctgggctgggccccagccccttgagactctggacacctgaaccagacctgccagggctgtgcgatctcttggcctggtccttgcagctgtggcagcagcaggctccccagcggcccagggtgggccagaccagcagcccaggaagcagcacacgcggccgtggggaggcaggcaccgggcatgtcggcgcctctggtcaaaccacctacactgcctggggtgggtctcaaggaggcccggggcggaggggggttcccgcgtgcacacgagtgcggctggacgtgccgacacgcggtgatgtacccatgctccgtgtgtctgtgtctgcatgtccacacgtctgatgcacctgtgtacgtgtgtcaagcctagccacctcagctgcagggaggcagaaggcaaggcaggccccacggacacacttgggctgctctgaaataaagctgttgactccacctg

SEQ ID NO: 13572 - DNA, 4546 bp, Homo sapiens
aagatggcgggcgggctgctctgaagagaccccggcggcggcggaggaggagagaagcgcagcgccgcgccgcgccggggcccatgtggggaggagtcggagtcgctgttgccgccgccgcctgtagctgctggacccgagtgggagtgagggggaaacggcaggatgaagttcgccgagcacctctccgcgcacatcactcccgagtggaggaagcaatacatccagtatgaggctttcaaggatatgctgtattcagctcaggaccaggcaccttctgtggaagttacagatgaggacacagtaaagaggtattttgccaagtttgaagagaagtttttccaaacctgtgaaaaagaacttgccaaaatcaacacattttattcagagaagctcgcagaggctcagcgcaggtttgctacacttcagaatgagcttcagtcatcactggatgcacagaaagaaagcactggtgttactacgctgcgacaacgcagaaagccagtcttccacttgtcccatgaggaacgtgtccaacatagaaatattaaagaccttaaactggccttcagtgagttctacctcagtctaatcctgctgcagaactatcagaatctgaattttacagggtttcgaaaaatcctgaaaaagcatgacaagatcctggaaacatctcgtggagcagattggcgagtggctcacgtagaggtggccccattttatacatgcaagaaaatcaaccagcttatctctgaaactgaggctgtagtgaccaatgaacttgaagatggtgacagacaaaaggctatgaagcgtttacgtgtcccccctttgggagctgctcagcctgcaccagcatggactacttttagagttggcctattttgtggaatattcattgtactgaatattacccttgtgcttgccgctgtatttaaacttgaaacagatagaagtatatggcccttgataagaatctatcggggtggctttcttctgattgaattcctttttctactgggcatcaacacgtatggttggagacaggctggagtaaaccatgtactcatctttgaacttaatccgagaagcaatttgtctcatcaacatctctttgagattgctggattcctcgggatattgtggtgcctgagccttctggcatgcttctttgctccaattagtgtcatccccacatatgtgtatccacttgccctttatggatttatggttttcttccttatcaaccccaccaaaactttctactataaatcccggttttggctgcttaaactgctgtttcgagtatttacagcccccttccataaggtaggctttgctgatttctggctggcggatcagctgaacagcctgtcagtgatactgatggacctggaatatatgatctgcttctacagtttggagctcaaatgggatgaaagtaagggcctgttgccaaataattcagaagaatcaggaatttgccacaaatatacatatggtgtgcgggccattgttcagtgcattcctgcttggcttcgcttcatccagtgcctgcgccgatatcgagacacaaaaagggcctttcctcatttagttaatgctggcaaatactccacaactttcttcatggtgacgtttgcagccctttacagcactcacaaagaacgaggtcactcggacactatggtgttcttttacctgtggattgtcttttatatcatcagttcctgctataccctcatctgggatctcaagatggactggggtctcttcgataagaatgcaggagagaacactttcctccgggaagagattgtatacccccaaaaagcctactactactgtgccataatagaggatgtgattctgcgctttgcttggactatccaaatctcgattacctctacaactttgttgcctcattctggggacatcattgctactgtctttgccccacttgaggttttccggcgatttgtgtggaacttcttccgcctggagaatgaacatctgaataactgtggtgaattccgtgctgtgcgggacatctctgtggcccccctgaacgcagatgatcagactctcctagaacagatgatggaccaggatgatggggtacgaaaccgccagaagaatcggtcatggaagtacaaccagagcatatccctgcgccggcctcgcctcgcttctcaatccaaggctcgtgacactaaggtattgatagaagacacagatgatgaagctaacacttgaattttctgaagtctagcttaacatctttggttttcctactctacaatcctttcctcgaccaacgcaacctctagtacctttccagccgaaaacaggagaaaacacataacacattttccgagctcttccggatcggatcctatggactccaaacaagctcactgtgtttcttttcttttcttctggtttaattttaattttctattttcaaaacaaatatttacttcatttgccaatcagaggatgttttaagaaacaaaacatagtatcttatggattgtttacaatcacaaggacatagatacctatcaggatgaagaacaggcattgcaaggaccctctgatgggacggtactgagatatctcggcttccgctcagcccggttttgactggttgaaaccggacattggtttttaaattttttgtcagtttatgtggagaatttttttctttccttcatacccagcgcaaaggcactggccgcacttgcaggaaaagtgcaacttaaagcagtatcttcattcatgaagctactttttaatttgatgtaacttttcttattttgggaagggttgctgggtgggtgggaaatatgatgtatttgttacacacagttttctcattatttatgaaacttaaccatacagaatgatataactcctgtgcaatgaaggtgataacagtaaaagaaggcaggggaaacttacgttggatgacatttatgagggtcagtcccacatacctctttcaggagacaacttgcaccagtttgaccttttcttttctttgtttttattttaagccaaagtttcattgctaacttcttaagttgctgctgctttagagtcctgagcatatctctcgtaacaaggaatcccacacttcacaccaccggctgaatttcatggaagaggttctgataatttttttaactttttaaggaacagatgtggaatacactggcccatatttcaaccttaacagctgaagctatgccttattatgcatccacatgtatggtccctgtagcgtgacctttactagctctgaatcagaagacagagctatttcagaggctctgtgtgccctcactagatagtttttcttctgggttcaaccactttagccagaatttgatcaaattaaaagtctgtcatggggaagctatatttttgagcacatggaacaaattatacttcctcattcatattatgttgatacaaaagaccttggcagccatttctcccagcagttttaaaggatgaacattggatttcatgccatcccatagaaaacctgttttaaaattttagggatctttacttggtcatacatgaaaagtacactgcttagaaattatagactattatgatctgtccacagtgcccattgtcacttctttgtctcatttcttccctttgttccttagtcatccaaataagcctgaaaaccataagagatattactttattgaatatggttggcattaaatttagcatttcattatctaacaaaattaatataaattccaggacatggtaaaatgtgttttaataacccccagacccaaatgaaaatttcaaagtcaataccagcagattcatgaaagtaaatttagtcctataattttcagcttaattataaacaaaggaacaaataagtggaagggcagctattaccattcgcttagtcaaaacattcggttactgccctttaatacactcctatcatcagcacttccaccatgtattacaagtcttgacccatccctgtcgtaactccagtaaaagttactgttactagaaaatttttatcaattaactgacaaatagtttctttttaaagtagtttcttccatctttattctgactagcttccaaaatgtgttccctttttgaatcgaggtttttttgttttgttttgttttctgaaaaaatcatacaactttgtgcttctattgcttttttgtgttttgttaagcatgtcccttggcccaaatgaagaggaaatgtttaattaatgctttttagtttaaataaattgaatcatttataataatcagtgttaacaatttagtgacccttggtaggttaaaggttgcattatttatacttgagatttttttcccctaactattctgttttttgactttaaaactatgggggaaatatcactggtctgtcaagaaacagcagtaattattactgagttaaattgaaaagtccagtggaccaggcatttcttatataaataaaattggtggtactaatgtgtaaaaaaaaaaaaaaa

SEQ ID NO: 13573 - DNA, 1955 bp, Homo sapiens
acagaagcgcgcagagtcccatcctgccacgccacgaggagagaagaaggaaagatacagtgttaggaaagagacctccctcgcccctacgccccgcgcccctgcgcctcgcttcagcctcaggacagtcctgccgggacggtgagcgcattcagcaccctggacagcaccgcggttgcgctgcctccagggcggccccgggctgctcctgctccgcagagctacgccctccccccgggtgccccggaccctgcacttgccgccgctttcctcgcgctgctctggaccttgctagccggctctgcacctcccagaagccgtgggcgcgccgctcagctgctccatcgcctcactttcccaggctcgcgcccgaagcagagccatgagaaccccagggtgcctggcgagccgctagcgccatgggccccggcgaggcgctgctggcgggtctcctggtgatggtactggccgtggcgctgctatccaacgcactggtgctgctttgttgcgcctacagcgctgagctccgcactcgagcctcaggcgtcctcctggtgaatctgtctctgggccacctgctgctggcggcgctggacatgcccttcacgctgctcggtgtgatgcgcgggcggacaccgtcggcgcccggcgcatgccaagtcattggcttcctggacaccttcctggcgtccaacgcggcgctgagcgtggcggcgctgagcgcagaccagtggctggcagtgggcttcccactgcgctacgccggacgcctgcgaccgcgctatgccggcctgctgctgggctgtgcctggggacagtcgctggccttctcaggcgctgcacttggctgctcgtggcttggctacagcagcgccttcgcgtcctgttcgctgcgcctgccgcccgagcctgagcgtccgcgcttcgcagccttcaccgccacgctccatgccgtgggcttcgtgctgccgctggcggtgctctgcctcacctcgctccaggtgcaccgggtggcacgcagacactgccagcgcatggacaccgtcaccatgaaggcgctcgcgctgctcgccgacctgcaccccagtgtgcggcagcgctgcctcatccagcagaagcggcgccgccaccgcgccaccaggaagattggcattgctattgcgaccttcctcatctgctttgccccgtatgtcatgaccaggctggcggagctcgtgcccttcgtcaccgtgaacgcccagtggggcatcctcagcaagtgcctgacctacagcaaggcggtggccgacccgttcacgtactctctgctccgccggccgttccgccaagtcctggccggcatggtgcaccggctgctgaagagaaccccgcgcccagcatccacccatgacagctctctggatgtggccggcatggtgcaccagctgctgaagagaaccccgcgcccagcgtccacccacaacggctctgtggacacagagaatgattcctgcctgcagcagacacactgagggcctggcagggctcatcgcccccaccttctaagaagccctgtggaaagggcactggccctgccacagagatgccactggggacccccagacaccagtggcttgactttgagctaaggctgaagtacaggaggaggaggaggagagggccggatgtgggtgtggacagcagtagtggcggaggagagctcggggctgggctgcctggctgctgggtggccccgggacagtggcttttcctctctgaaccttagcttcctcacccttgttctggggtcatggcgatgcttcgagacagtgggtagggaagtgccctgtgtggcatatggtactcgtgggcgtgctataagtgactgctgttcatgtgggtgaggtggtcactcttgctcagggtctgttgtgcagcccagatggacacctgtttctccaaaaaaaaaaaaaaaa

SEQ ID NO: 13574 - DNA, 17208 bp, Homo sapiens
ggactgagagcagggagcagcaggcatggggcatgccgggtgccagttcaaagccctgctgtggaagaattggctctgcagactcaggaacccggtccttttccttgctgaattcttctggccttgtatcctgtttgtaattctgacagttcttcgttttcaagaacctcccagatacagagacatttgttatttgcagccccgagatctacccagctgtggtgttatcccctttgttcaaagccttctttgtaacactggatcaaggtgtaggaacttcagctatgaagggtcaatggagcatcattttcgtttgtctaggttccaaactgcagctgaccccaagaaagtcaacaacctggcctttttaaaagagatacaagacctggcagaggaaattcatggaatgatggacaaggcaaaaaacttaaaaagactttgggtagaacgatccaacactccagattcttcttatggttccagtttttttacaatggatctcaataagaccgaggaggtaatattgaaactggaaagcctccatcagcagcctcatatctgggattttctacttttactgccgagactacacacaagccatgatcatgtggaagatggcatggatgttgcagtgaaccttctccagaccattttgaattccttaatatccctagaagatttagattggcttccactcaaccaaactttttcccaggtttctgaacttgtactgaatgtgaccatttcgacactgacatttctgcagcaacatggagtagcagtcaccgagccagtttaccacctgtccatgcagaatatagtgtgggatccacagaaagtccagtatgatctcaaatcccagtttggctttgatgatcttcacacggaacagatcctgaactcttcagctgaactgaaggagattcccacagacacttccttggagaagatggtgtgttcagtcttgtctagcacatcagaggatgaagctgagaaatggggccacgttggaggctgccaccctaagtggtcagaagccaaaaactatcttgtccatgcagtcagctggctgcgagtctaccaacaggtgtttgttcagtggcaacagggtagcctgcttcagaagacactcacaggcatgggccatagtctggaggctctcaggaatcagtttgaagaagagagcaagccctggaaggtggtggaagctctgcacactgcactgctcctgctgaatgacagcttgtcagcagatggcccaaaagataatcatacatttccaaagatattacagcatctgtggaaattgcaaagcttgctgcaaaacctgccccagtggccggcactgaagagatttcttcagcttgatggagctctcagaaatgcgatagctcagaatttacattttgtccaagaagtcctcatttgcctggagacatcagctaatgattttaaatggtttgaacttaaccaattgaaactggaaaaggatgtgttcttttgggagctgaaacagatgttggcgaagaatgctgtctgcccgaatggtcgtttctctgagaaggaggtctttttgccgcctggaaactccagcatatggggtggtctccagggactgttgtgctattgtaactcctctgagacgagtgttttaaacaagctacttggttcagtagaggatgctgatcgtattttgcaagaggtcattacttggcacaaaaatatgtcagttttaatacctgaagaatatttggactggcaggaacttgagatgcagctgtcagaagcaagcctttcctgtactcggctcttcctgctgctgggagctgatccctctcctgagaatgatgtcttttctagtgactgtaagcaccagcttgtctccacagtgatatttcatacacttgaaaaaacacaatttttcctggaacaagcatattattggaaagccttcaaaaagtttatcaggaagacttgcgaagtggcccaatatgtaaatatgcaagagagtttccagaacagactattggcttttcctgaggaatctccttgttttgaagaaaacatggattggaaaatgatcagtgataattattttcaatttttgaataacttactcaagtctccaacagcttccatatccagggctttaaatttcacaaagcaccttctaatgatggaaaagaagttgcacacccttgaggatgaacaaatgaactttcttttatcatttgtggaattttttgagaaattattgttgcctaatctttttgactcctccattgttcccagtttccacagcctcccatctctcacagaggatattctgaatataagttctctgtggacaaatcatttaaaaagtttaaagagagacccatctgccactgatgctcagaaactcttggaatttggcaacgaagtgatttggaaaatgcagactctcggaagtcactggataaggaaggaaccaaaaaatcttttgagattcatagaattaatactttttgaaattaatcccaaattactagaattatgggcctatggcatttcaaaaggaaaaagagctaaattggaaaacttctttacacttttaaatttttctgttccagaaaatgagattctgagtacaagttttaacttttcccagttgttccattcagattggcctaaatcaccagctatgaacatagattttgtacgtttaagtgaggctataataactagtctccatgaatttggatttttggagcaggaacagatctcagaagctctgaacacagtctacgctatcaggaatgcatctgatcttttctcagccctttctgaaccacaaaaacaagaagttgataaaattttgactcacatacacctaaatgtcttccaggacaaggattcagctttacttctgcaaatttattcttcattttaccgatatatttatgaattattgaatattcagagtagaggctcttcgttgactttccttacacaaatctcaaaacacattttggatatcataaaacaatttaatttccaaaacatcagtaaagcatttgcatttttatttaagacagcagaggttcttgggggaatttctaatgtatcttactgtcagcaattgctttcaatttttaactttttggagcttcaggcccaatccttcatgtctacagagggccaagaactggaagtgatccacactactttgacaggcctcaaacagctgctcataattgatgaagattttcgtatttctttatttcaatatatgagccaattcttcaacagttcagtagaagacctattggataataaatgcttgatttcggacaataaacacatttcttccgtaaattattcaacaagtgaggagtcttcatttgtttttccattggcacaaattttttcaaacctctcagcaaatgtcagtgtgttcaacaagtttatgtccattcactgtaccgtttcatggcttcaaatgtggactgaaatctgggaaaccatatctcaattatttaagtttgacatgaatgttttcacatctcttcatcatggtttcactcagcttttggatgaattggaagatgatgtgaaagtctctaaaagctgccagggtatacttcccacccataatgttgctagactcatattaaatttgtttaaaaatgtaactcaagccaatgacttccataattgggaggacttcctggatctcagggattttttggtagctttaggtaatgcattagtttcagtaaaaaaacttaacttggagcaagtggagaaatcccttttcaccatggaagctgccctgcatcagttgaagacatttccattcaacgaaagtacaagcagagagtttttaaattctctgcttgaagttttcattgagtttagcagtacctcagaatatatagtcagaaatctagattcaataaatgactttctttcaaataatctcacaaattatggagaaaaatttgaaaatatcatcactgagctaagagaagcaatagtatttcttagaaatgtatcacatgatcgagatttgttttcctgtgctgatattttccaaaatgttactgagtgtattttagaagatggctttttatatgtaaatacctcacagaggatgttacgtattctagacacgttaaattccacattttcctctgagaacacaattagcagtctgaaaggatgcattgtatggttagatgtcataaaccatttgtatttgttgtctaactccagtttttcacaaggtcatcttcaaaatattttggggaatttcagagatatagaaaacaaaatgaactctatattaaaaattgtaacttgggtgttaaatataaaaaaacctctttgttcatcaaatggctcacatataaattgtgtcaatatttacttgaaagatgtaactgactttctaaatattgtacttactacagtctttgaaaaagagaagaaacctaaatttgagattttattagctcttttaaatgattccacaaagcaagtaaggatgagtatcaacaacttaacaacagactttgattttgcatctcagtccaattggagatattttactgaattaattctaagaccaatagaaatgtcagatgaaattcctaatcagtttcaaaatatttggcttcatttaataacactggggaaggaatttcagaagcttgtaaaaggtatttactttaacatcctggaaaataattcctcttctaaaactgaaaacttgttaaacatatttgccaccagtccaaaagaaaaggatgtaaacagtgtaggcaattccatttatcacttagctagttaccttgccttcagcttatctcatgacctccaaaattcaccaaaaataataatttcacctgaaataatgaaagctacaggtcttggtattcaactgataagggatgtgttcaactccttaatgcctgtagttcatcacactagtccacaaaatgcaggttatatgcaagctttgaagaaggtaacttctgtcatgcgtacccttaagaaggcagacatagaccttttagtggatcagcttgaacaagttagtgtaaacctaatggatttctttaagaatatcagtagtgtgggaactggcaatttagtggtcaatttgcttgttggcttgatggaaaaatttgcagacagctcacattcttggaatgttaatcatctgctgcagctctcacgcctgtttcctaaagatgttgtggatgctgtgatagatgtgtactatgtgcttcctcatgctgtaaggctcctgcagggagtacctggtaaaaacatcactgaaggcctcaaggatgtctacagcttcacactccttcatggcataaccatttcaaatatcaccaaggaagacttcgcaattgtgataaaaattcttttggatacaattgaattagtatcagataagccagatattatttcagaggctttagcttgttttcctgtggtttggtgctggaatcacacaaattctggatttcggcagaattcaaagatagacccctgcaatgtccatgggctcatgtcttcttccttttatggcaaagtggccagtatacttgatcatttccacctgtctccccaaggtgaagattcaccatgttcaaatgaaagctcccgaatggaaataactaggaaagtggtctgcataattcatgaattagtggactggaattctattcttctggagctctctgaagtcttccatgttaacatttctcttgtgaaaactgtgcagaaattttggcataagatattaccgtttgtcccaccttcaataaatcaaactagggatagcatctctgaactctgtcctagtggttccataaagcaagttgctttgcaaatcatagaaaaacttaaaaatgtcaactttacaaaagttacatcaggtgaaaatattcttgacaaactaagtagtttaaacaagatccttaacattaatgaagacacagagacatctgttcaaaatattatttcctcaaatttggaaaggacagtacaattgatttctgaagactggagcctagaaaaaagtacgcataatctactctctttattcatgatgctccagaatgcaaatgtcacaggtagcagtttagaagcattatcaagttttattgaaaaaagtgaaacaccttacaactttgaagaactatggcccaagtttcaacaaatcatgaaagacctaacccaagattttagaatcagacacctgctttctgaaatgaacaaaggaatcaaaagtataaattcaatggctcttcaaaagataactttgcagtttgcccatttcctggaaatcctggattcaccgtcattgaagacattagaaattattgaagattttctattggtcacaaaaaactggcttcaggaatatgcaaatgaggattactccagaatgatagaaacattattcattcctgtgaccaatgagagttcaactgaagatatagctttgttagccaaagctattgctactttttggggctctttaaaaaatatatctagagcaggcaattttgatgttgcctttcttacccatctgctaaatcaagaacagctgactaatttctcagttgttcagctgctttttgaaaacatcctaattaatttgatcaataacttagctgggaattctcaggaagcagcttggaacttaaatgatactgaccttcaaataatgaatttcattaaccttatcttgaaccatatgcagtcagaaactagtaggaaaacagttctctctctgagaagcatagtagatttcacagaacagtttttgaaaacattcttctccctttttctaaaggaagattctgagaacaaaatatctcttctgctgaaatatttccacaaagatgttattgcagagatgagttttgtcccaaaagataaaattctagaaattctgaaactggatcaatttcttaccctgatgatacaagacagattgatgaacattttttcaagtttaaaggagactatatatcacctaatgaaaagttcatttatattagacaatggagaattttattttgatactcatcaaggactgaagttcatgcaagatttatttaatgcccttctcagggaaacttcaatgaaaaataagactgaaaataatatagactttttcacagtggtgagtcagttgtttttccatgtgaataagtctgaggacctcttcaaactcaatcaagatcttgggtcagctcttcaccttgtaagagaatgttcaacagagatggcaagacttctggatacaattttacactctcctaataaggacttctatgctttgtatcctaccctccaagaagttatacttgctaatctaacggatttgcttttctttataaataattcattccctctaagaaacagagcaacattagaaattactaagagattagttggtgctatttcaagagcaagtgaagaaagtcacgtcctgaaacccctcttagaaatgtctgggactctggtcatgctgttgaatgacagtgctgacctgagagatcttgccacatcaatggactccattgtgaaacttcttaagctggtcaagaaagtttcggggaagatgtccacagtttttaaaactcattttatctccaataccaaggacagtgtgaaattctttgacactctgtattccatcatgcaacaaagtgttcaaaatcttgtgaaagaaatagctactttaaaaaaaatagatcatttcacatttgaaaagataaatgatttgttggtgccatttcttgacttggcctttgaaatgattggggtagaaccttatatatcatcaaactctgatattttcagtatgtcacctagcatactctcatatatgaaccaatctaaggacttttctgatattttggaagaaattgctgaatttttaacatctgtgaaaatgaacttggaagatatgaggagtcttgcggtagcatttaacaatgagactcaaacattttctatggattctgtcaacttacgggaagaaattctgggttgcttagttcctataaataacatcaccaaccaaatggacttcttataccctaatccaatttccactcatagtggccctcaagatataaaatgggaaataattcatgaagtgatcccttttttggataaaatattatcacaaaacagcacagaaataggatctttcttgaaaatggtgatctgtctcaccttagaagctctttggaaaaacttaaagaaagataattggaatgtttctaatgtgttgatgacatttactcagcatccaaataaccttttgaaaaccatagaaacagttttagaggcctccagtggaattaaaagtgactatgaaggtgatttgaataaaagtttatattttgacacacctttgagtcagaatataactcatcatcaacttgaaaaagcaatccataatgttttaagtagaatagctctctggaggaaaggacttctgtttaacaactctgaatggataacttccacaagaactttgtttcagccactttttgagattttcattaaagcaaccaccggaaagaatgtcacatcagaaaaagaagagagaaccaagaaagagatgattgactttccttatagtttcaaaccatttttctgtttggagaaatacctgggaggattatttgtattgactaaatactggcaacaaatcccactaacagatcaaagtgttgttgagatttgtgaagttttccagcagactgtgaagccctcagaagccatggagatgctgcagaaagtgaagatgatggtcgtacgtgtgctcaccatcgttgcagaaaacccttcctggaccaaggacattttgtgtgctactctgagttgcaagcaaaatgggataaggcatctcattttatctgctatacaaggggtcactttggcgcaggaccacttccaggaaattgaaaagatatggtcctcgccgaatcagctaaattgtgaaagtcttagcaagaatctttctagcaccttggagagcttcaagagcagcttggaaaatgccactggccaggactgcacaagccagccgaggctggagacggtgcagcagcacttgtacatgttggccaaaagcctcgaggaaacttggtcatcagggaatcccatcatgacttttctcagcaatttcacagtaactgaggatgtaaaaataaaagatttgatgaagaatatcaccaagttgactgaggagcttcgctcttccatccaaatctcgaatgagactatccatagcattctagaagcaaatatttcccactccaaggttctcttcagtgccctcaccgtagctctgtctggaaagtgtgatcaggaaatccttcatctcctgctgacatttcccaaaggggaaaaatcttggatcgcagcggaggaactctgtagcctgccagggtcaaaagtgtattctctgattgtgttgctgagtcgaaacttggatgtgcgagctttcatttacaagactctgatgccttctgaagcaaatggcttgctcaactccttgctggatatagtttccagcctcagcgccttgcttgccaaagcccagcacgtctttgagtatcttcctgagtttcttcacacatttaaaatcactgccttgctagaaaccctggactttcaacaggtttcacaaaatgtccaggccagaagttcagcttttggttctttccagtttgtgatgaagatggtttgcaaggaccaagcatcattccttagcgattctaatatgtttattaatttgcccagagttaaggaactcttggaagatgacaaagaaaaattcaacattcctgaagattcaacaccgttttgcttgaagctttatcaggaaattctacaattgccaaatggtgctttggtgtggaccttcctaaaacccatattgcatggaaaaatactatacacaccaaacactccagaaattaacaaggtcattcaaaaggctaattacaccttttatattgtggacaaactaaaaactttatcagaaacactgctggaaatgtccagccttttccagagaagtggaagtggccagatgttcaaccagctgcaggaggccctgagaaacaaatttgtaagaaactttgtagaaaaccagttgcacattgatgtagacaaacttactgaaaaactccagacatacggagggctgctggatgagatgtttaaccatgcaggcgctggacgcttccgtttcttgggcagcatcttggtcaatctctcttcctgcgtggcactgaaccgtttccaggctctgcagtctgtcgacatcctggagactaaagcacatgaactcttgcagcagaacagcttcttggccagtatcattttcagcaattccttattcgacaagaacttcagatcagagtctgtcaaactgccaccccatgtctcatacacaatccggaccaatgtgttatacagcgtgcgaacagatgtggtaaaaaacccttcttggaagttccaccctcagaatctaccagctgatgggttcaaatataactacgtctttgccccactgcaagacatgatcgaaagagccatcattttggtgcagactgggcaggaagccctggaaccagcagcacagactcaggcggccccttacccctgccataccagcgacctattcctgaacaacgttggtttcttttttccactgataatgatgctgacgtggatggtgtctgtggccagcatggtcagaaagttggtgtatgagcaggagatacagatagaagagtatatgcggatgatgggagtgcatccagtgatccatttcctggcctggttcctggagaacatggctgtgttgaccataagcagtgctactctggccatcgttctgaaaacaagtggcatctttgcacacagcaatacctttattgttttcctctttctcttggattttgggatgtcagtcgtcatgctgagctacctcttgagtgcatttttcagccaagctaatacagcggccctttgtaccagcctggtgtacatgatcagctttctgccctacatagttctattggttctacataaccaattaagttttgttaatcagacatttctgtgccttctttcgacaaccgcctttggacaaggggtattttttattacattcctggaaggacaagagacagggattcaatggaataatatgtaccaggctctggaacaagggggcatgacatttggctgggtttgctggatgattctttttgattcaagcctttattttttgtgtggatggtacttgagcaacttgattcctggaacatttggtttacggaaaccatggtatttcccctttactgcctcatattggaagagtgtgggtttcttggtggagaaaaggcaatactttctaagttctagtctgttcttcttcaatgagaactttgacaataaagggtcatcactgcaaaacagggaaggagagcttgaaggaagtgccccgggagtcaccctggtgtctgtgaccaaggaatatgagggccacaaggctgtggtccaagacctcagcctgaccttctacagagaccaaatcaccgccctgctggggacaaacggtgccgggaaaaccactatcatatccatgttgacggggctccaccctcccacttctggaaccatcatcatcaatggcaagaacctacagacagacctgtcgagggtcagaatggagcttggtgtgtgtccgcagcaggacatcctgttggacaacctcaccgtccgggaacatttgctgctctttgcttccataaaggcgcctcagtggaccaagaaggagctgcatcagcaagtcaatcaaactcttcaggatgtggacttaactcagcatcagcacaaacagacccgagctctgtctggaggcctgaagaggaagctctcccttggcattgctttcatgggcatgtcgaggaccgtggttctggatgagcccaccagtggggtggacccttgctcccggcatagcctgtgggacattctgctcaagtaccgagaaggtcgtacgatcatcttcacaacccaccacctggatgaagctgaagcgctgagtgaccgcgtggccgtcctccagcatgggaggctcaggtgctgcggtcctcccttctgcctgaaggaggcatatggccaggggctccgcctgacactcacgaggcagccttctgttctggaggcccatgatctgaaagacatggcttgtgttacatccctgataaagatctatattccacaagcatttctcaaagacagcagtggaagtgagctgacctacaccattccaaaggacacagacaaggcctgcttgaaagggctcttccaggccctggatgagaacctgcatcagctgcacctgacgggctatgggatctcagacaccaccttagaagaggtgtttttgatgcttttgcaagattccaacaagaaatctcacattgccctggggactgagtcagagctgcagaaccacaggcctacaggacatctgtctggctactgtggctccctagcacggcccgcaactgtgcagggcgtccagctgctccgcgcacaagtggccgcgatcctggcccggaggctccgccgcacgctgcgcgccgggaagagcaccctcgccgacctgctgctgccagtcctcttcgtggccttggccatgggcttgttcatggtgagacccctggccaccgagtaccctcccctcagactcacacctggacattaccagcgggccgagacctactttttcagcagtgggggcgacaacttggacctcacccgtgtgcttctgcggaagtttagagatcaagatttgccctgtgcagatttaaacccacgccagaagaattcttcatgctggcgcacagatcccttttctcacccagaattccaggattcatgtggctgcctgaagtgtccaaatagaagtgctagtgctccctacctgaccaaccacctgggccacacactgttgaatctctcaggcttcaatatggaggagtacttgctggcaccatctgaaaaaccaaggcttggaggttggtcttttggattaaaaatccccagtgaagctggaggtgcaaatggaaacatatcaaaacccccaactctggcaaaggtgtggtataatcagaagggttttcattccctaccttcctacttaaatcatctaaacaaccttattttgtggcagcacctaccccctactgtggactggagacaatacggaataacactctacagccacccatatggaggggccttgctgaacaaggacaagatcctggagagcatccgtcagtgtggagtggccctctgcatcgtgctgggattctccatcctgtctgcatccatcggcagctctgtggtgagggacagggtgattggagccaaaaggttgcagcacataagtggccttggctacaggatgtactggttcacaaacttcctatatgacatgctcttttacttggtttccgtctgcctgtgtgttgccgttattgtcgccttccagttaacagcttttactttccgcaagaacttggcagccacggccctcctgctgtcacttttcggatatgcaactcttccatggatgtacctgatgtccagaatcttttccagttcggacgtggctttcatttcctatgtctcactaaacttcatctttggcctttgtaccatgctcataaccattatgccccggttgctagccatcatctccaaagctaagaatttacagaatatctatgatgtcctcaagtgggtctttactatttttcctcaattctgtcttggtcaaggactggtagaactctgctataatcagatcaaatatgacctgacccacaacttcggcattgattcctatgtgagtccctttgagatgaactttctgggctggatcttcgtgcaactggcctcgcagggcacagtacttctcctcttgagggttctgctacactgggaccttctgcgatggccaaggggtcattctactctccaaggcacagtcaaatcttctaaggatacagatgttgaaaaagaggaaaagagagtgtttgaaggaaggaccaatggagacattcttgtgttatacaaccttagtaaacattatcgacgctttttccagaatattattgctgtgcaagatattagtttgggcataccaaaaggagagtgctttggacttctaggggtgaatggagctgggaagagcacgactttcaaaatgctgaatggtgaagtttctctaacttcaggacatgctatcatcaggactcccatgggagacgccgtggacctgtcttctgctggcacggcaggcgtgctcattggctactgtccccagcaggatgccctggacgagcttctgactggttgggaacatctctattattactgtagcttacgcgggattccaaggcagtgcatccctgaggttgctggagacctcatcaggcgcttacacctcgaagcccacgcggacaaacctgtggccacctacagtgggggaaccaagcggaaactctctacagccctggccctggtggggaaacctgacattcttttattggatgagcccagctctgggatggatccctgctctaagcggtacctgtggcaaacaataatgaaggaggttcgggaaggctgtgctgcggtgctgacctcccacagcatggaggagtgtgaggctctttgcacaagactggccataatggttaacggcagcttcaaatgtcttggttctcctcagcacatcaaaaataggtttggtgatggttatacagtcaaagtttggctctgtaaggaagcaaatcaacattgcactgtttctgaccacttgaagctttattttccaggaattcagttcaagggacagcacctgaatttattagaatatcatgtgccaaaaagatggggatgcctagctgacttgttcaaagttatagagaacaataaaaccttcttgaatattaagcattattccattaaccaaaccactttggagcaggtatttattaattttgcttctgagcagcagcaaactctacaatctactcttgatccatccactgacagtcaccacacacatcacttgcccatctgagcactaaagaagtttccataaggaataaaaccttgtcttccattacaattaacagtcaaggataaaacaagcacgcgcacaatcaaggagctggaacacactctccaggccgtcaaattattctcttgttcattttctattttgaatctccttgttagttaataaccaccaaatggaaaggtcattctttctgcagacttttggggagctcctccaaaacatttgttctctttaccatgccagatggacaccagcttctttgtgacaaaggcatgaatgatttgacagtgtccaaactgagacattctggagctggaaagcctgtcacactagagtgtgtgtgacatgtccactctaaacatgtcacttttctgttaagaaaactgagccccctccccacaggttaaaaaactttagtaacttgtttgtatagaaaatagtaacaaggactattttctattgttgtcatctatttactagatacatgtttttaatgattttaatgtaagcttttattaatactgatgacattatatggtatgatatgaaaaaatcaccaattttttacatataaaagatacctttttaaaaaaataggttttaagagctcttttagtatacactttagcaaaattaattaaattgaactagttactctgtatcaattacagtagttctaccagaatctcccaggttataatttatgagggtagagaaataaaatgtagatgcattttctttttcttcatttggatgaataattactgttttttgttattctaagtcagtgtttttcaaagcgtagtggtccccatattagctgcattgccatcttctgggagcttgcaagaaatgtacattctcaggatccactccagacctattgaatctcaaattctggggcttaaacaagcacattccaagttaagaaccaatgacctaagggaatgtctggttacctcctagttatacaagcaaaatctgcatagtatgtagtcttttttatttatttattttttttttttgaggcggagtctcgctctgtcacccaggctggagtgcagtggcgcgatgtcggctcactgcaagctccgcctcctgggttcacgccattctcctgcctcagcctccccagcagctgggactacaggcacacatcgccacacccggctaatttttagtatttttagtagagacggggtttcaccgtgttagccaggatggtctctatctcctgaccttgtgatccgcccccctccacctcccaaagtgctgggattacaggcgtgagccaccgtgtccggccgtagtttattttaaaatatatttttaaaagctttgtaaaaattatgtcattctcagaattgttgtcttcaaagcattgtcagatgtagagtgctcagatgtggctcttaaagactatatacatctgaatttttcatcctatagttagtaagatgcataaaatcaatccactactgaaatagtttccagtcagacatttctgagttcagacatttctcaacattcttttaacaacatttttctgaatcctcaatagaaaatcacattaatcttattttaaaatttggcctttttcaacactaacgttgagtaccggtagcttgtgatcaaaggcatatacttccttatgagatttctttactaaagcaagatttcattaaatctctatttcctaaatatcattctatacaaaagatattttttaaacggtaaggattaagacaatcactgatagctttgttgtgagcaattttgattcccatgtatcacatgaattacacttccttaaataaattacagtttatggctgtatgatttattctctaattctaacatagtctagttgtcaaaaggaaatatgtaatctttttatgattgttgaatcaataaataccaatttgtgaaacatgaatgtgtttaaactgcagtgaataaatgagatgtgctttaatttaacccaaaaaaaaaaaaaaaaaaaaaaa

SEQ ID NO: 13575 - DNA, 4663 bp, Homo sapiens
ggtaaggctctggaaaagggggcgctgggagcgcattgcgagggggctggagagggagagaggagcggaagctgagggtgtgaaacggctggccccgaacacacctcgcggcgctccagtgattcctggtgtccgacctcagccccagtcagtgcgggtccagtttccaggctctcgcggaaggcctggctgagcacatgcggcagccacggtcgccctccctattcctcttagcccgaggaggggggtcccaagttacatggccacgcagatggggcctctccctcatttctgaaccttgtggggaggggaaccttgaagggagcgccccccagagccatggcttagggcctcccccacccctctggagctccagtctgcaagagtcaggagccgaaatatcgctgactgtgggtgacgactcttgcgcgcacacacacatacaagcgggcacgacgcgttcggtcctattaaaaggcacgcaagggtgcggctgcacgcggtgacacggacccctctaacgtttccaaactgagctccctgcaggtccccgacagcacaggcccctgtcccaggacccctccaggcacgcgctcacacgcacacgcgcgctccccggctcacgcgcgctccgacacacacgctcacgcgaacgcaggcgcacgctctggcgcgggaggcgccccttcgcctccgtgttgggaagcgggggcggcgggaggggcaggagacgttggccccgctcgcgtttctgcagctgctgcagtcgccgcagcgtccggaccggaaccagcgccgtccgcggagccgccgccgccgccgccgggccctttccaagccgggcgctcggagctgtgcccggccccgcttcagcaccgcggacagcgccggccgcgtggggctgagccgagcccccgcgcacgcttcagcgccccttccctcggccgacgtcccgggaccgccgctccgggggagacgtggcgtccgcagcccgcggggccgggcgagcgcaggacggcccggaagccccgcgggggatgcgccgagggccccgcgttcgcgccgcgcagagccaggcccgcggcccgagcccatgagcaccatgcgcctgctgacgctcgccctgctgttctcctgctccgtcgcccgtgccgcgtgcgaccccaagatcgtcaacattggcgcggtgctgagcacgcggaagcacgagcagatgttccgcgaggccgtgaaccaggccaacaagcggcacggctcctggaagattcagctcaatgccacctccgtcacgcacaagcccaacgccatccagatggctctgtcggtgtgcgaggacctcatctccagccaggtctacgccatcctagttagccatccacctacccccaacgaccacttcactcccacccctgtctcctacacagccggcttctaccgcatacccgtgctggggctgaccacccgcatgtccatctactcggacaagagcatccacctgagcttcctgcgcaccgtgccgccctactcccaccagtccagcgtgtggtttgagatgatgcgtgtctacagctggaaccacatcatcctgctggtcagcgacgaccacgagggccgggcggctcagaaacgcctggagacgctgctggaggagcgtgagtccaaggcagagaaggtgctgcagtttgacccagggaccaagaacgtgacggccctgctgatggaggcgaaagagctggaggcccgggtcatcatcctttctgccagcgaggacgatgctgccactgtataccgcgcagccgcgatgctgaacatgacgggctccgggtacgtgtggctggtcggcgagcgcgagatctcggggaacgccctgcgctacgccccagacggcatcctcgggctgcagctcatcaacggcaagaacgagtcggcccacatcagcgacgccgtgggcgtggtggcccaggccgtgcacgagctcctcgagaaggagaacatcaccgacccgccgcggggctgcgtgggcaacaccaacatctggaagaccgggccgctcttcaagagagtgctgatgtcttccaagtatgcggatggggtgactggtcgcgtggagttcaatgaggatggggaccggaagttcgccaactacagcatcatgaacctgcagaaccgcaagctggtgcaagtgggcatctacaatggcacccacgtcatccctaatgacaggaagatcatctggccaggcggagagacagagaagcctcgagggtaccagatgtccaccagactgaagattgtgacgatccaccaggagcccttcgtgtacgtcaagcccacgctgagtgatgggacatgcaaggaggagttcacagtcaacggcgacccagtcaagaaggtgatctgcaccgggcccaacgacacgtcgccgggcagcccccgccacacggtgcctcagtgttgctacggcttttgcatcgacctgctcatcaagctggcacggaccatgaacttcacctacgaggtgcacctggtggcagatggcaagttcggcacacaggagcgggtgaacaacagcaacaagaaggagtggaatgggatgatgggcgagctgctcagcgggcaggcagacatgatcgtggcgccgctaaccataaacaacgagcgcgcgcagtacatcgagttttccaagcccttcaagtaccagggcctgactattctggtcaagaaggagattccccggagcacgctggactcgttcatgcagccgttccagagcacactgtggctgctggtggggctgtcggtgcacgtggtggccgtgatgctgtacctgctggaccgcttcagccccttcggccggttcaaggtgaacagcgaggaggaggaggaggacgcactgaccctgtcctcggccatgtggttctcctggggcgtcctgctcaactccggcatcggggaaggcgcccccagaagcttctcagcgcgcatcctgggcatggtgtgggccggctttgccatgatcatcgtggcctcctacaccgccaacctggcggccttcctggtgctggaccggccggaggagcgcatcacgggcatcaacgaccctcggctgaggaacccctcggacaagtttatctacgccacggtgaagcagagctccgtggatatctacttccggcgccaggtggagctgagcaccatgtaccggcatatggagaagcacaactacgagagtgcggcggaggccatccaggccgtgagagacaacaagctgcatgccttcatctgggactcggcggtgctggagttcgaggcctcgcagaagtgcgacctggtgacgactggagagctgtttttccgctcgggcttcggcataggcatgcgcaaagacagcccctggaagcagaacgtctccctgtccatcctcaagtcccacgagaatggcttcatggaagacctggacaagacgtgggttcggtatcaggaatgtgactcgcgcagcaacgcccctgcgacccttacttttgagaacatggccggggtcttcatgctggtagctgggggcatcgtggccgggatcttcctgattttcatcgagattgcctacaagcggcacaaggatgctcgccggaagcagatgcagctggcctttgccgccgttaacgtgtggcggaagaacctgcagcagtaccatcccactgatatcacgggcccgctcaacctctcagatccctcggtcagcaccgtggtgtgaggcccccggaggcgcccacctgcccagttagcccggccaaggacactgatgggtcctgctgctcgggaaggcctgagggaagcccacccgccccagagactgcccaccctgggcctcccgtccgtccgcccgcccaccccgctgcctggcgggcagcccctgctggaccaaggtgcggaccggagcggctgaggacggggcagagctgagtcggctgggcagggcgcagggcgctccggcagaggcagggccctggggtctctgagcagtggggagcgggggctaactggccccaggcgaaggggcttggagcagagacggcagccccatccttcccgcagcaccagcctgagccacagtggggcccatggccccagctggctgggtcgcccctcctcgggcgcctgcgctcctctgcagcctgagctccaccctcccctcttcttgcggcaccgcccacccacaccccgtctgccccttgaccccacacgccggggctggccctgccctcccccacggccgtccctgacttcccagctggcagcgcctcccgccgcctcgggccgcctcctccagactcgagagggctgagcccctcctctcctcgtccggcctgcagcccagaacgggcctccccgggggtccccggacgctggctcgggactgtcttcaaccctgccctgcaccttgggcacgggagagcgccacccgcccgcccccgccctcgctccgggtgcgtgaccggcccgccaccttgtacagaaccagcactcccagggcccgagcgcgtgccttccccgtgcggcccgtgcgcagccgcgctctgcccctccgtccccagggtgcaggcgcgcaccgcccaacccccacctcccggtgtatgcagtggtgatgcctaaaggaatgtcacgc

SEQ ID NO: 13576 - DNA, 5025 bp, Homo sapiens
ggtaaggctctggaaaagggggcgctgggagcgcattgcgagggggctggagagggagagaggagcggaagctgagggtgtgaaacggctggccccgaacacacctcgcggcgctccagtgattcctggtgtccgacctcagccccagtcagtgcgggtccagtttccaggctctcgcggaaggcctggctgagcacatgcggcagccacggtcgccctccctattcctcttagcccgaggaggggggtcccaagttacatggccacgcagatggggcctctccctcatttctgaaccttgtggggaggggaaccttgaagggagcgccccccagagccatggcttagggcctcccccacccctctggagctccagtctgcaagagtcaggagccgaaatatcgctgactgtgggtgacgactcttgcgcgcacacacacatacaagcgggcacgacgcgttcggtcctattaaaaggcacgcaagggtgcggctgcacgcggtgacacggacccctctaacgtttccaaactgagctccctgcaggtccccgacagcacaggcccctgtcccaggacccctccaggcacgcgctcacacgcacacgcgcgctccccggctcacgcgcgctccgacacacacgctcacgcgaacgcaggcgcacgctctggcgcgggaggcgccccttcgcctccgtgttgggaagcgggggcggcgggaggggcaggagacgttggccccgctcgcgtttctgcagctgctgcagtcgccgcagcgtccggaccggaaccagcgccgtccgcggagccgccgccgccgccgccgggccctttccaagccgggcgctcggagctgtgcccggccccgcttcagcaccgcggacagcgccggccgcgtggggctgagccgagcccccgcgcacgcttcagcgccccttccctcggccgacgtcccgggaccgccgctccgggggagacgtggcgtccgcagcccgcggggccgggcgagcgcaggacggcccggaagccccgcgggggatgcgccgagggccccgcgttcgcgccgcgcagagccaggcccgcggcccgagcccatgagcaccatgcgcctgctgacgctcgccctgctgttctcctgctccgtcgcccgtgccgcgtgcgaccccaagatcgtcaacattggcgcggtgctgagcacgcggaagcacgagcagatgttccgcgaggccgtgaaccaggccaacaagcggcacggctcctggaagattcagctcaatgccacctccgtcacgcacaagcccaacgccatccagatggctctgtcggtgtgcgaggacctcatctccagccaggtctacgccatcctagttagccatccacctacccccaacgaccacttcactcccacccctgtctcctacacagccggcttctaccgcatacccgtgctggggctgaccacccgcatgtccatctactcggacaagagcatccacctgagcttcctgcgcaccgtgccgccctactcccaccagtccagcgtgtggtttgagatgatgcgtgtctacagctggaaccacatcatcctgctggtcagcgacgaccacgagggccgggcggctcagaaacgcctggagacgctgctggaggagcgtgagtccaaggcagagaaggtgctgcagtttgacccagggaccaagaacgtgacggccctgctgatggaggcgaaagagctggaggcccgggtcatcatcctttctgccagcgaggacgatgctgccactgtataccgcgcagccgcgatgctgaacatgacgggctccgggtacgtgtggctggtcggcgagcgcgagatctcggggaacgccctgcgctacgccccagacggcatcctcgggctgcagctcatcaacggcaagaacgagtcggcccacatcagcgacgccgtgggcgtggtggcccaggccgtgcacgagctcctcgagaaggagaacatcaccgacccgccgcggggctgcgtgggcaacaccaacatctggaagaccgggccgctcttcaagagagtgctgatgtcttccaagtatgcggatggggtgactggtcgcgtggagttcaatgaggatggggaccggaagttcgccaactacagcatcatgaacctgcagaaccgcaagctggtgcaagtgggcatctacaatggcacccacgtcatccctaatgacaggaagatcatctggccaggcggagagacagagaagcctcgagggtaccagatgtccaccagactgaagattgtgacgatccaccaggagcccttcgtgtacgtcaagcccacgctgagtgatgggacatgcaaggaggagttcacagtcaacggcgacccagtcaagaaggtgatctgcaccgggcccaacgacacgtcgccgggcagcccccgccacacggtgcctcagtgttgctacggcttttgcatcgacctgctcatcaagctggcacggaccatgaacttcacctacgaggtgcacctggtggcagatggcaagttcggcacacaggagcgggtgaacaacagcaacaagaaggagtggaatgggatgatgggcgagctgctcagcgggcaggcagacatgatcgtggcgccgctaaccataaacaacgagcgcgcgcagtacatcgagttttccaagcccttcaagtaccagggcctgactattctggtcaagaaggagattccccggagcacgctggactcgttcatgcagccgttccagagcacactgtggctgctggtggggctgtcggtgcacgtggtggccgtgatgctgtacctgctggaccgcttcagccccttcggccggttcaaggtgaacagcgaggaggaggaggaggacgcactgaccctgtcctcggccatgtggttctcctggggcgtcctgctcaactccggcatcggggaaggcgcccccagaagcttctcagcgcgcatcctgggcatggtgtgggccggctttgccatgatcatcgtggcctcctacaccgccaacctggcggccttcctggtgctggaccggccggaggagcgcatcacgggcatcaacgaccctcggctgaggaacccctcggacaagtttatctacgccacggtgaagcagagctccgtggatatctacttccggcgccaggtggagctgagcaccatgtaccggcatatggagaagcacaactacgagagtgcggcggaggccatccaggccgtgagagacaacaagctgcatgccttcatctgggactcggcggtgctggagttcgaggcctcgcagaagtgcgacctggtgacgactggagagctgtttttccgctcgggcttcggcataggcatgcgcaaagacagcccctggaagcagaacgtctccctgtccatcctcaagtcccacgagaatggcttcatggaagacctggacaagacgtgggttcggtatcaggaatgtgactcgcgcagcaacgcccctgcgacccttacttttgagaacatggccggggtcttcatgctggtagctgggggcatcgtggccgggatcttcctgattttcatcgagattgcctacaagcggcacaaggatgctcgccggaagcagatgcagctggcctttgccgccgttaacgtgtggcggaagaacctgcagagcaccgggggtggacgcggcgctttgcaaaaccaaaaagacacagtgctgccgcgacgcgctattgagagggaggagggccagctgcagctgtgttcccgtcatagggagagctgagactccccgcccgccctcctctgccccctcccccgcagacagacagacagacggatgggacagcggcccggcccacgcagagccccggagcaccacggggtcgggggaggagcacccccagcctcccccaggctgcgcctgcccgcccgccggttggccggctggccggtccaccccgtcccggccccgcgcgtgcccccagcgtggggctaacgggcgccttgtctgtgtatttctattttgcagcagtaccatcccactgatatcacgggcccgctcaacctctcagatccctcggtcagcaccgtggtgtgaggcccccggaggcgcccacctgcccagttagcccggccaaggacactgatgggtcctgctgctcgggaaggcctgagggaagcccacccgccccagagactgcccaccctgggcctcccgtccgtccgcccgcccaccccgctgcctggcgggcagcccctgctggaccaaggtgcggaccggagcggctgaggacggggcagagctgagtcggctgggcagggcgcagggcgctccggcagaggcagggccctggggtctctgagcagtggggagcgggggctaactggccccaggcggaggggcttggagcagagacggcagccccatccttcccgcagcaccagcctgagccacagtggggcccatggccccagctggctgggtcgcccctcctcgggcgcctgcgctcctctgcagcctgagctccaccctcccctcttcttgcggcaccgcccacccacaccccgtctgccccttgaccccacacgccggggctggccctgccctcccccacggccgtccctgacttcccagctggcagcgcctcccgccgcctcgggccgcctcctccagactcgagagggctgagcccctcctctcctcgtccggcctgcagcccagaacgggcctccccgggggtccccggacgctggctcgggactgtcttcaaccctgccctgcaccttgggcacgggagagcgccacccgcccgcccccgccctcgctccgggtgcgtgaccggcccgccaccttgtacagaaccagcactcccagggcccgagcgcgtgccttccccgtgcggcccgtgcgcagccgcgctctgcccctccgtccccagggtgcaggcgcgcaccgcccaacccccacctcccggtgtatgcagtggtgatgcctaaaggaatgtcacg

SEQ ID NO: 13577 - DNA, 5137 bp, Homo sapiens
ggtaaggctctggaaaagggggcgctgggagcgcattgcgagggggctggagagggagagaggagcggaagctgagggtgtgaaacggctggccccgaacacacctcgcggcgctccagtgattcctggtgtccgacctcagccccagtcagtgcgggtccagtttccaggctctcgcggaaggcctggctgagcacatgcggcagccacggtcgccctccctattcctcttagcccgaggaggggggtcccaagttacatggccacgcagatggggcctctccctcatttctgaaccttgtggggaggggaaccttgaagggagcgccccccagagccatggcttagggcctcccccacccctctggagctccagtctgcaagagtcaggagccgaaatatcgctgactgtgggtgacgactcttgcgcgcacacacacatacaagcgggcacgacgcgttcggtcctattaaaaggcacgcaagggtgcggctgcacgcggtgacacggacccctctaacgtttccaaactgagctccctgcaggtccccgacagcacaggcccctgtcccaggacccctccaggcacgcgctcacacgcacacgcgcgctccccggctcacgcgcgctccgacacacacgctcacgcgaacgcaggcgcacgctctggcgcgggaggcgccccttcgcctccgtgttgggaagcgggggcggcgggaggggcaggagacgttggccccgctcgcgtttctgcagctgctgcagtcgccgcagcgtccggaccggaaccagcgccgtccgcggagccgccgccgccgccgccgggccctttccaagccgggcgctcggagctgtgcccggccccgcttcagcaccgcggacagcgccggccgcgtggggctgagccgagcccccgcgcacgcttcagcgccccttccctcggccgacgtcccgggaccgccgctccgggggagacgtggcgtccgcagcccgcggggccgggcgagcgcaggacggcccggaagccccgcgggggatgcgccgagggccccgcgttcgcgccgcgcagagccaggcccgcggcccgagcccatgagcaccatgcgcctgctgacgctcgccctgctgttctcctgctccgtcgcccgtgccgcgtgcgaccccaagatcgtcaacattggcgcggtgctgagcacgcggaagcacgagcagatgttccgcgaggccgtgaaccaggccaacaagcggcacggctcctggaagattcagctcaatgccacctccgtcacgcacaagcccaacgccatccagatggctctgtcggtgtgcgaggacctcatctccagccaggtctacgccatcctagttagccatccacctacccccaacgaccacttcactcccacccctgtctcctacacagccggcttctaccgcatacccgtgctggggctgaccacccgcatgtccatctactcggacaagagcatccacctgagcttcctgcgcaccgtgccgccctactcccaccagtccagcgtgtggtttgagatgatgcgtgtctacagctggaaccacatcatcctgctggtcagcgacgaccacgagggccgggcggctcagaaacgcctggagacgctgctggaggagcgtgagtccaaggcagagaaggtgctgcagtttgacccagggaccaagaacgtgacggccctgctgatggaggcgaaagagctggaggcccgggtcatcatcctttctgccagcgaggacgatgctgccactgtataccgcgcagccgcgatgctgaacatgacgggctccgggtacgtgtggctggtcggcgagcgcgagatctcggggaacgccctgcgctacgccccagacggcatcctcgggctgcagctcatcaacggcaagaacgagtcggcccacatcagcgacgccgtgggcgtggtggcccaggccgtgcacgagctcctcgagaaggagaacatcaccgacccgccgcggggctgcgtgggcaacaccaacatctggaagaccgggccgctcttcaagagagtgctgatgtcttccaagtatgcggatggggtgactggtcgcgtggagttcaatgaggatggggaccggaagttcgccaactacagcatcatgaacctgcagaaccgcaagctggtgcaagtgggcatctacaatggcacccacgtcatccctaatgacaggaagatcatctggccaggcggagagacagagaagcctcgagggtaccagatgtccaccagactgaagattgtgacgatccaccaggagcccttcgtgtacgtcaagcccacgctgagtgatgggacatgcaaggaggagttcacagtcaacggcgacccagtcaagaaggtgatctgcaccgggcccaacgacacgtcgccgggcagcccccgccacacggtgcctcagtgttgctacggcttttgcatcgacctgctcatcaagctggcacggaccatgaacttcacctacgaggtgcacctggtggcagatggcaagttcggcacacaggagcgggtgaacaacagcaacaagaaggagtggaatgggatgatgggcgagctgctcagcgggcaggcagacatgatcgtggcgccgctaaccataaacaacgagcgcgcgcagtacatcgagttttccaagcccttcaagtaccagggcctgactattctggtcaagaaggagattccccggagcacgctggactcgttcatgcagccgttccagagcacactgtggctgctggtggggctgtcggtgcacgtggtggccgtgatgctgtacctgctggaccgcttcagccccttcggccggttcaaggtgaacagcgaggaggaggaggaggacgcactgaccctgtcctcggccatgtggttctcctggggcgtcctgctcaactccggcatcggggaaggcgcccccagaagcttctcagcgcgcatcctgggcatggtgtgggccggctttgccatgatcatcgtggcctcctacaccgccaacctggcggccttcctggtgctggaccggccggaggagcgcatcacgggcatcaacgaccctcggctgaggaacccctcggacaagtttatctacgccacggtgaagcagagctccgtggatatctacttccggcgccaggtggagctgagcaccatgtaccggcatatggagaagcacaactacgagagtgcggcggaggccatccaggccgtgagagacaacaagctgcatgccttcatctgggactcggcggtgctggagttcgaggcctcgcagaagtgcgacctggtgacgactggagagctgtttttccgctcgggcttcggcataggcatgcgcaaagacagcccctggaagcagaacgtctccctgtccatcctcaagtcccacgagaatggcttcatggaagacctggacaagacgtgggttcggtatcaggaatgtgactcgcgcagcaacgcccctgcgacccttacttttgagaacatggccggggtcttcatgctggtagctgggggcatcgtggccgggatcttcctgattttcatcgagattgcctacaagcggcacaaggatgctcgccggaagcagatgcagctggcctttgccgccgttaacgtgtggcggaagaacctgcaggatagaaagagtggtagagcagagcctgaccctaaaaagaaagccacatttagggctatcacctccaccctggcttccagcttcaagaggcgtaggtcctccaaagacacgagcaccgggggtggacgcggcgctttgcaaaaccaaaaagacacagtgctgccgcgacgcgctattgagagggaggagggccagctgcagctgtgttcccgtcatagggagagctgagactccccgcccgccctcctctgccccctcccccgcagacagacagacagacggatgggacagcggcccggcccacgcagagccccggagcaccacggggtcgggggaggagcacccccagcctcccccaggctgcgcctgcccgcccgccggttggccggctggccggtccaccccgtcccggccccgcgcgtgcccccagcgtggggctaacgggcgccttgtctgtgtatttctattttgcagcagtaccatcccactgatatcacgggcccgctcaacctctcagatccctcggtcagcaccgtggtgtgaggcccccggaggcgcccacctgcccagttagcccggccaaggacactgatgggtcctgctgctcgggaaggcctgagggaagcccacccgccccagagactgcccaccctgggcctcccgtccgtccgcccgcccaccccgctgcctggcgggcagcccctgctggaccaaggtgcggaccggagcggctgaggacggggcagagctgagtcggctgggcagggcgcagggcgctccggcagaggcagggccctggggtctctgagcagtggggagcgggggctaactggccccaggcggaggggcttggagcagagacggcagccccatccttcccgcagcaccagcctgagccacagtggggcccatggccccagctggctgggtcgcccctcctcgggcgcctgcgctcctctgcagcctgagctccaccctcccctcttcttgcggcaccgcccacccacaccccgtctgccccttgaccccacacgccggggctggccctgccctcccccacggccgtccctgacttcccagctggcagcgcctcccgccgcctcgggccgcctcctccagactcgagagggctgagcccctcctctcctcgtccggcctgcagcccagaacgggcctccccgggggtccccggacgctggctcgggactgtcttcaaccctgccctgcaccttgggcacgggagagcgccacccgcccgcccccgccctcgctccgggtgcgtgaccggcccgccaccttgtacagaaccagcactcccagggcccgagcgcgtgccttccccgtgcggcccgtgcgcagccgcgctctgcccctccgtccccagggtgcaggcgcgcaccgcccaacccccacctcccggtgtatgcagtggtgatgcctaaaggaatgtcacgc

SEQ ID NO: 13578 - DNA, 4802 bp, Homo sapiens
tgggaaataaagtcatttgtatgtttttctctcttgcacagcctaaaatgaccaatgtgtgatttcagtggaataaatggcgcccaaagtcacagatgctatagtctggtatcaaaagaaggagtttctctctgtggccaccaccgccccaggcccacagcaagtactgcctggctactgccagtgttcactcaaggaccaagggctcttcattcagtgtttgattggagcatatgatcaacaaatatgggaaaaatctgttgaacagagagaaatcaagtttattaaactggggctaaggaataaaccaaagaaaacagcacatgtgaaaccagacctcatagatgttgatcttgtaagagggtctgcatttgcaaaggcaaagcctgaaagtccttggacttctctgaccagaaagggaattgttcgagttgtatttttcccctttttcttccggtggtggttacaagtaacatcaaaggtcatctttttctggcttcttgtcctttatcttcttcaagttgctgcaatagtattattctgctccacttctagcccacacagcatacctctgacagaggtgattgggccgatatggctgatgctgctcctgggaactgtgcattgccagattgtttccacaagaacacccaaacctcctctaagtacagggggtaaaagaagaaggaaattaagaaaagcagcccatttggaagtacatagggaaggagatggttctagtaccacagataacacacaagagggagcagttcagaaccacggtacaagcacctctcacagcgttggcactgtcttcagagatctctggcatgctgctttctttttatcaggatcaaagaaagcaaagaattcaattgataaatcaactgaaactgacaatggctatgtatcccttgatgggaagaagactgttaaaagcggtgaagatggaatacaaaaccatgaacctcagtgtgaaactattcgaccagaagagacagcctggaacacaggaacactgaggaatggtcctagcaaagatacccaaaggacaataacaaatgtctctgatgaagtctccagtgaggaaggtcctgaaacaggatactcattacgtcgtcatgtggacaggacttctgaaggtgttcttcggaatagaaagtcacaccattataagaaacattaccctaatgaggacgcccctaaatcgggtactagttgcagctctcgctgttcaagttccagacaggattctgagagtgcaaggccagaatctgaaacagaagatgtgttatgggaagacttgttacattgtgcagaatgccattcatcttgtaccagtgagacagatgtggaaaatcatcagattaatccatgtgtgaaaaaagaatatagagatgacccttttcatcagagtcatttgccctggctccatagttcccacccaggattagaaaaaataagtgctatagtatgggaaggtaatgattgtaagaaagcagacatgtctgtacttgaaatcagtggaatgataatgaacagagtgaacagccatataccaggaataggataccagatttttggaaatgcagtctctctcatactgggtttaactccatttgttttccgactttctcaagctacagacttggaacaactcacagcacattctgcttcagaactttatgtgattgcatttggttctaatgaagatgtcatagttctttctatggttataataagttttgtggttcgcgtgtctcttgtgtggattttcttttttttgctctgtgtagcagaaagaacttataaacagcgattactttttgcaaaactctttggacatttaacatctgcaaggagggctcgaaaatctgaggttcctcatttccggttgaagaaagtacagaatataaaaatgtggctatctctccgttcctatcttaagcgtcgaggtcctcagcgatcagttgatgtaatagtttcatctgctttcttattgactatctcagttgtatttatctgttgtgcccagctacttcatgtacacgagatcttccttgattgtcactacaattgggaattggtaatctggtgcatctcgttaacactttttctcctaagatttgttacccttggatcagaaacaagtaaaaaatatagtaatacctcaatattacttactgaacagataaacctctacttgaagatggagaaaaaacctaacaaaaaggaggaactgacactagtgaataatgttttaaaactggctactaaactgctaaaggagttggacagtccttttagattatatgggcttacaatgaatccgctgctttataacatcacccaggttgttatcctgtcagctgtttctggtgttatcagtgacttgcttggatttaatttaaagctatggaagattaagtcatgacaattcaaagaaaagaagatgtagcctcttttccagaataagagtactgactaagctgcctgaaagcttgtcactgattctttgcttcaggagtctcagctagggagttgaagtgtttacatcagactgtcttgtgcaattcttatatttattttactggttcacttttttttacatttattttagtctttatatttttatttttaagcattgatgtacttagttgttgaaagggtgatgaaactgatatccagatacttgagatcctggtaattggtcataaataattggcaaaataacaaattgtgaaaatagaagccattgctcagcaccgtttctccatcaatgccgtgaacttgccttacttgaggaaaaattctttaactttggaatattgcattgaactcagctatacacataaaacattttctttggtaaatcaagatccagtcagggtttctcttgaattattttggaacaatgccaggatccaaactgattaagttacagtttaagcacccttcagtattaatatatacggtattatataacaggtcaacaagtgctctttgatgttaaaacttgtaatagagcaataattgtaaatggttaccatactgtaagatattttgataaaaattaactagtagtacttgtatttatttgaaacactgggctgtttgcacagctccaactgtgcatgctcaaaatgtgcactttttaaaattgttacttttaatgcgtatctttatatgggatctgttatagtatactagggcatgatatggtatccttttgagtgaggtatatactcatctcacaagtgaagtgcctactgatattactaaagtacattatgtttactcaagtaaataattttctccccatggtacactctagtgtaggctattcataccacactgaaatgaacaactgaagaataaggctaagaaccaataaaatatttctctaattgctagttgtaaaactgtatccaaattttcagaaaagacagcttcagcttgcaaattctatcctctaaacttatctggtgcattctccccaccccacccccattatataagggctattttagatgcttttaacctccccaacaaataatttgccaagtgtccaatgagaacttatcatgttggtgtgttaggtaaatcgggcaaatatgatagtgtcttacattgggccttgattttaagttgttatatttgtacaatcgagtattttagaaattacatgaaacatgaaacagtttttgcaatttttttttaaactgggcatctggtttctaaaaatttatttgaaacaatctagaattttcttggtgcaaagtgtatcatgtggaatatcctcatatttttaccatattttaagaactttaagacgattaattgtaaataatttatttgattggtgcagttctaatccctaaatcataatcttaaaatcaggaatgtgtggagaacagagccatgtcatatcactttgctcttaccattccttttgatcagcctcaattcagcctcattgtgtagtatgttttttctttctatgaaaaacaacagaaagcatttcattttatttgcctatgttcaaatatgtttaataatgaccaaagtgcattctgagttttttcaaggaatgtaatactggagctttaagaacatacttagtttctcatgtgaaaacttaggctttgtctgatgtttttccttcctctattgtctaatgttgaggttgtttttaggaattatgttttataaactttttcaatataaggtacatgcctatacagaacttaacattttgcacagaatatatcaaatatattttgagaaaaaaagtacggcatgagttctgttaggaataaaagatgaaactattgtatctcacaaaaaatcttatttcagaatggaaatatttttgagaaaagtagctgagcatactggtttaagaaaatgcttgttttagattgaggttaacttagagttgggagttgatttattaagtacagtatacctctcaacagtttataaataatatgttgaattatgtcagtgtgggcagcagtagaatactaaaaggaaaatgtcatgttaagcaatttcagaacattaactgaactattttcaaagcagaaaaattgacattgctgcctttaagaataccatgaatgtaagaaattgaaagaaattgtaaaatatcacataatatagaaatggcagttcaaagagaattgtggcagatgttgtgtgtgaactgttgtttctttgccacatgtgttgtatttgaaagttttacagtaagtttaaaataaaacattctgtgaccaaaaaaaaaaaaaaaaaaaaaa

SEQ ID NO: 13579 - DNA, 2575 bp, Homo sapiens
ggaggaggaagcaagcgagggggctggttcctgagcttcgcaattcctgtgtcgccttctgggctcccagcctgccgggtcgcatgatccctccggccggagctggtttttttgccagccaccgcgaggccggctgagttaccggcatccccgcagccacctcctctcccgacctgtgatacaaaagatcttccgggggctgcacctgcctgcctttgcctaaggcggatttgaatctctttctctcccttcagaatcttatcttggctttggatcttagaagagaatcactaaccagagacgagactcagtgagtgagcaggtgttttggacaatggactggttgagcccatccctattataaaaatgtctcagagcaaccgggagctggtggttgactttctctcctacaagctttcccagaaaggatacagctggagtcagtttagtgatgtggaagagaacaggactgaggccccagaagggactgaatcggagatggagacccccagtgccatcaatggcaacccatcctggcacctggcagacagccccgcggtgaatggagccactggccacagcagcagtttggatgcccgggaggtgatccccatggcagcagtaaagcaagcgctgagggaggcaggcgacgagtttgaactgcggtaccggcgggcattcagtgacctgacatcccagctccacatcaccccagggacagcatatcagagctttgaacaggtagtgaatgaactcttccgggatggggtaaactggggtcgcattgtggcctttttctccttcggcggggcactgtgcgtggaaagcgtagacaaggagatgcaggtattggtgagtcggatcgcagcttggatggccacttacctgaatgaccacctagagccttggatccaggagaacggcggctgggatacttttgtggaactctatgggaacaatgcagcagccgagagccgaaagggccaggaacgcttcaaccgctggttcctgacgggcatgactgtggccggcgtggttctgctgggctcactcttcagtcggaaatgaccagacactgaccatccactctaccctcccacccccttctctgctccaccacatcctccgtccagccgccattgccaccaggagaaccactacatgcagcccatgcccacctgcccatcacagggttgggcccagatctggtcccttgcagctagttttctagaatttatcacacttctgtgagacccccacacctcagttcccttggcctcagaattcacaaaatttccacaaaatctgtccaaaggaggctggcaggtatggaagggtttgtggctgggggcaggagggccctacctgattggtgcaacccttaccccttagcctccctgaaaatgtttttctgccagggagcttgaaagttttcagaacctcttccccagaaaggagactagattgcctttgttttgatgtttgtggcctcagaattgatcattttccccccactctccccacactaacctgggttccctttccttccatccctaccccctaagagccatttaggggccacttttgactagggattcaggctgcttgggataaagatgcaaggaccaggactccctcctcacctctggactggctagagtcctcactcccagtccaaatgtcctccagaagcctctggctagaggccagccccacccaggagggagggggctatagctacaggaagcaccccatgccaaagctagggtggcccttgcagttcagcaccaccctagtcccttcccctccctggctcccatgaccatactgagggaccaactgggcccaagacagatgccccagagctgtttatggcctcagctgcctcacttcctacaagagcagcctgtggcatctttgccttgggctgctcctcatggtgggttcaggggactcagccctgaggtgaaagggagctatcaggaacagctatgggagccccagggtcttccctacctcaggcaggaagggcaggaaggagagcctgctgcatggggtggggtagggctgactagaagggccagtcctgcctggccaggcagatctgtgccccatgcctgtccagcctgggcagccaggctgccaaggccagagtggcctggccaggagctcttcaggcctccctctctcttctgctccacccttggcctgtctcatccccaggggtcccagccaccccgggctctctgctgtacatatttgagactagtttttattccttgtgaagatgatatactatttttgttaagcgtgtctgtatttatgtgtgaggagctgctggcttgcagtgcgcgtgcacgtggagagctggtgcccggagattggacggcctgatgctccctcccctgccctggtccagggaagctggccgagggtcctggctcctgaggggcatctgcccctcccccaacccccaccccacacttgttccagctctttgaaatagtctgtgtgaaggtgaaagtgcagttcagtaataaactgtgtttactcagtgaaaaaaaaaaaaaaaaaa

SEQ ID NO: 13580 - DNA, 2386 bp, Homo sapiens
ggaggaggaagcaagcgagggggctggttcctgagcttcgcaattcctgtgtcgccttctgggctcccagcctgccgggtcgcatgatccctccggccggagctggtttttttgccagccaccgcgaggccggctgagttaccggcatccccgcagccacctcctctcccgacctgtgatacaaaagatcttccgggggctgcacctgcctgcctttgcctaaggcggatttgaatctctttctctcccttcagaatcttatcttggctttggatcttagaagagaatcactaaccagagacgagactcagtgagtgagcaggtgttttggacaatggactggttgagcccatccctattataaaaatgtctcagagcaaccgggagctggtggttgactttctctcctacaagctttcccagaaaggatacagctggagtcagtttagtgatgtggaagagaacaggactgaggccccagaagggactgaatcggagatggagacccccagtgccatcaatggcaacccatcctggcacctggcagacagccccgcggtgaatggagccactggccacagcagcagtttggatgcccgggaggtgatccccatggcagcagtaaagcaagcgctgagggaggcaggcgacgagtttgaactgcggtaccggcgggcattcagtgacctgacatcccagctccacatcaccccagggacagcatatcagagctttgaacaggatacttttgtggaactctatgggaacaatgcagcagccgagagccgaaagggccaggaacgcttcaaccgctggttcctgacgggcatgactgtggccggcgtggttctgctgggctcactcttcagtcggaaatgaccagacactgaccatccactctaccctcccacccccttctctgctccaccacatcctccgtccagccgccattgccaccaggagaaccactacatgcagcccatgcccacctgcccatcacagggttgggcccagatctggtcccttgcagctagttttctagaatttatcacacttctgtgagacccccacacctcagttcccttggcctcagaattcacaaaatttccacaaaatctgtccaaaggaggctggcaggtatggaagggtttgtggctgggggcaggagggccctacctgattggtgcaacccttaccccttagcctccctgaaaatgtttttctgccagggagcttgaaagttttcagaacctcttccccagaaaggagactagattgcctttgttttgatgtttgtggcctcagaattgatcattttccccccactctccccacactaacctgggttccctttccttccatccctaccccctaagagccatttaggggccacttttgactagggattcaggctgcttgggataaagatgcaaggaccaggactccctcctcacctctggactggctagagtcctcactcccagtccaaatgtcctccagaagcctctggctagaggccagccccacccaggagggagggggctatagctacaggaagcaccccatgccaaagctagggtggcccttgcagttcagcaccaccctagtcccttcccctccctggctcccatgaccatactgagggaccaactgggcccaagacagatgccccagagctgtttatggcctcagctgcctcacttcctacaagagcagcctgtggcatctttgccttgggctgctcctcatggtgggttcaggggactcagccctgaggtgaaagggagctatcaggaacagctatgggagccccagggtcttccctacctcaggcaggaagggcaggaaggagagcctgctgcatggggtggggtagggctgactagaagggccagtcctgcctggccaggcagatctgtgccccatgcctgtccagcctgggcagccaggctgccaaggccagagtggcctggccaggagctcttcaggcctccctctctcttctgctccacccttggcctgtctcatccccaggggtcccagccaccccgggctctctgctgtacatatttgagactagtttttattccttgtgaagatgatatactatttttgttaagcgtgtctgtatttatgtgtgaggagctgctggcttgcagtgcgcgtgcacgtggagagctggtgcccggagattggacggcctgatgctccctcccctgccctggtccagggaagctggccgagggtcctggctcctgaggggcatctgcccctcccccaacccccaccccacacttgttccagctctttgaaatagtctgtgtgaaggtgaaagtgcagttcagtaataaactgtgtttactcagtgaaaaaaaaaaaaaaaaaa

SEQ ID NO: 13581 - DNA, 1682 bp, Homo sapiens
ggaatggctgaaaaagcccacacctggaaatcactccctccctgctcctccacggcaggttgcatctgcgagacgcttcggtcattagaggaatgagccgggagtgagcaattcaccagctctccagcacttggtggaaagcagcaggcaaggatggatgtggttgacagccttcttgtgaatggaagcaacatcactcctccctgtgaactcgggctcgaaaatgagacgcttttctgcttggatcagccccgtccttccaaagagtggcagccagcggtgcagattctcttgtactccttgatattcctgctcagcgtgctgggaaacacgctggtcatcaccgtgctgattcggaacaagcggatgcggacggtcaccaacatcttcctcctctccctggctgtcagcgacctcatgctctgtctcttctgcatgccgttcaacctcatccccaatctgctcaaggatttcatcttcgggagcgccgtttgcaagaccaccacctacttcatgggcacctctgtgagtgtatctacctttaatctggtagccatatctctagagagatatggtgcgatttgcaaacccttacagtcccgggtctggcagacaaaatcccatgctttgaaggtgattgctgctacctggtgcctttcctttaccatcatgactccgtaccccatttatagcaacttggtgccttttaccaaaaataacaaccagaccgcgaatatgtgccgctttctactgccaaatgatgttatgcagcagtcctggcacacattcctgttactcatcctctttcttattcctggaattgtgatgatggtggcatatggattaatctctttggaactctaccagggaataaaatttgaggctagccagaagaagtctgctaaagaaaggaaacctagcaccaccagcagcggcaaatatgaggacagcgatgggtgttacctgcaaaagaccaggcccccgaggaagctggagctccggcagctgtccaccggcagcagcagcagggccaaccgcatccggagtaacagctccgcagccaacctgatggccaagaaaagggtgatccgcatgctcatcgtcatcgtggtcctcttcttcctgtgctggatgcccatcttcagcgccaacgcctggcgggcctacgacaccgcctccgcagagcgccgcctctcaggaacccccatttccttcatcctcctcctgtcctacacctcctcctgcgtcaaccccatcatctactgcttcatgaacaaacgcttccgcctcggcttcatggccaccttcccctgctgccccaatcctggtcccccaggggcgaggggagaggtgggggaggaggaggaaggcgggaccacaggagcctctctgtccaggttctcgtacagccatatgagtgcctcggtgccaccccagtgagatgtcccctgaccctccaccgcagaaggaaggcagggaggaggcagagaagaaagaacggaagaagagatcaggaagagaaggagcagagctgatggagaaggaaggctccatctccagtgggaactcttcaaggtctgcttttcatccttcatctggattccagagcactgctccagtggggccatgattggtttctaggcagttcaaagcaggatatgttaagtaacactcaccatcag

SEQ ID NO: 13582 - DNA, 2113 bp, Homo sapiens
ggagttgagaattagggaggaggtggtagagtccgggtagtgagcggagggacaggaagggtagggcaagaaagggagaggggacaggagggaagggtgggccaaagcggtgagaaaggagggccagccagttgggtgggggagagggccgaggcccgggggcaggagtgcagggctctgaggcggggagaggagaggagagaagagccgcggggggcccagcccggagccaggatgcccgcgccgcgcgcccgggagcagccccgcgtgcccggggagcgccagccgctgctgcctcgcggtgcgcggggccctcgacggtggcggcgggcggcgggcgcggccgtgctgctggtggagatgctggagcgcgccgccttcttcggcgtcaccgccaacctcgtgctgtacctcaacagcaccaacttcaactggaccggcgagcaggcgacgcgcgccgcgctggtattcctgggcgcctcctacctgctggcgcccgtgggcggctggctggccgacgtgtacctgggccgctaccgcgcggtcgcgctcagcctgctgctctacctggccgcctcgggcctgctgcccgccaccgccttccccgacggccgcagctccttctgcggagagatgcccgcgtcgccgctgggacctgcctgcccctcggccggctgcccgcgctcctcgcccagcccctactgcgcgcccgtcctctacgcgggcctgctgctactcggcctggccgccagctccgtccggagcaacctcacctccttcggtgccgaccaggtgatggatctcggccgcgacgccacccgccgcttcttcaactggttttactggagcatcaacctgggtgctgtgctgtcgctgctggtggtggcgtttattcagcagaacatcagcttcctgctgggctacagcatccctgtgggctgtgtgggcctggcatttttcatcttcctctttgccacccccgtcttcatcaccaagcccccgatgggcagccaagtgtcctctatgcttaagctcgctctccaaaactgctgcccccagctgtggcaacgacactcggccagagaccgtcaatgtgcccgcgtgctggccgacgagaggtctccccagccaggggcttccccgcaagaggacatcgccaacttccaggtgctggtgaagatcttgcccgtcatggtgaccctggtgccctactggatggtctacttccagatgcagtccacctatgtcctgcagggtcttcacctccacatcccaaacattttcccagccaacccggccaacatctctgtggccctgagagcccagggcagcagctacacgatcccggaagcctggctcctcctggccaatgttgtggtggtgctgattctggtccctctgaaggaccgcttgatcgaccctttactgctgcggtgcaagctgcttccctctgctctgcagaagatggcgctggggatgttctttggttttacctccgtcattgtggcaggagtcctggagatggagcgcttacactacatccaccacaacgagaccgtgtcccagcagattggggaggtcctgtacaacgcggcaccactgtccatctggtggcagatccctcagtacctgctcattgggatcagtgagatctttgccagcatcccaggcctggagtttgcctactcagaggccccgcgctccatgcagggcgccatcatgggcatcttcttctgcctgtcgggggtgggctcactgttgggctccagcctagtggcactgctgtccttgcccgggggctggctgcactgccccaaggactttgggaacatcaacaattgccggatggacctctacttcttcctgctggctggcattcaggccgtcacggctctcctatttgtctggatcgctggacgctatgagagggcgtcccagggcccagcctcccacagccgtttcagcagggacaggggctgaacaggccctattccagcccccttgcttcactctaccggacagacggcagcagtcccagctctggtttccttctcggtttattctgttagaatgaaatggttcccataaataaggggcatgagcccttcctccc

SEQ ID NO: 13583 - DNA, 2725 bp, Homo sapiens
agtaagcactctcccttgtcgtggaggtgggcaaatctttatcagccactgccttctgctgccaggaagccagctagagtggtctttaaagaaaactgggcatctcctgctacttaaaatcaaaaactacctaaaataaagattatagagccagaggaagagatagccatggaggacagccccactatggttagagtggacagccccactatggttaggggtgaaaaccaggtttcgccatgtcaagggagaaggtgcttccccaaagctcttggctatgtcaccggtgacatgaaagaacttgccaaccagcttaaagacaaacccgtggtgctccagttcattgactggattctccggggcatatcccaagtggtgttcgtcaacaaccccgtcagtggaatcctgattctggtaggacttcttgttcagaacccctggtgggctctcactggctggctgggaacagtggtctccactctgatggccctcttgctcagccaggacaggtcattaatagcatctgggctctatggctacaatgccaccctggtgggagtactcatggctgtcttttcggacaagggagactatttctggtggctgttactccctgtatgtgctatgtccatgacttgcccaattttctcaagtgcattgaattccatgctcagcaaatgggacctccccgtcttcaccctccctttcaacatggcgttgtcaatgtacctttcagccacaggacattacaatccgttctttccagccaaactggtcatacctataactacagctccaaatatctcctggtctgacctcagtgccctggagttgttgaaatctataccagtgggagttggtcagatctatggctgtgataatccatggacagggggcattttcctgggagccatcctactctcctccccactcatgtgcctgcatgctgccataggatcattgctgggcatagcagcgggactcagtctttcagccccatttgagaacatctactttggactctggggtttcaacagctctctggcctgcattgcaatgggaggaatgttcatggcgctcacctggcaaacccacctcctggctcttggctgtgccctgttcacggcctatcttggagtcggcatggcaaactttatggctgaggttggattgccagcttgtacctggcccttctgtttggccacgctattgttcctcatcatgaccacaaaaaattccaacatctacaagatgcccctcagtaaagttacttatcctgaagaaaaccgcatcttctacctgcaagccaagaaaagaatggtggaaagccctttgtgagaacaagccccatttgcagccatggtcacgagtcatttctgcctgactgctccagctaacttccagggtctcagcaaactgctgtttttcacgagtatcaactttcatactgacgcgtctgtaatctgttcttatgctcattttgtattttcctttcaactccaggaatatccttgagcatatgagagtcacatccaggtgatgtgctctggtatggaatttgaaaccccaatggggccttggcactaagactggaatgtatataaagtcaaagtgctccaacagaaggaggaagtgaaaacaaactattagtatttattgatattcttggtgtttagctggctcgatgatgttaacagtattaaaaattaaacccccataaacccaacctaagcctatggaatccacagtcacaaaatcgaagttaacccagaatctgtgataagcagcttggctttttttttaaatcaatgcaagtacaccattatagccagaatctgtatcacagaggtgcaagctgacagcagagctcagtccccacttcctgcaaacaatggcctgcaccctatcccttgtgtgtgtgacattctctcatgggacaatgttggggtttttcagactgacaggactgcaagagggagaaaggaattttgtcaatcaaaattattctgtattgcaacttttctcagagattgcaaaggattttttaggtagagattatttttccttatgaaaaatgatctgttttaaatgagataaaataggagaagttcctggcttaacctgttcttacatattaaagaaaagttacttactgtatttatgaaatactcagcttaggcatttttactttaacccctaaattgattttgtaaatgccacaaatgcatagaattgttaccaacctccaaagggctctttaaaatcatatttttttattcatttgaggatgtcttataaagactgaaggcaaaggtcagaatgcttacgggtgttatttttataagttgttgaattccttaatttagaaaagctcattattttttgcacactcacaatattctctctcagaaatcaatggcatttgaaccaccaaaaagaaataaagggctgagtgtggtgctcacgcctgtaatcccagcactttggggagcccaggcgggcagattgcttgaacccaggagttcaagaccagcctgggcagcatggtgaaaccctgtatctacaaaaaatacaaaaattagccaggcatggtggtgggtgcctgtagttccagctacttgggaggctgaggtgggaaaatgacttgagcccaggaggaggaggctgcagtgagctaagattgcaccactgcactccaacctgggtgacaagagtgaaactgaat

SEQ ID NO: 13584 - DNA, 14135 bp, Homo sapiens
gcactgcagcgccagcgtccgagcgggcggccgagctcccggagcggcctggccccgagccccgagcgggcgtcgctcagcagcaggtcgcggccgcagccccatccagccccgcgcccgccatgccgtccgcgggccccgcctgagctgcggcctccgcgcgcgggcgggcctggggacggcggggccatgcgcgcgctgccctaacgatgccgcccgccgcgcccgcccgcctggcgctggccctgggcctgggcctgtggctcggggcgctggcggggggccccgggcgcggctgcgggccctgcgagcccccctgcctctgcggcccagcgcccggcgccgcctgccgcgtcaactgctcgggccgcgggctgcggacgctcggtcccgcgctgcgcatccccgcggacgccacagcgctagacgtctcccacaacctgctccgggcgctggacgttgggctcctggcgaacctctcggcgctggcagagctggatataagcaacaacaagatttctacgttagaagaaggaatatttgctaatttatttaatttaagtgaaataaacctgagtgggaacccgtttgagtgtgactgtggcctggcgtggctgccgcgatgggcggaggagcagcaggtgcgggtggtgcagcccgaggcagccacgtgtgctgggcctggctccctggctggccagcctctgcttggcatccccttgctggacagtggctgtggtgaggagtatgtcgcctgcctccctgacaacagctcaggcaccgtggcagcagtgtccttttcagctgcccacgaaggcctgcttcagccagaggcctgcagcgccttctgcttctccaccggccagggcctcgcagccctctcggagcagggctggtgcctgtgtggggcggcccagccctccagtgcctcctttgcctgcctgtccctctgctccggccccccgccacctcctgcccccacctgtaggggccccaccctcctccagcacgtcttccctgcctccccaggggccaccctggtggggccccacggacctctggcctctggccagctagcagccttccacatcgctgccccgctccctgtcactgccacacgctgggacttcggagacggctccgccgaggtggatgccgctgggccggctgcctcgcatcgctatgtgctgcctgggcgctatcacgtgacggccgtgctggccctgggggccggctcagccctgctggggacagacgtgcaggtggaagcggcacctgccgccctggagctcgtgtgcccgtcctcggtgcagagtgacgagagcctcgacctcagcatccagaaccgcggtggttcaggcctggaggccgcctacagcatcgtggccctgggcgaggagccggcccgagcggtgcacccgctctgcccctcggacacggagatcttccctggcaacgggcactgctaccgcctggtggtggagaaggcggcctggctgcaggcgcaggagcagtgtcaggcctgggccggggccgccctggcaatggtggacagtcccgccgtgcagcgcttcctggtctcccgggtcaccaggtgcctagacgtgtggatcggcttctcgactgtgcagggggtggaggtgggcccagcgccgcagggcgaggccttcagcctggagagctgccagaactggctgcccggggagccacacccagccacagccgagcactgcgtccggctcgggcccaccgggtggtgtaacaccgacctgtgctcagcgccgcacagctacgtctgcgagctgcagcccggaggcccagtgcaggatgccgagaacctcctcgtgggagcgcccagtggggacctgcagggacccctgacgcctctggcacagcaggacggcctctcagccccgcacgagcccgtggaggtcatggtattcccgggcctgcgtctgagccgtgaagccttcctcaccacggccgaatttgggacccaggagctccggcggcccgcccagctgcggctgcaggtgtaccggctcctcagcacagcagggaccccggagaacggcagcgagcctgagagcaggtccccggacaacaggacccagctggcccccgcgtgcatgccagggggacgctggtgccctggagccaacatctgcttgccgctggacgcctcctgccacccccaggcctgcgccaatggctgcacgtcagggccagggctacccggggccccctatgcgctatggagagagttcctcttctccgttcccgcggggccccccgcgcagtactcggtcaccctccacggccaggatgtcctcatgctccctggtgacctcgttggcttgcagcacgacgctggccctggcgccctcctgcactgctcgccggctcccggccaccctggtccccgggccccgtacctctccgccaacgcctcgtcatggctgccccacttgccagcccagctggagggcacttgggcctgccctgcctgtgccctgcggctgcttgcagccacggaacagctcaccgtgctgctgggcttgaggcccaaccctggactgcggctgcctgggcgctatgaggtccgggcagaggtgggcaatggcgtgtccaggcacaacctctcctgcagctttgacgtggtctccccagtggctgggctgcgggtcatctaccctgccccccgcgacggccgcctctacgtgcccaccaacggctcagccttggtgctccaggtggactctggtgccaacgccacggccacggctcgctggcctgggggcagtgtcagcgcccgctttgagaatgtctgccctgccctggtggccaccttcgtgcccggctgcccctgggagaccaacgataccctgttctcagtggtagcactgccgtggctcagtgagggggagcacgtggtggacgtggtggtggaaaacagcgccagccgggccaacctcagcctgcgggtgacggcggaggagcccatctgtggcctccgcgccacgcccagccccgaggcccgtgtactgcagggagtcctagtgaggtacagccccgtggtggaggccggctcggacatggtcttccggtggaccatcaacgacaagcagtccctgaccttccagaacgtggtcttcaatgtcatttatcagagcgcggcggtcttcaagctctcactgacggcctccaaccacgtgagcaacgtcaccgtgaactacaacgtaaccgtggagcggatgaacaggatgcagggtctgcaggtctccacagtgccggccgtgctgtcccccaatgccacgctagcactgacggcgggcgtgctggtggactcggccgtggaggtggccttcctgtggacctttggggatggggagcaggccctccaccagttccagcctccgtacaacgagtccttcccggttccagacccctcggtggcccaggtgctggtggagcacaatgtcatgcacacctacgctgccccaggtgagtacctcctgaccgtgctggcatctaatgccttcgagaacctgacgcagcaggtgcctgtgagcgtgcgcgcctccctgccctccgtggctgtgggtgtgagtgacggcgtcctggtggccggccggcccgtcaccttctacccgcacccgctgccctcgcctgggggtgttctttacacgtgggacttcggggacggctcccctgtcctgacccagagccagccggctgccaaccacacctatgcctcgaggggcacctaccacgtgcgcctggaggtcaacaacacggtgagcggtgcggcggcccaggcggatgtgcgcgtctttgaggagctccgcggactcagcgtggacatgagcctggccgtggagcagggcgcccccgtggtggtcagcgccgcggtgcagacgggcgacaacatcacgtggaccttcgacatgggggacggcaccgtgctgtcgggcccggaggcaacagtggagcatgtgtacctgcgggcacagaactgcacagtgaccgtgggtgcggccagccccgccggccacctggcccggagcctgcacgtgctggtcttcgtcctggaggtgctgcgcgttgaacccgccgcctgcatccccacgcagcctgacgcgcggctcacggcctacgtcaccgggaacccggcccactacctcttcgactggaccttcggggatggctcctccaacacgaccgtgcgggggtgcccgacggtgacacacaacttcacgcggagcggcacgttccccctggcgctggtgctgtccagccgcgtgaacagggcgcattacttcaccagcatctgcgtggagccagaggtgggcaacgtcaccctgcagccagagaggcagtttgtgcagctcggggacgaggcctggctggtggcatgtgcctggcccccgttcccctaccgctacacctgggactttggcaccgaggaagccgcccccacccgtgccaggggccctgaggtgacgttcatctaccgagacccaggctcctatcttgtgacagtcaccgcgtccaacaacatctctgctgccaatgactcagccctggtggaggtgcaggagcccgtgctggtcaccagcatcaaggtcaatggctcccttgggctggagctgcagcagccgtacctgttctctgctgtgggccgtgggcgccccgccagctacctgtgggatctgggggacggtgggtggctcgagggtccggaggtcacccacgcttacaacagcacaggtgacttcaccgttagggtggccggctggaatgaggtgagccgcagcgaggcctggctcaatgtgacggtgaagcggcgcgtgcgggggctcgtcgtcaatgcaagccgcacggtggtgcccctgaatgggagcgtgagcttcagcacgtcgctggaggccggcagtgatgtgcgctattcctgggtgctctgtgaccgctgcacgcccatccctgggggtcctaccatctcttacaccttccgctccgtgggcaccttcaatatcatcgtcacggctgagaacgaggtgggctccgcccaggacagcatcttcgtctatgtcctgcagctcatagaggggctgcaggtggtgggcggtggccgctacttccccaccaaccacacggtacagctgcaggccgtggttagggatggcaccaacgtctcctacagctggactgcctggagggacaggggcccggccctggccggcagcggcaaaggcttctcgctcaccgtgctcgaggccggcacctaccatgtgcagctgcgggccaccaacatgctgggcagcgcctgggccgactgcaccatggacttcgtggagcctgtggggtggctgatggtggccgcctccccgaacccagctgccgtcaacacaagcgtcaccctcagtgccgagctggctggtggcagtggtgtcgtatacacttggtccttggaggaggggctgagctgggagacctccgagccatttaccacccatagcttccccacacccggcctgcacttggtcaccatgacggcagggaacccgctgggctcagccaacgccaccgtggaagtggatgtgcaggtgcctgtgagtggcctcagcatcagggccagcgagcccggaggcagcttcgtggcggccgggtcctctgtgcccttttgggggcagctggccacgggcaccaatgtgagctggtgctgggctgtgcccggcggcagcagcaagcgtggccctcatgtcaccatggtcttcccggatgctggcaccttctccatccggctcaatgcctccaacgcagtcagctgggtctcagccacgtacaacctcacggcggaggagcccatcgtgggcctggtgctgtgggccagcagcaaggtggtggcgcccgggcagctggtccattttcagatcctgctggctgccggctcagctgtcaccttccgcctgcaggtcggcggggccaaccccgaggtgctccccgggccccgtttctcccacagcttcccccgcgtcggagaccacgtggtgagcgtgcggggcaaaaaccacgtgagctgggcccaggcgcaggtgcgcatcgtggtgctggaggccgtgagtgggctgcaggtgcccaactgctgcgagcctggcatcgccacgggcactgagaggaacttcacagcccgcgtgcagcgcggctctcgggtcgcctacgcctggtacttctcgctgcagaaggtccagggcgactcgctggtcatcctgtcgggccgcgacgtcacctacacgcccgtggccgcggggctgttggagatccaggtgcgcgccttcaacgccctgggcagtgagaaccgcacgctggtgctggaggttcaggacgccgtccagtatgtggccctgcagagcggcccctgcttcaccaaccgctcggcgcagtttgaggccgccaccagccccagcccccggcgtgtggcctaccactgggactttggggatgggtcgccagggcaggacacagatgagcccagggccgagcactcctacctgaggcctggggactaccgcgtgcaggtgaacgcctccaacctggtgagcttcttcgtggcgcaggccacggtgaccgtccaggtgctggcctgccgggagccggaggtggacgtggtcctgcccctgcaggtgctgatgcggcgatcacagcgcaactacttggaggcccacgttgacctgcgcgactgcgtcacctaccagactgagtaccgctgggaggtgtatcgcaccgccagctgccagcggccggggcgcccagcgcgtgtggccctgcccggcgtggacgtgagccggcctcggctggtgctgccgcggctggcgctgcctgtggggcactactgctttgtgtttgtcgtgtcatttggggacacgccactgacacagagcatccaggccaatgtgacggtggcccccgagcgcctggtgcccatcattgagggtggctcataccgcgtgtggtcagacacacgggacctggtgctggatgggagcgagtcctacgaccccaacctggaggacggcgaccagacgccgctcagtttccactgggcctgtgtggcttcgacacagagggaggctggcgggtgtgcgctgaactttgggccccgcgggagcagcacggtcaccattccacgggagcggctggcggctggcgtggagtacaccttcagcctgaccgtgtggaaggccggccgcaaggaggaggccaccaaccagacggtgctgatccggagtggccgggtgcccattgtgtccttggagtgtgtgtcctgcaaggcacaggccgtgtacgaagtgagccgcagctcctacgtgtacttggagggccgctgcctcaattgcagcagcggctccaagcgagggcggtgggctgcacgtacgttcagcaacaagacgctggtgctggatgagaccaccacatccacgggcagtgcaggcatgcgactggtgctgcggcggggcgtgctgcgggacggcgagggatacaccttcacgctcacggtgctgggccgctctggcgaggaggagggctgcgcctccatccgcctgtcccccaaccgcccgccgctggggggctcttgccgcctcttcccactgggcgctgtgcacgccctcaccaccaaggtgcacttcgaatgcacgggctggcatgacgcggaggatgctggcgccccgctggtgtacgccctgctgctgcggcgctgtcgccagggccactgcgaggagttctgtgtctacaagggcagcctctccagctacggagccgtgctgcccccgggtttcaggccacacttcgaggtgggcctggccgtggtggtgcaggaccagctgggagccgctgtggtcgccctcaacaggtctttggccatcaccctcccagagcccaacggcagcgcaacggggctcacagtctggctgcacgggctcaccgctagtgtgctcccagggctgctgcggcaggccgatccccagcacgtcatcgagtactcgttggccctggtcaccgtgctgaacgagtacgagcgggccctggacgtggcggcagagcccaagcacgagcggcagcaccgagcccagatacgcaagaacatcacggagactctggtgtccctgagggtccacactgtggatgacatccagcagatcgctgctgcgctggcccagtgcatggggcccagcagggagctcgtatgccgctcgtgcctgaagcagacgctgcacaagctggaggccatgatgctcatcctgcaggcagagaccaccgcgggcaccgtgacgcccaccgccatcggagacagcatcctcaacatcacaggagacctcatccacctggccagctcggacgtgcgggcaccacagccctcagagctgggagccgagtcaccatctcggatggtggcgtcccaggcctacaacctgacctctgccctcatgcgcatcctcatgcgctcccgcgtgctcaacgaggagcccctgacgctggcgggcgaggagatcgtggcccagggcaagcgctcggacccgcggagcctgctgtgctatggcggcgccccagggcctggctgccacttctccatccccgaggctttcagcggggccctggccaacctcagtgacgtggtgcagctcatctttctggtggactccaatccctttccctttggctatatcagcaactacaccgtctccaccaaggtggcctcgatggcattccagacacaggccggcgcccagatccccatcgagcggctggcctcagagcgcgccatcaccgtgaaggtgcccaacaactcggactgggctgcccggggccaccgcagctccgccaactccgccaactccgttgtggtccagccccaggcctccgtcggtgctgtggtcaccctggacagcagcaaccctgcggccgggctgcatctgcagctcaactatacgctgctggacggccactacctgtctgaggaacctgagccctacctggcagtctacctacactcggagccccggcccaatgagcacaactgctcggctagcaggaggatccgcccagagtcactccagggtgctgaccaccggccctacaccttcttcatttccccggggagcagagacccagcggggagttaccatctgaacctctccagccacttccgctggtcggcgctgcaggtgtccgtgggcctgtacacgtccctgtgccagtacttcagcgaggaggacatggtgtggcggacagaggggctgctgcccctggaggagacctcgccccgccaggccgtctgcctcacccgccacctcaccgccttcggcgccagcctcttcgtgcccccaagccatgtccgctttgtgtttcctgagccgacagcggatgtaaactacatcgtcatgctgacatgtgctgtgtgcctggtgacctacatggtcatggccgccatcctgcacaagctggaccagttggatgccagccggggccgcgccatccctttctgtgggcagcggggccgcttcaagtacgagatcctcgtcaagacaggctggggccggggctcaggtaccacggcccacgtgggcatcatgctgtatggggtggacagccggagcggccaccggcacctggacggcgacagagccttccaccgcaacagcctggacatcttccggatcgccaccccgcacagcctgggtagcgtgtggaagatccgagtgtggcacgacaacaaagggctcagccctgcctggttcctgcagcacgtcatcgtcagggacctgcagacggcacgcagcgccttcttcctggtcaatgactggctttcggtggagacggaggccaacgggggcctggtggagaaggaggtgctggccgcgagcgacgcagcccttttgcgcttccggcgcctgctggtggctgagctgcagcgtggcttctttgacaagcacatctggctctccatatgggaccggccgcctcgtagccgtttcactcgcatccagagggccacctgctgcgttctcctcatctgcctcttcctgggcgccaacgccgtgtggtacggggctgttggcgactctgcctacagcacggggcatgtgtccaggctgagcccgctgagcgtcgacacagtcgctgttggcctggtgtccagcgtggttgtctatcccgtctacctggccatcctttttctcttccggatgtcccggagcaaggtggctgggagcccgagccccacacctgccgggcagcaggtgctggacatcgacagctgcctggactcgtccgtgctggacagctccttcctcacgttctcaggcctccacgctgaggcctttgttggacagatgaagagtgacttgtttctggatgattctaagagtctggtgtgctggccctccggcgagggaacgctcagttggccggacctgctcagtgacccgtccattgtgggtagcaatctgcggcagctggcacggggccaggcgggccatgggctgggcccagaggaggacggcttctccctggccagcccctactcgcctgccaaatccttctcagcatcagatgaagacctgatccagcaggtccttgccgagggggtcagcagcccagcccctacccaagacacccacatggaaacggacctgctcagcagcctgtccagcactcctggggagaagacagagacgctggcgctgcagaggctgggggagctggggccacccagcccaggcctgaactgggaacagccccaggcagcgaggctgtccaggacaggactggtggagggtctgcggaagcgcctgctgccggcctggtgtgcctccctggcccacgggctcagcctgctcctggtggctgtggctgtggctgtctcagggtgggtgggtgcgagcttccccccgggcgtgagtgttgcgtggctcctgtccagcagcgccagcttcctggcctcattcctcggctgggagccactgaaggtcttgctggaagccctgtacttctcactggtggccaagcggctgcacccggatgaagatgacaccctggtagagagcccggctgtgacgcctgtgagcgcacgtgtgccccgcgtacggccaccccacggctttgcactcttcctggccaaggaagaagcccgcaaggtcaagaggctacatggcatgctgcggagcctcctggtgtacatgctttttctgctggtgaccctgctggccagctatggggatgcctcatgccatgggcacgcctaccgtctgcaaagcgccatcaagcaggagctgcacagccgggccttcctggccatcacgcggtctgaggagctctggccatggatggcccacgtgctgctgccctacgtccacgggaaccagtccagcccagagctggggcccccacggctgcggcaggtgcggctgcaggaagcactctacccagaccctcccggccccagggtccacacgtgctcggccgcaggaggcttcagcaccagcgattacgacgttggctgggagagtcctcacaatggctcggggacgtgggcctattcagcgccggatctgctgggggcatggtcctggggctcctgtgccgtgtatgacagcgggggctacgtgcaggagctgggcctgagcctggaggagagccgcgaccggctgcgcttcctgcagctgcacaactggctggacaacaggagccgcgctgtgttcctggagctcacgcgctacagcccggccgtggggctgcacgccgccgtcacgctgcgcctcgagttcccggcggccggccgcgccctggccgccctcagcgtccgcccctttgcgctgcgccgcctcagcgcgggcctctcgctgcctctgctcacctcggtgtgcctgctgctgttcgccgtgcacttcgccgtggccgaggcccgtacttggcacagggaagggcgctggcgcgtgctgcggctcggagcctgggcgcggtggctgctggtggcgctgacggcggccacggcactggtacgcctcgcccagctgggtgccgctgaccgccagtggacccgtttcgtgcgcggccgcccgcgccgcttcactagcttcgaccaggtggcgcagctgagctccgcagcccgtggcctggcggcctcgctgctcttcctgcttttggtcaaggctgcccagcagctacgcttcgtgcgccagtggtccgtctttggcaagacattatgccgagctctgccagagctcctgggggtcaccttgggcctggtggtgctcggggtagcctacgcccagctggccatcctgctcgtgtcttcctgtgtggactccctctggagcgtggcccaggccctgttggtgctgtgccctgggactgggctctctaccctgtgtcctgccgagtcctggcacctgtcacccctgctgtgtgtggggctctgggcactgcggctgtggggcgccctacggctgggggctgttattctccgctggcgctaccacgccttgcgtggagagctgtaccggccggcctgggagccccaggactacgagatggtggagttgttcctgcgcaggctgcgcctctggatgggcctcagcaaggtcaaggagttccgccacaaagtccgctttgaagggatggagccgctgccctctcgctcctccaggggctccaaggtatccccggatgtgcccccacccagcgctggctccgatgcctcgcacccctccacctcctccagccagctggatgggctgagcgtgagcctgggccggctggggacaaggtgtgagcctgagccctcccgcctccaagccgtgttcgaggccctgctcacccagtttgaccgactcaaccaggccacagaggacgtctaccagctggagcagcagctgcacagcctgcaaggccgcaggagcagccgggcgcccgccggatcttcccgtggcccatccccgggcctgcggccagcactgcccagccgccttgcccgggccagtcggggtgtggacctggccactggccccagcaggacaccccttcgggccaagaacaaggtccaccccagcagcacttagtcctccttcctggcgggggtgggccgtggagtcggagtggacaccgctcagtattactttctgccgctgtcaaggccgagggccaggcagaatggctgcacgtaggttccccagagagcaggcaggggcatctgtctgtctgtgggcttcagcactttaaagaggctgtgtggccaaccaggacccagggtcccctccccagctcccttgggaaggacacagcagtattggacggtttctagcctctgagatgctaatttatttccccgagtcctcaggtacagcgggctgtgcccggccccaccccctgggcagatgtcccccactgctaaggctgctggcttcagggagggttagcctgcaccgccgccaccctgcccctaagttattacctctccagttcctaccgtactccctgcaccgtctcactgtgtgtctcgtgtcagtaatttatatggtgttaaaatgtgtatatttttgtatgtcactattttcactagggctgaggggcctgcgcccagagctggcctcccccaacacctgctgcgcttggtaggtgtggtggcgttatggcagcccggctgctgcttggatgcgagcttggccttgggccggtgctgggggcacagctgtctgccaggcactctcatcaccccagaggccttgtcatcctcccttgccccaggccaggtagcaagagagcagcgcccaggcctgctggcatcaggtctgggcaagtagcaggactaggcatgtcagaggaccccagggtggttagaggaaaagactcctcctgggggctggctcccagggtggaggaaggtgactgtgtgtgtgtgtgtgtgcgcgcgcgcacgcgcgagtgtgctgtatggcccaggcagcctcaaggccctcggagctggctgtgcctgcttctgtgtaccacttctgtgggcatggccgcttctagagcctcgacacccccccaacccccgcaccaagcagacaaagtcaataaaagagctgtctgactgc

SEQ ID NO: 13585 - DNA, 1346 bp, Homo sapiens
atcatttgcatgtctagctggagaataaaaataatatatcatttgcatgtcttagtaatgaagtcatgggtgtcgtggcatgagatcagctggagggagaggagagattaaagtgaggagagagctacaaccaagtaagcaagtgtcagggctcaccaaccatgcaaggacagggcaggagaagaggaacctgcaaagacatattttgttccaaaatggcatcttacctttatggagtactctttgctgttggcctctgtgctccaatctactgtgtgtccccggccaatgcccccagtgcatacccccgcccttcctccacaaagagcacccctgcctcacaggtgtattccctcaacaccgactttgccttccgcctataccgcaggctggttttggagaccccgagtcagaacatcttcttctcccctgtgagtgtctccacttccctggccatgctctcccttggggcccactcagtcaccaagacccagattctccagggcctgggcttcaacctcacacacacaccagagtctgccatccaccagggcttccagcacctggttcactcactgactgttcccagcaaagacctgaccttgaagatgggaagtgccctcttcgtcaagaaggagctgcagctgcaggcaaatttcttgggcaatgtcaagaggctgtatgaagcagaagtcttttctacagatttctccaacccctccattgcccaggcgaggatcaacagccatgtgaaaaagaagacccaagggaaggttgtagacataatccaaggccttgaccttctgacggccatggttctggtgaaccacattttctttaaagccaagtgggagaagccctttcaccctgaatatacaagaaagaacttcccattcctggtgggcgagcaggtcactgtgcatgtccccatgatgcaccagaaagagcagttcgcttttggggtggatacagagctgaactgctttgtgctgcagatggattacaagggagatgccgtggccttctttgtcctccctagcaagggcaagatgaggcaactggaacaggccttgtcagccagaacactgagaaagtggagccactcactccagaaaaggtggatagaggtgttcatccccagattttccatttctgcctcctacaatctggaaaccatcctcccgaagatgggcatccaaaatgtctttgacaaaaatgctgatttttctggaattgcaaagagagactccctgcaggtttctaaagtgagttgaatgaaaatatttgcaaaaaagtccaagctggaagcacctgcagaattaatcacatgctcttatttcgttgat

SEQ ID NO: 13586 - DNA, 1694 bp, Homo sapiens
cgtgtgggacaagctgctcccgacagaaggatgtcgctgctgagcctgccctggctgggcctcagactggtggcaatgtccccatggctactcctgctgctggttgtgggctcctggctactcgcccgcatcctggcttggacctatgccttctataacaactgccgccggctccagtgtttcccacagcccccaaaacggaactggttttggggtcacctgggcctgatcactcctacagaggagggcttgaaggactcgacccagatgtcggccacctattcccagggctttacggtatggctgggtcccatcatccccttcatcgttttatgccaccctgacaccatccggtctatcaccaatgcctcagctgccattgcacccaaggataatctcttcatcaggttcctgaagccctggctgggagaagggatactgctgagtggcggtgacaagtggagccgccaccgtcggatgctgacgcccgccttccatttcaacatcctgaagtcctatataacgatcttcaacaagagtgcaaacatcatgcttgacaagtggcagcacctggcctcagagggcagcagtcgtctggacatgtttgagcacatcagcctcatgaccttggacagtctacagaaatgcatcttcagctttgacagccattgtcaggagaggcccagtgaatatattgccaccatcttggagctcagtgcccttgtagagaaaagaagccagcatatcctccagcacatggactttctgtattacctctcccatgacgggcggcgcttccacagggcctgccgcctggtgcatgacttcacagacgctgtcatccgggagcggcgtcgcaccctccccactcagggtattgatgattttttcaaagacaaagccaagtccaagactttggatttcattgatgtgcttctgctgagcaaggatgaagatgggaaggcattgtcagatgaggatataagagcagaggctgacaccttcatgtttggaggccatgacaccacggccagtggcctctcctgggtcctgtacaaccttgcgaggcacccagaataccaggagcgctgccgacaggaggtgcaagagcttctgaaggaccgcgatcctaaagagattgaatgggacgacctggcccagctgcccttcctgaccatgtgcgtgaaggagagcctgaggttacatcccccagctcccttcatctcccgatgctgcacccaggacattgttctcccagatggccgagtcatccccaaaggcattacctgcctcatcgatattataggggtccatcacaacccaactgtgtggccggatcctgaggtctacgaccccttccgctttgacccagagaacagcaaggggaggtcacctctggcttttattcctttctccgcagggcccaggaactgcatcgggcaggcgttcgccatggcggagatgaaagtggtcctggcgttgatgctgctgcacttccggttcctgccagaccacactgagccccgcaggaagctggaattgatcatgcgcgccgagggcgggctttggctgcgggtggagcccctgaatgtaggcttgcagtgactttctgacccatccacctgtttttttgcagattgtcatgaataaaacggtgctgtcacctctgcctgggcctcactgacagcctgcag

SEQ ID NO: 13587 - DNA, 1404 bp, Homo sapiens
ggcagtgcagctgtgggaacctctccacgcgcacgaactcagccaacgatttctgatagatttttgggagtttgaccagagatgcaaggggtgaaggagcgcttcctaccgttagggaactctggggacagagcgccccggccgcctgatggccgaggcagggtgcgacccaggacccaggacggcgtcgggaaccataccatggcccggatccccaagaccctaaagttcgtcgtcgtcatcgtcgcggtcctgctgccagtcctagcttactctgccaccactgcccggcaggaggaagttccccagcagacagtggccccacagcaacagaggcacagcttcaagggggaggagtgtccagcaggatctcatagatcagaacatactggagcctgtaacccgtgcacagagggtgtggattacaccaacgcttccaacaatgaaccttcttgcttcccatgtacagtttgtaaatcagatcaaaaacataaaagttcctgcaccatgaccagagacacagtgtgtcagtgtaaagaaggcaccttccggaatgaaaactccccagagatgtgccggaagtgtagcaggtgccctagtggggaagtccaagtcagtaattgtacgtcctgggatgatatccagtgtgttgaagaatttggtgccaatgccactgtggaaaccccagctgctgaagagacaatgaacaccagcccggggactcctgccccagctgctgaagagacaatgaacaccagcccagggactcctgccccagctgctgaagagacaatgaccaccagcccggggactcctgccccagctgctgaagagacaatgaccaccagcccggggactcctgccccagctgctgaagagacaatgaccaccagcccggggactcctgcctcttctcattacctctcatgcaccatcgtagggatcatagttctaattgtgcttctgattgtgtttgtttgaaagacttcactgtggaagaaattccttccttacctgaaaggttcaggtaggcgctggctgagggcggggggcgctggacactctctgccctgcctccctctgctgtgttcccacagacagaaacgcctgcccctgccccaagtcctggtgtctccagcctggctctatcttcctccttgtgatcgtcccatccccacatcccgtgcaccccccaggaccctggtctcatcagtccctctcctggagctgggggtccacacatctcccagccaagtccaagagggcagggccagttcctcccatcttcaggcccagccaggcagggggcagtcggctcctcaactgggtgacaagggtgaggatgagaagtggtcacgggatttattcagccttggtcagagcagaaaaaaaaaaaaaaaaaaa

SEQ ID NO: 13588 - DNA, 3046 bp, Homo sapiens
agcatcctcctgggcgccgctttcgcgcggcggcggcggctgcggcggggtctttctttgcttaaatacctcgttggccagaagcgctggtaccgggggcgggttgggtcgggtcgggcagtgctgcacacctgggtttccttgcctagagctgtgtgttcggggtcctttggtccagtcggaggctgcggagcggcgggggttgcctgcgctgtccgcccgggcatcctcccggtgatggaagcagccgccgccgccgctgcggggtcgcgctgtgccccatccaccgctgccagagaggtgggaaaattcgccgcacggaggccgaaagcgagaggggctgcgccgctatgccgggagctgagtcccatataagccgcccccagccatcgcccccagccggcttcgttcccctgagcgagacaggaagctgcggtcccgagaaagcggaggagacgtcgctggagccgggaggcgccgggttcggcggagcgcggagcggggctctgggccgcgtgaaagtttttcttcccgagccgcagggcgcccgctgcccggaaactgcccagggataagtcggccgactccccagacccctcgaaggtgcggggacccccagcggaagcgagagggagcgaaatcgaggaacgagtgacagccggacagtccgccgggcggtgatccggggccgctcccgggcgcgccctcggctccaggtcctacccggagccgctgccatgggagagccagccttgggcgctggggaccagccgccgcgcccgcctcggagtcgcggcccgagtcccggcgccagcagccagcccgctgcgtccccttcccgggctgcagggctgcctccgccgcgccgccggcccggattgtgcctgtgatgagccgcagcccgcagcgagctctgcccccgggcgcgctccctcggctgctccaggctgcgcctgcagccgcgccgcgtgccctgctcccgcagtggccccggcgcccaggacgccgctggcccgcgtcccctctcggaatgaaggtgttccgtaggaaggcgctggtgttgtgcgcgggctatgcactgctgctggtgctcactatgctcaacctcctggactacaagtggcacaaggagccgctgcagcagtgcaaccccgatgggccgctgggtgccgcagcgggggcagccggaggcagctgggggcgcccagggccgcctccggccgggccgccccgtgctcatgcccgtttggacctccgcactccttaccgccctcccgctgccgccgtcggggcggctcctgcagccgcggcagggatggcgggggttgcggcccctccaggcaatggcactcggggcaccgggggcgtcggggacaagcggcagctggtgtacgtgttcaccacgtggcgctctggctcgtcgttcttcggcgagctattcaaccagaatcccgaggtgttctttctctacgagccagtgtggcatgtatggcaaaaactgtatccgggggacgccgtttccctgcagggggcagcgcgggacatgctgagcgctctttaccgctgcgacctctctgtcttccagttgtatagccccgcgggcagcggggggcgcaacctcaccacgctgggcatcttcggcgcagccaccaacaaggtggtgtgctcgtcaccactctgccccgcctaccgcaaggaggtcgtggggttggtggacgaccgcgtgtgcaagaagtgcccgccacagcgcctggcgcgtttcgaggaggagtgccgcaagtaccgcacactagtcataaagggtgtgcgcgtcttcgacgtggcggtcttggcgccactgctgcgagacccggccctggacctcaaggtcatccacttggtgcgtgatccccgcgcggtggcgagttcacggatccgctcgcgccacggcctcatccgtgagagcctacaggtggtgcgcagccgagacccgcgagctcaccgcatgcccttcttggaggccgcgggccacaagcttggcgccaagaaggagggcgtgggcggccccgcagactaccacgctctgggcgctatggaggtcatctgcaatagtatggctaagacgctgcagacagccctgcagccccctgactggctgcagggccactacctggtggtgcggtacgaggacctggtgggagaccccgtcaagacactacggagagtgtacgattttgtgggactgttggtgagccccgaaatggagcagtttgccctgaacatgaccagtggctcgggctcctcctccaagcctttcgtggtatctgcacgcaatgccacgcaggccgccaatgcctggcggaccgccctcaccttccagcagatcaaacaggtggaggagttttgctaccagcccatggccgtcctgggctatgagcgggtcaacagccctgaggaggtcaaagacctcagcaagaccctgcttcggaagccccgtctctaaaaggggttcccaggagacctgattccctgtggtgatacctataaagaggatcgtagtgtgtttaaataaacacagtccagactcaaacggaggaagcccacatattctattatagatatataaataatcacacacacacttgctgtcaatgttttgagtcagtgcatttcaaggaacagccacaaaatacacacccctaagaaaaggcaagacttgaacgttctgaccaggtgcccctcttcttctttgccttctcttgtcctctttctcctatttcttaccctgtcctccacctgccttccattttgaagtgggatgttaatgaaatcaagttccagtaacccaaatcttgtttacaaaatattcgtggtatctgtgaacatgttaagagtaatttggatgtgggggtgggggtggagaaaggggaagtggtccagaaacaaaaagccccattgggcatgataagccgaggaggcattcttctaaagcagacttttgtgtaaaaagcaaaggttacatgtgagtattaataaagaagataataaataatattctttttaaaaa

SEQ ID NO: 13589 - DNA, 7807 bp, Homo sapiens
cgcaccctccttccgcccctccttctccggggtcagccaggaagatgtcccgagctgctatccccggctcggcccgggcagccgccttctgagcccccgacccgaggcgccgagccgccgccgcccgatgggctgggccgtggagcgtctccgcagtcgtagctccagccgccgcgctcccagccccggcagcctcagcatcagcggcggcggcggcggcggcggcggcgtcttccgcatcgttcgccgcagcgtaacccggagccctttgctctttgcagaatggcccgcttcggagacgagatgccggcccgctacgggggaggaggctccggggcagccgccggggtggtcgtgggcagcggaggcgggcgaggagccgggggcagccggcagggcgggcagcccggggcgcaaaggatgtacaagcagtcaatggcgcagagagcgcggaccatggcactctacaaccccatccccgtccgacagaactgcctcacggttaaccggtctctcttcctcttcagcgaagacaacgtggtgagaaaatacgccaaaaagatcaccgaatggcctccctttgaatatatgattttagccaccatcatagcgaattgcatcgtcctcgcactggagcagcatctgcctgatgatgacaagaccccgatgtctgaacggctggatgacacagaaccatacttcattggaattttttgtttcgaggctggaattaaaatcattgcccttgggtttgccttccacaaaggctcctacttgaggaatggctggaatgtcatggactttgtggtggtgctaacgggcatcttggcgacagttgggacggagtttgacctacggacgctgagggcagttcgagtgctgcggccgctcaagctggtgtctggaatcccaagtttacaagtcgtcctgaagtcgatcatgaaggcgatgatccctttgctgcagatcggcctcctcctattttttgcaatccttatttttgcaatcatagggttagaattttatatgggaaaatttcataccacctgctttgaagaggggacagatgacattcagggtgagtctccggctccatgtgggacagaagagcccgcccgcacctgccccaatgggaccaaatgtcagccctactgggaagggcccaacaacgggatcactcagttcgacaacatcctgtttgcagtgctgactgttttccagtgcataaccatggaagggtggactgatctcctctacaatagcaacgatgcctcagggaacacttggaactggttgtacttcatccccctcatcatcatcggctccttttttatgctgaaccttgtgctgggtgtgctgtcaggggagtttgccaaagaaagggaacgggtggagaaccggcgggcttttctgaagctgaggcggcaacaacagattgaacgtgagctcaatgggtacatggaatggatctcaaaagcagaagaggtgatcctcgccgaggatgaaactgacggggagcagaggcatccctttgatggagctctgcggagaaccaccataaagaaaagcaagacagatttgctcaaccccgaagaggctgaggatcagctggctgatatagcctctgtgggttctcccttcgcccgagccagcattaaaagtgccaagctggagaactcgaccttttttcacaaaaaggagaggaggatgcgtttctacatccgccgcatggtcaaaactcaggccttctactggactgtactcagtttggtagctctcaacacgctgtgtgttgctattgttcactacaaccagcccgagtggctctccgacttcctttactatgcagaattcattttcttaggactctttatgtccgaaatgtttataaaaatgtacgggcttgggacgcggccttacttccactcttccttcaactgctttgactgtggggttatcattgggagcatcttcgaggtcatctgggctgtcataaaacctggcacatcctttggaatcagcgtgttacgagccctcaggttattgcgtattttcaaagtcacaaagtactgggcatctctcagaaacctggtcgtctctctcctcaactccatgaagtccatcatcagcctgttgtttctccttttcctgttcattgtcgtcttcgcccttttgggaatgcaactcttcggcggccagtttaatttcgatgaagggactcctcccaccaacttcgatacttttccagcagcaataatgacggtgtttcagatcctgacgggcgaagactggaacgaggtcatgtacgacgggatcaagtctcaggggggcgtgcagggcggcatggtgttctccatctatttcattgtactgacgctctttgggaactacaccctcctgaatgtgttcttggccatcgctgtggacaatctggccaacgcccaggagctcaccaaggacgagcaagaggaagaagaagcagcgaaccagaaacttgccctacagaaagccaaggaggtggcagaagtgagtcctctgtccgcggccaacatgtctatagctgtgaaagagcaacagaagaatcaaaagccagccaagtccgtgtgggagcagcggaccagtgagatgcgaaagcagaacttgctggccagccgggaggccctgtataacgaaatggacccggacgagcgctggaaggctgcctacacgcggcacctgcggccagacatgaagacgcacttggaccggccgctggtggtggacccgcaggagaaccgcaacaacaacaccaacaagagccgggcggccgagcccaccgtggaccagcgcctcggccagcagcgcgccgaggacttcctcaggaaacaggcccgctaccacgatcgggcccgggaccccagcggctcggcgggcctggacgcacggaggccctgggcgggaagccaggaggccgagctgagccgggagggaccctacggccgcgagtcggaccaccacgcccgggagggcagcctggagcaacccgggttctgggagggcgaggccgagcgaggcaaggccggggacccccaccggaggcacgtgcaccggcaggggggcagcagggagagccgcagcgggtccccgcgcacgggcgcggacggggagcatcgacgtcatcgcgcgcaccgcaggcccggggaggagggtccggaggacaaggcggagcggagggcgcggcaccgcgagggcagccggccggcccggggcggcgagggcgagggcgagggccccgacgggggcgagcgcaggagaaggcaccggcatggcgctccagccacgtacgagggggacgcgcggagggaggacaaggagcggaggcatcggaggaggaaagagaaccagggctccggggtccctgtgtcgggccccaacctgtcaaccacccggccaatccagcaggacctgggccgccaagacccacccctggcagaggatattgacaacatgaagaacaacaagctggccaccgcggagtcggccgctccccacggcagccttggccacgccggcctgccccagagcccagccaagatgggaaacagcaccgaccccggccccatgctggccatccctgccatggccaccaacccccagaacgccgccagccgccggacgcccaacaacccggggaacccatccaatcccggcccccccaagacccccgagaatagccttatcgtcaccaaccccagcggcacccagaccaattcagctaagactgccaggaaacccgaccacaccacagtggacatccccccagcctgcccaccccccctcaaccacaccgtcgtacaagtgaacaaaaacgccaacccagacccactgccaaaaaaagaggaagagaagaaggaggaggaggaagacgaccgtggggaagacggccctaagccaatgcctccctatagctccatgttcatcctgtccacgaccaacccccttcgccgcctgtgccattacatcctgaacctgcgctactttgagatgtgcatcctcatggtcattgccatgagcagcatcgccctggccgccgaggaccctgtgcagcccaacgcacctcggaacaacgtgctgcgatactttgactacgtttttacaggcgtctttacctttgagatggtgatcaagatgattgacctggggctcgtcctgcatcagggtgcctacttccgtgacctctggaatattctcgacttcatagtggtcagtggggccctggtagcctttgccttcactggcaatagcaaaggaaaagacatcaacacgattaaatccctccgagtcctccgggtgctacgacctcttaaaaccatcaagcggctgccaaagctcaaggctgtgtttgactgtgtggtgaactcacttaaaaacgtcttcaacatcctcatcgtctacatgctattcatgttcatcttcgccgtggtggctgtgcagctcttcaaggggaaattcttccactgcactgacgagtccaaagagtttgagaaagattgtcgaggcaaatacctcctctacgagaagaatgaggtgaaggcgcgagaccgggagtggaagaagtatgaattccattacgacaatgtgctgtgggctctgctgaccctcttcaccgtgtccacgggagaaggctggccacaggtcctcaagcattcggtggacgccacctttgagaaccagggccccagccccgggtaccgcatggagatgtccattttctacgtcgtctactttgtggtgttccccttcttctttgtcaatatctttgtggccttgatcatcatcaccttccaggagcaaggggacaagatgatggaggaatacagcctggagaaaaatgagagggcctgcattgatttcgccatcagcgccaagccgctgacccgacacatgccgcagaacaagcagagcttccagtaccgcatgtggcagttcgtggtgtctccgcctttcgagtacacgatcatggccatgatcgccctcaacaccatcgtgcttatgatgaagttctatggggcttctgttgcttatgaaaatgccctgcgggtgttcaacatcgtcttcacctccctcttctctctggaatgtgtgctgaaagtcatggcttttgggattctgaattatttccgcgatgcctggaacatcttcgactttgtgactgttctgggcagcatcaccgatatcctcgtgactgagtttgggaataacttcatcaacctgagctttctccgcctcttccgagctgcccggctcatcaaacttctccgtcagggttacaccatccgcattcttctctggacctttgtgcagtccttcaaggccctgccttatgtctgtctgctgatcgccatgctcttcttcatctatgccatcattgggatgcaggtgtttggtaacattggcatcgacgtggaggacgaggacagtgatgaagatgagttccaaatcactgagcacaataacttccggaccttcttccaggccctcatgcttctcttccggagtgccaccggggaagcttggcacaacatcatgctttcctgcctcagcgggaaaccgtgtgataagaactctggcatcctgactcgagagtgtggcaatgaatttgcttatttttactttgtttccttcatcttcctctgctcgtttctgatgctgaatctctttgtcgccgtcatcatggacaactttgagtacctcacccgagactcctccatcctgggcccccaccacctggatgagtacgtgcgtgtctgggccgagtatgaccccgcagcttgcggtcggattcattataaggatatgtacagtttattacgagtaatatctccccctctcggcttaggcaagaaatgtcctcatagggttgcttgcaagcggcttctgcggatggacctgcccgtcgcagatgacaacaccgtccacttcaattccaccctcatggctctgatccgcacagccctggacatcaagattgccaagggaggagccgacaaacagcagatggacgctgagctgcggaaggagatgatggcgatttggcccaatctgtcccagaagacgctagacctgctggtcacacctcacaagtccacggacctcaccgtggggaagatctacgcagccatgatgatcatggagtactaccggcagagcaaggccaagaagctgcaggccatgcgcgaggagcaggaccggacacccctcatgttccagcgcatggagcccccgtccccaacgcaggaagggggacctggccagaacgccctcccctccacccagctggacccaggaggagccctgatggctcacgaaagcggcctcaaggagagcccgtcctgggtgacccagcgtgcccaggagatgttccagaagacgggcacatggagtccggaacaaggcccccctaccgacatgcccaacagccagcctaactctcagtccgtggagatgcgagagatgggcagagatggctactccgacagcgagcactacctccccatggaaggccagggccgggctgcctccatgccccgcctccctgcagagaaccagaggagaaggggccggccacgtgggaataacctcagtaccatctcagacaccagccccatgaagcgttcagcctccgtgctgggccccaaggcccgacgcctggacgattactcgctggagcgggtcccgcccgaggagaaccagcggcaccaccagcggcgccgcgaccgcagccaccgcgcctctgagcgctccctgggccgctacaccgatgtggacacaggcttggggacagacctgagcatgaccacccaatccggggacctgccgtcgaaggagcgggaccaggagcggggccggcccaaggatcggaagcatcgacagcaccaccaccaccaccaccaccaccaccatcccccgccccccgacaaggaccgctatgcccaggaacggccggaccacggccgggcacgggctcgggaccagcgctggtcccgctcgcccagcgagggccgagagcacatggcgcaccggcagtagttccgtaagtggaagcccagccccctcaacatctggtaccagcactccgcggcggggccgccgccagctcccccagaccccctccaccccccggccacacgtgtcctattcccctgtgatccgtaaggccggcggctcggggcccccgcagcagcagcagcagcagcagcagcagcagcaggcggtggccaggccgggccgggcggccaccagcggccctcggaggtacccaggccccacggccgagcctctggccggagatcggccgcccacggggggccacagcagcggccgctcgcccaggatggagaggcgggtcccaggcccggcccggagcgagtcccccagggcctgtcgacacggcggggcccggtggccggcatctggcccgcacgtgtccgaggggcccccgggtccccggcaccatggctactaccggggctccgactacgacgaggccgatggcccgggcagcgggggcggcgaggaggccatggccggggcctacgacgcgccaccccccgtacgacacgcgtcctcgggcgccaccgggcgctcgcccaggactccccgggcctcgggcccggcctgcgcctcgccttctcggcacggccggcgactccccaacggctactacccggcgcacggactggccaggccccgcgggccgggctccaggaagggcctgcacgaaccctacagcgagagtgacgatgattggtgctaagcccgggcgagg

SEQ ID NO: 13590 - DNA, 7812 bp, Homo sapiens
cgcaccctccttccgcccctccttctccggggtcagccaggaagatgtcccgagctgctatccccggctcggcccgggcagccgccttctgagcccccgacccgaggcgccgagccgccgccgcccgatgggctgggccgtggagcgtctccgcagtcgtagctccagccgccgcgctcccagccccggcagcctcagcatcagcggcggcggcggcggcggcggcggcgtcttccgcatcgttcgccgcagcgtaacccggagccctttgctctttgcagaatggcccgcttcggagacgagatgccggcccgctacgggggaggaggctccggggcagccgccggggtggtcgtgggcagcggaggcgggcgaggagccgggggcagccggcagggcgggcagcccggggcgcaaaggatgtacaagcagtcaatggcgcagagagcgcggaccatggcactctacaaccccatccccgtccgacagaactgcctcacggttaaccggtctctcttcctcttcagcgaagacaacgtggtgagaaaatacgccaaaaagatcaccgaatggcctccctttgaatatatgattttagccaccatcatagcgaattgcatcgtcctcgcactggagcagcatctgcctgatgatgacaagaccccgatgtctgaacggctggatgacacagaaccatacttcattggaattttttgtttcgaggctggaattaaaatcattgcccttgggtttgccttccacaaaggctcctacttgaggaatggctggaatgtcatggactttgtggtggtgctaacgggcatcttggcgacagttgggacggagtttgacctacggacgctgagggcagttcgagtgctgcggccgctcaagctggtgtctggaatcccaagtttacaagtcgtcctgaagtcgatcatgaaggcgatgatccctttgctgcagatcggcctcctcctattttttgcaatccttatttttgcaatcatagggttagaattttatatgggaaaatttcataccacctgctttgaagaggggacagatgacattcagggtgagtctccggctccatgtgggacagaagagcccgcccgcacctgccccaatgggaccaaatgtcagccctactgggaagggcccaacaacgggatcactcagttcgacaacatcctgtttgcagtgctgactgttttccagtgcataaccatggaagggtggactgatctcctctacaatagcaacgatgcctcagggaacacttggaactggttgtacttcatccccctcatcatcatcggctccttttttatgctgaaccttgtgctgggtgtgctgtcaggggagtttgccaaagaaagggaacgggtggagaaccggcgggcttttctgaagctgaggcggcaacaacagattgaacgtgagctcaatgggtacatggaatggatctcaaaagcagaagaggtgatcctcgccgaggatgaaactgacggggagcagaggcatccctttgatggagctctgcggagaaccaccataaagaaaagcaagacagatttgctcaaccccgaagaggctgaggatcagctggctgatatagcctctgtgggttctcccttcgcccgagccagcattaaaagtgccaagctggagaactcgaccttttttcacaaaaaggagaggaggatgcgtttctacatccgccgcatggtcaaaactcaggccttctactggactgtactcagtttggtagctctcaacacgctgtgtgttgctattgttcactacaaccagcccgagtggctctccgacttcctttactatgcagaattcattttcttaggactctttatgtccgaaatgtttataaaaatgtacgggcttgggacgcggccttacttccactcttccttcaactgctttgactgtggggttatcattgggagcatcttcgaggtcatctgggctgtcataaaacctggcacatcctttggaatcagcgtgttacgagccctcaggttattgcgtattttcaaagtcacaaagtactgggcatctctcagaaacctggtcgtctctctcctcaactccatgaagtccatcatcagcctgttgtttctccttttcctgttcattgtcgtcttcgcccttttgggaatgcaactcttcggcggccagtttaatttcgatgaagggactcctcccaccaacttcgatacttttccagcagcaataatgacggtgtttcagatcctgacgggcgaagactggaacgaggtcatgtacgacgggatcaagtctcaggggggcgtgcagggcggcatggtgttctccatctatttcattgtactgacgctctttgggaactacaccctcctgaatgtgttcttggccatcgctgtggacaatctggccaacgcccaggagctcaccaaggacgagcaagaggaagaagaagcagcgaaccagaaacttgccctacagaaagccaaggaggtggcagaagtgagtcctctgtccgcggccaacatgtctatagctgtgaaagagcaacagaagaatcaaaagccagccaagtccgtgtgggagcagcggaccagtgagatgcgaaagcagaacttgctggccagccgggaggccctgtataacgaaatggacccggacgagcgctggaaggctgcctacacgcggcacctgcggccagacatgaagacgcacttggaccggccgctggtggtggacccgcaggagaaccgcaacaacaacaccaacaagagccgggcggccgagcccaccgtggaccagcgcctcggccagcagcgcgccgaggacttcctcaggaaacaggcccgctaccacgatcgggcccgggaccccagcggctcggcgggcctggacgcacggaggccctgggcgggaagccaggaggccgagctgagccgggagggaccctacggccgcgagtcggaccaccacgcccgggagggcagcctggagcaacccgggttctgggagggcgaggccgagcgaggcaaggccggggacccccaccggaggcacgtgcaccggcaggggggcagcagggagagccgcagcgggtccccgcgcacgggcgcggacggggagcatcgacgtcatcgcgcgcaccgcaggcccggggaggagggtccggaggacaaggcggagcggagggcgcggcaccgcgagggcagccggccggcccggggcggcgagggcgagggcgagggccccgacgggggcgagcgcaggagaaggcaccggcatggcgctccagccacgtacgagggggacgcgcggagggaggacaaggagcggaggcatcggaggaggaaagagaaccagggctccggggtccctgtgtcgggccccaacctgtcaaccacccggccaatccagcaggacctgggccgccaagacccacccctggcagaggatattgacaacatgaagaacaacaagctggccaccgcggagtcggccgctccccacggcagccttggccacgccggcctgccccagagcccagccaagatgggaaacagcaccgaccccggccccatgctggccatccctgccatggccaccaacccccagaacgccgccagccgccggacgcccaacaacccggggaacccatccaatcccggcccccccaagacccccgagaatagccttatcgtcaccaaccccagcggcacccagaccaattcagctaagactgccaggaaacccgaccacaccacagtggacatccccccagcctgcccaccccccctcaaccacaccgtcgtacaagtgaacaaaaacgccaacccagacccactgccaaaaaaagaggaagagaagaaggaggaggaggaagacgaccgtggggaagacggccctaagccaatgcctccctatagctccatgttcatcctgtccacgaccaacccccttcgccgcctgtgccattacatcctgaacctgcgctactttgagatgtgcatcctcatggtcattgccatgagcagcatcgccctggccgccgaggaccctgtgcagcccaacgcacctcggaacaacgtgctgcgatactttgactacgtttttacaggcgtctttacctttgagatggtgatcaagatgattgacctggggctcgtcctgcatcagggtgcctacttccgtgacctctggaatattctcgacttcatagtggtcagtggggccctggtagcctttgccttcactggcaatagcaaaggaaaagacatcaacacgattaaatccctccgagtcctccgggtgctacgacctcttaaaaccatcaagcggctgccaaagctcaaggctgtgtttgactgtgtggtgaactcacttaaaaacgtcttcaacatcctcatcgtctacatgctattcatgttcatcttcgccgtggtggctgtgcagctcttcaaggggaaattcttccactgcactgacgagtccaaagagtttgagaaagattgtcgaggcaaatacctcctctacgagaagaatgaggtgaaggcgcgagaccgggagtggaagaagtatgaattccattacgacaatgtgctgtgggctctgctgaccctcttcaccgtgtccacgggagaaggctggccacaggtcctcaagcattcggtggacgccacctttgagaaccagggccccagccccgggtaccgcatggagatgtccattttctacgtcgtctactttgtggtgttccccttcttctttgtcaatatctttgtggccttgatcatcatcaccttccaggagcaaggggacaagatgatggaggaatacagcctggagaaaaatgagagggcctgcattgatttcgccatcagcgccaagccgctgacccgacacatgccgcagaacaagcagagcttccagtaccgcatgtggcagttcgtggtgtctccgcctttcgagtacacgatcatggccatgatcgccctcaacaccatcgtgcttatgatgaagttctatggggcttctgttgcttatgaaaatgccctgcgggtgttcaacatcgtcttcacctccctcttctctctggaatgtgtgctgaaagtcatggcttttgggattctgaattatttccgcgatgcctggaacatcttcgactttgtgactgttctgggcagcatcaccgatatcctcgtgactgagtttgggaataacttcatcaacctgagctttctccgcctcttccgagctgcccggctcatcaaacttctccgtcagggttacaccatccgcattcttctctggacctttgtgcagtccttcaaggccctgccttatgtctgtctgctgatcgccatgctcttcttcatctatgccatcattgggatgcaggtgtttggtaacattggcatcgacgtggaggacgaggacagtgatgaagatgagttccaaatcactgagcacaataacttccggaccttcttccaggccctcatgcttctcttccggagtgccaccggggaagcttggcacaacatcatgctttcctgcctcagcgggaaaccgtgtgataagaactctggcatcctgactcgagagtgtggcaatgaatttgcttatttttactttgtttccttcatcttcctctgctcgtttctgatgctgaatctctttgtcgccgtcatcatggacaactttgagtacctcacccgagactcctccatcctgggcccccaccacctggatgagtacgtgcgtgtctgggccgagtatgaccccgcagcttgcggtcggattcattataaggatatgtacagtttattacgagtaatatctccccctctcggcttaggcaagaaatgtcctcatagggttgcttgcaagcggcttctgcggatggacctgcccgtcgcagatgacaacaccgtccacttcaattccaccctcatggctctgatccgcacagccctggacatcaagattgccaagggaggagccgacaaacagcagatggacgctgagctgcggaaggagatgatggcgatttggcccaatctgtcccagaagacgctagacctgctggtcacacctcacaagtccacggacctcaccgtggggaagatctacgcagccatgatgatcatggagtactaccggcagagcaaggccaagaagctgcaggccatgcgcgaggagcaggaccggacacccctcatgttccagcgcatggagcccccgtccccaacgcaggaagggggacctggccagaacgccctcccctccacccagctggacccaggaggagccctgatggctcacgaaagcggcctcaaggagagcccgtcctgggtgacccagcgtgcccaggagatgttccagaagacgggcacatggagtccggaacaaggcccccctaccgacatgcccaacagccagcctaactctcagtccgtggagatgcgagagatgggcagagatggctactccgacagcgagcactacctccccatggaaggccagggccgggctgcctccatgccccgcctccctgcagagaaccagaggagaaggggccggccacgtgggaataacctcagtaccatctcagacaccagccccatgaagcgttcagcctccgtgctgggccccaaggcccgacgcctggacgattactcgctggagcgggtcccgcccgaggagaaccagcggcaccaccagcggcgccgcgaccgcagccaccgcgcctctgagcgctccctgggccgctacaccgatgtggacacaggcttggggacagacctgagcatgaccacccaatccggggacctgccgtcgaaggagcgggaccaggagcggggccggcccaaggatcggaagcatcgacagcaccaccaccaccaccaccaccaccaccatcccccgccccccgacaaggaccgctatgcccaggaacggccggaccacggccgggcacgggctcgggaccagcgctggtcccgctcgcccagcgagggccgagagcacatggcgcaccggcagggcagtagttccgtaagtggaagcccagccccctcaacatctggtaccagcactccgcggcggggccgccgccagctcccccagaccccctccaccccccggccacacgtgtcctattcccctgtgatccgtaaggccggcggctcggggcccccgcagcagcagcagcagcagcagcagcagcagcaggcggtggccaggccgggccgggcggccaccagcggccctcggaggtacccaggccccacggccgagcctctggccggagatcggccgcccacggggggccacagcagcggccgctcgcccaggatggagaggcgggtcccaggcccggcccggagcgagtcccccagggcctgtcgacacggcggggcccggtggccggcatctggcccgcacgtgtccgaggggcccccgggtccccggcaccatggctactaccggggctccgactacgacgaggccgatggcccgggcagcgggggcggcgaggaggccatggccggggcctacgacgcgccaccccccgtacgacacgcgtcctcgggcgccaccgggcgctcgcccaggactccccgggcctcgggcccggcctgcgcctcgccttctcggcacggccggcgactccccaacggctactacccggcgcacggactggccaggccccgcgggccgggctccaggaagggcctgcacgaaccctacagcgagagtgacgatgattggtgctaagcccgggcgagg

SEQ ID NO: 13591 - DNA, 2381 bp, Homo sapiens
ttccactgaagtggccaagggagttgagctgagcagggggaggggaagatctacacccatcccccttcctctagccctccctgcgtttagattcagttgcaccttttattattttaactcttctccttaggacacgcagcccccaatttgtccctccggcctgggcggcccctggtcccgcgcgccagcatgggagagcgagggacctgcccgcggcccgccggcgtgtgcaaggaggtccagccgccgcgcccgctacccggagtctgaggacgggtgtccagggacggagaggcaggtgagagggaggtggctaagctggctatggtgacaggacgatgttggccagaaagagtatcatcccggaggagtatgtgctggcgcgcatcgccgcagagaacctgcgcaagccgcgcatccgagaccgcctccccaaagcccgcttcatcgccaagagcggggcctgcaacctggcgcataagaacatccgtgagcaaggacgctttctacaggacatcttcaccaccttggtggacctgaaatggcgccacacgctggtcatctttaccatgtccttcctctgcagctggctgctcttcgctatcatgtggtggctggtggcctttgcccatggggacatctatgcttacatggagaaaagtggaatggagaaaagtggtttggagtccactgtgtgtgtgactaatgtcaggtctttcacttctgcttttctcttctccattgaagttcaagttaccattgggtttggagggaggatgatgacagaggaatgccctttggccatcacggttttgattctccagaatattgtgggtttgatcatcaatgcagtcatgttaggctgcattttcatgaaaacagctcaggctcacagaagggcagaaactttgattttcagccgccatgctgtgattgccgtccgaaatggcaagctgtgcttcatgttccgagtgggtgacctgaggaaaagcatgatcattagtgcctctgtgcgcatccaggtggtcaagaaaacaactacacctgaaggggaggtggttcctattcaccaactggacattcctgttgataacccaatcgagagcaataacatttttctggtggcccctttgatcatctgccacgtgattgacaagcgcagtcccctgtatgacatctcagcaactgacctggccaaccaagacttggaggtcatagttattctggaaggagtggttgaaactactggcatcaccacacaagcacgaacctcctacattgctgaggagatccaatggggccaccgctttgtgtccattgtgactgaggaagaaggagtgtattctgtggattactccaaatttggcaacactgttaaagtagctgctccacggtgcagtgcccgagagctggatgagaaaccttccatccttattcagaccctccaaaagagtgaactgtctcatcaaaattctctgaggaagcgcaactccatgagaagaaacaattccatgaggaggaacaattctatccgaaggaacaattcttccctcatggtaccaaaggtgcaatttatgactccagaaggaaatcaaaacacatcggaatcatgacagcaagataaccccaagacagtcttttatcaagttttgacggtttatgctgggcactgccagactgaaccagagctggaacacaataatgtgtccttctacattttattacactaaatgatattcatattcaagcaacagcactttctgtagtaataaaaagtaacacaccaagtggaggattcatggcttatgcttgtttcatacatgtagaattcgcagtgatatacttaagttatgtgcaggggtgggtatgctcgtttctctcaatttgaaacacaagaattacactaatagtaacaggccttgagcacaaaatttggtcaagaaatgagtctgtttgaaatgcttagttggtgaaacccagatcgctgtgttactaatgatcactctggaaatgcaaatagaataggaggggaaaaaacaaaatcatgttaatgcgttttgtacatcagccttctcctgtctccatgataactgcatttggtaggaagcctgaggcaaaaactgcttaagtggatctgtttgtaagtggattcagttcattcgctttgtctgtcggtgactcctgaaggtttcctggtccatctcattgcggcctgttgggcagagctggacaaggtgtctttgaaggaaagctaagtcttgtctcatttaggactgggttccccacagtgacagtcacttccttcagcatctcacttcttcttctagaatccccacagggaaatactgtattgaatattttattaaaacattttctttgta

SEQ ID NO: 13592 - DNA, 3176 bp, Homo sapiens
ggaggtccgcaggccgcggggaagccgagggctgccggagaaccctgcaggtgtcactcgggacgcggaagtgcgcttgccgaggtttgccttacaatacgcttgagactccccgacaagcgtaatttggtcgagttcgacgggaaagtactctccccaccccagcgccggccgcgtagtccgaggttactgtccccggcgcgtcctctgttgccccagtccagaggctgcccttgaacccgggcgcgcacgagcgcagggcatccgaggcgacagccctggcacggcccgacctgtacccagcctggcaggaagactgtaatcgtgggaatacagctacctacccaggcaatatgaagattttatttgtagaacctgccattttccttagtgcatttgctatgactttgaccggtccactgacaacgcaatatgtttatcggagaatatgggaagaaactggcaactacactttttcatctgatagcaatatttctgagtgtgaaaaaaacaaaagcagcccaatttttgcattccaggaggaagttcagaaaaaagtgtcacgttttaatctgcagatggacataagtggattaattcctggtctagtgtctacattcatacttttgtctattagtgatcactacggacgaaaattccctatgattttgtcttccgttggtgctcttgcaaccagcgtttggctctgtttgctttgctattttgcctttccattccagcttttgattgcatctaccttcattggtgcattttgtggcaattataccacattttggggagcttgctttgcctatatagttgatcagtgtaaagaacacaaacaaaaaacaattcgaatagctatcattgactttctacttggacttgttactggactaacaggactgtcatctggctattttattagagagctaggttttgagtggtcgtttctaattattgctgtgtctcttgctgttaatttgatctatattttattttttctcggagatccagtgaaagagtgttcatctcagaatgttactatgtcatgtagtgaaggcttcaaaaacctattttaccgaacttacatgctttttaagaatgcttctggtaagagacgatttttgctctgtttgttactttttacagtaatcacttatttttttgtggtaattggcattgccccaatttttatcctttatgaattggattcaccactctgctggaatgaagtttttataggttatggatcagctttgggtagtgcctcttttttgactagtttcctaggaatatggcttttttcttattgtatggaagatattcatatggccttcattgggatttttaccacgatgacaggaatggctatgaccgcgtttgccagtacaacactgatgatgtttttagccagggtgccgttccttttcactattgtgccattctctgttctacggtccatgttgtcaaaagtggttcgttcgactgaacaaggtaccctgtttgcttgtattgctttcttagaaacacttggaggagtcactgcagtttctacttttaatggaatttactcagccactgttgcttggtaccctggcttcactttcctgctgtctgctggtctgttactacttccagccatcagtctatgtgttgtcaagtgtaccagctggaatgagggaagctatgaacttcttatacaagaagaatccagtgaagatgcttcagacaggtgactgtgatttaaacaaacaaaaaaaatctatgaatgcacatatcatataccatgacttctgaagactataaatgaattccacaatcagtgcttcactgagaaccaattttacctatcttttcttctaaactgaacagtcagagagacagctcctggctttagcttcttgtggtaccacgcactttgagcactttgtgcgtatcatgcaatatacttgcaatacacagaacaaatttcaaatacgcctcacttttagacttagaagagaaacattaaaacttaagggtgtaaggagggatcaagaaacttgataaggtcaaaagcaataatctctctgacatattccaggctcttacactgagaccaaagagaaatctttacctcagtttcttcatcagcagaatgggtttctggcctctctcagggataattttgaaggcataatgaaaattatgatgaatcactcattggtaggaaaataatgatataagtttcaaatatgtataattttacctatacttggtaatgctttgttttatagagcctgttaagctgctattgatagtcggagcttatatactgtgacttctgaagactatacatgaattccacaatcagtgctttgttgatacaaaatccttaaaagggaggcactttaaagaatatgtatttttcacttttcttaatatgtttcatcggtgacaggcatgataatatttctatatgtaatgggtaattgggaaaaaatagatgataaataaaattgctctaaagaagttaaaaaactgaatgaacagctaatactggtataaagtaactaatgtttggagccaacatttgttccttgtgtcagcaaaaggatattcacattccatgatccctggctgagaattctgcctctagtctttcttacccagctgttgtctatccttgttcaattataaatactgctaagggcatttttaaaatacgatcttgtactccttaaatttgaatccgtcggcacggtcactcataggaaaatgatcaaacaagcaagccagtcatgatttgactccttcccatctcatttcttactgccttacgctcatcctgaggtccaccttggtctctaaaaacaccatgtgttctcatgcctccatgtcttttcacacactgttccatttgctcttcctcccacattacattgaaactttcaagcctcagtcgaaacattgcttcttctggatagcagccttcttgacatccctcctcactccccagtccctacagggcttccatagctctttatgtgcacttcgatcccagcattttccatcgacctgtaattgtttctgctacctgacaatcatcgccttgagtactgggacaacctttgattactcattatatcctcaataaatatttgttgaactaaaaaaaaaaaaaaaaaaaaaaa

SEQ ID NO: 13593 - DNA, 3982 bp, Homo sapiens
cgcggcggcggcagcggcggcggctacaccgggcttggccccctccctcctccgttcccccctcctcccccctcccctcagcggtggctcccaagaagtccgagacacgcggatcaactcactatcctgaaggtccattctcccaagaagaggggacagaaagacagatctatttgtaagaaaggcttgggtatcccatgaacgagccaacagaaaaccgattggggtgcagcaggactccagagccagatataaggctcagaaaagggcaccaactggatggtacacgaagaggtgataatgacagccaccaaggagatttggagcccattttagaggcatctgttctatcttcccatcataaaaaaagctctgaggaacatgaatacagtgatgaagctcctcaggaagatgagggctttatgggcatgtcccctctcttacaagcccatcatgctatggaaaaaatggaagaatttgtttgtaaggtatgggaaggtcggtggcgagtgatccctcatgatgtactaccagactggctcaaggataatgacttcctcttgcatggacaccggcctcctatgccttctttccgggcctgttttaagagcattttcagaatacacacagaaacaggcaacatttggacacatctcttaggttgtgtattcttcctgtgcctggggatcttttatatgtttcgcccaaatatctcctttgtggcccctctgcaagagaaggtggtctttggattatttttcttaggagccattctctgcctttctttttcatggctcttccacacagtctactgccactcagagggggtctctcggctcttctctaaactggattactctggtattgctcttctgattatgggaagttttgttccttggctttattattctttctactgtaatccacaaccttgcttcatctacttgattgtcatctgtgtgctgggcattgcagccattatagtctcccagtgggacatgtttgccacccctcagtatcggggagtaagagcaggagtgtttttgggcctaggcctgagtggaatcattcctaccttgcactatgtcatctcggaggggttccttaaggccgccaccatagggcagataggctggttgatgctgatggccagcctctacatcacaggagctgccctgtatgctgcccggatccccgaacgctttttccctggcaaatgtgacatctggtttcactctcatcagctgtttcatatctttgtggttgctggagcttttgttcacttccatggtgtctcaaacctccaggagtttcgtttcatgatcggcgggggctgcagtgaagaggatgcactgtgatacctaccagtctccagggactatgaccctaaaccagggcctgcggcacttgcgggcctccctgctggctactgatgccagtaccagaggagccccaaaactttgacagcctcgtgggctttgtgacggcccaggggctctgcgtggtacatgactgagaagagaaaaacaaaaataaatcatacctcaaaggatggagtgcatcaattgggagaaaaggagacatagcccaaaccctggcttattcttgggatctactgattgcgggctctgcaagacccttggcaaactggcttctgatccatatcatatttatttgtagaagatggcgaaacagtttagctggtggttctttcttctccctttctctctctctatgacaataatacaaaccaatttaagtgaacatttatatccgataaggggtgggagtgtgattttaaatgctcttttgggagaacaaagaaattaatgtaaataagatttctaactgtttaaataagactttatataaatgtttaaaacataggggtaagggagggagggagaatttttgtatagaatgaaacatgcaagtaccacacactgtttgaattttgcacaaaaagtgactgtaggatcaggtgatagccccggaatgtacagtgtcttggtgcaccaagatgccttctaaaggctgacataccttggaccctaatggggcagagagtatagccctagcccagtggtgacatgaccactccctttgggaggcctgaggtagaggggagtggtatgtgttttctcagtggaagcagcacatgagtgggtgacaggatgttagataaaggctctagttagggtgtcattgtcatttgagagactgacacactcctagcagctggtaaaggggtgctggaggccatggaggagctctagaaacattagcatgggctgatctgattacttcctggcatcccgctcacttttatgggaagtcttattagagggatgggacagttttccatatccttgctgtggagctctggaacactctctaaatttccctctattaaaaatcactgccctaactacacttcctccttgagggaatagaaatggacctttctctgacatagttcttggcatgggagccagccacaaatgagattctgacgtgtccaggtttctcctgagctcatctacatagattggtagacccttcctttggattaggaaagatgagttttacctctggtacactgtcttggtaagcctggatgtgacagacacctcggctctccttgaataagaaagccagcagaactcttaaagccagttgtagtacggagttgtcagcactcactgaacctcactttacagggataagagtggtgtggcattttaaatacaatggtatgttattgccagggagtgaggtacaagacgatggctcatgtcacaggcctacctgatacggtgtcagagaaagtggtggggaaaggatctggttcatggaattctgatcttggcccataggtgaaccaccaaaatagtgctcgagtcttaggttactgtcatcaaagacttgggatgactccattatatcctggggttgtgggtattagaactaaatatggaggtcctgagcatggggactggcgtcctcagtaggtgtttgggaatatgggaagggtctcctatttattcaatagagttttctcagttattttcctcccttgcccttgcaatctccagcaaaaggtgggatctaggaagaaagaatccagtgtagaagttgagaagaacttgaacgttttggttctggataaggtcactgtcctaggtgctaggtggaccgagcaaaagactcagtggatgaactggtgcagtgcctgacagaataaagaacagtattaatccctttgagaaagcatagtccagcaggacagtggccatttggacagaagcccacttagtttcttgggagcaacagcacgtatcagaagccagacttgctcttcggtcatgcactttgggatacagcgtataggtgcagccctgtcacaacaccaacagaagtagcagcctctgggtgcagtcacccacaccccaaagctggaaggatctggttcaacatagcacaaacccttaggaaaaatgaaattaacatcactgatgtgtaatccagtaaaatctccctttttcgggtgtgtatgtgggcatgtgcccatttctatgtgtgtgtctacgtgcagctcactaccaacagcctcatgtgcacttgacctgacagtgctcgctgagaactctcaccaggttggcgcctgaatgccttactctcagcagtcagaggcttgcttgctctgtgcagatttttaattttcttttttggccctaggctggttgggacctctacagcttcattctttcaccattaaatagtggcctttttcagtattttccctcttcccctttataaattatgctaaagccacaaagcacatttttggggatcatagaaggttggggttccagaaaggcatctgtgtgatggttccattgatgtgggatttccctacttgctgtattctcagtttctaataaaaagaaccaaatgaaatatgaaaaaaaaaaaaaaaaaa

SEQ ID NO: 13594 - DNA, 6790 bp, Homo sapiens
cttctctcccagggcggtgcgacccggagctccagcgcccgagtctccacttcgtttgctgaaacttgctttctaccagctaagaaccatgctgcgagtgattgtggaatctgccagcaatatccctaaaacgaaatttggcaagccggatcctattgtttctgtcatttttaaggatgagaaaaagaaaacaaagaaagttgataatgaattgaaccctgtctggaatgagattttggagtttgacttgaggggtataccactggacttttcatcttcccttgggattattgtgaaagattttgagacaattggacaaaataaattaattggcacggcgactgtagccctgaaggacctgactggtgaccagagcagatccctgccgtacaagctgatctccctgctaaatgaaaaagggcaagatactggggccaccattgacttggtgatcggctatgatccgccttctgctccacatccaaatgacctgagcgggcccagcgtgccaggcatgggaggagatggggaagaagatgaaggtgatgaagacaggttggacaatgcagtcaggggccctgggcccaaggggccagttgggacggtgtcggaagctcagcttgctcggaggctcaccaaagtaaagaacagccggcggatgctgtcaaataagccacaggacttccagatccgcgtccgagtgattgagggccgacagttaagtggtaacaacataaggcctgtggtcaaagttcacgtctgtggccagacacaccgaacaagaatcaagagaggaaacaaccctttttttgatgagttgtttttctacaatgtcaacatgaccccttctgaattgatggatgagatcatcagcatccgggtttataattctcactctctgcgggcagattgtctgatgggggaatttaagattgatgttggatttgtttatgatgaacctggccatgctgtcatgagaaagtggcttcttctcaatgacccggaagataccagttcaggttctaaaggttatatgaaagtcagcatgtttgtcctgggaaccggagatgagcctcctcctgagagacgagatcgtgataatgacagtgatgatgtggagagtaatttgttactccctgctggcattgccctccggtgggtgaccttcttgctgaaaatctaccgagctgaggacatcccccagatggatgatgccttctcacagacagtaaaggaaatatttggaggcaatgcagataagaaaaatctcgtggatccttttgtagaagtttcctttgctggaaaaaaggtttgtacaaacataattgagaaaaatgcaaacccagagtggaatcaggtcgtcaatcttcagatcaagtttccttcagtgtgtgaaaaaataaaactaacaatatatgactgggaccgtcttactaaaaatgatgtagttggaacaacatatctacacctctctaaaattgctgcctctggtggggaagtggaagtaaacacaggagaaacagaggtaggctttgttccaacgtttggaccttgttacctgaatctttatggaagccccagggagtacacgggattcccagacccctatgatgagctgaatactggaaagggggaaggagttgcctacagaggcaggatcttggttgaattagccacttttcttgagaagacaccaccagataaaaagcttgagcccatttcaaatgatgacctgctggttgttgagaaataccagcgaaggcggaagtacagcctgtctgccgtgtttcattcagccaccatgttgcaagatgttggtgaggccattcagtttgaagtcagcattgggaactatggcaacaagtttgacaccacctgtaagcctttggcatcaacaactcagtacagccgtgctgtatttgatggcaactactattattacttgccttgggcccacaccaagccagttgttaccctgacttcatactgggaggatattagtcatcgcctggatgcggtgaacactctcctagctatggcagaacggctgcaaacaaatatagaagctctaaaatcagggatacaaggtaaaattcctgcaaaccagctggctgaattgtggctgaagctgatagatgaagttatagaagacacgagatacacgttgcctctcacagaaggaaaagccaacgtcacagttctcgatactcagatccgaaagctgcggtccaggtctctctcccaaatacatgaggcggctgtgaggatgaggtcggaagccacagatgtgaagtccacactggcagaaattgaggactggcttgataaattaatgcagctgactgaagagccacagaacagcatgcctgacatcatcatctggatgatccggggagagaagagactggcctatgcacgaattcccgcacatcaggtcttgtactccaccagtggtgagaatgcatctggaaaatactgtgggaaaacccaaaccatctttctgaagtatccacaggagaaaaacaacgggccaaaggtgcctgtggagttgcgagtgaacatctggctaggcttaagtgctgtggagaagaagtttaacagcttcgcagaaggaactttcaccgtctttgctgaaatgtatgaaaatcaagctctcatgtttggaaaatggggtacttctggattagtaggacgtcataagttttctgatgtcacaggaaaaataaaactcaagagggaattttttctgcctccaaaaggctgggaatgggaaggagagtggatagttgatcctgaaagaagcttgctgactgaggcagatgcaggtcacacggagttcactgatgaagtctatcagaacgagagccgctaccccgggggcgactggaagccggccgaggacacctacacggatgcgaacggcgataaagcagcatcacccagcgagttgacttgtcctccaggttgggaatgggaagatgatgcatggtcttatgacataaatcgagcggtggatgagaaaggctgggaatatggaatcaccattcctcctgatcataagcccaaatcctgggttgcagcagagaaaatgtaccacactcatagacggcgaaggctggtccgaaaacgcaagaaagatttaacacagactgcttcaagcaccgcaagggccatggaggaattgcaagaccaagagggctgggaatatgcttctctaattggctggaaatttcactggaaacaacgtagttcagataccttccgccgcagacgctggaggagaaaaatggctccttcagaaacacatggtgcagctgccatctttaaacttgaaggtgcccttggggcagacactaccgaagatggggatgagaagagcctggagaaacagaagcacagtgccaccactgtgttcggagcaaacacccccattgtttcctgcaattttgacagagtctacatctaccatctgcgctgctatgtctatcaagccagaaacctcttggctttagataaggatagcttttcagatccatatgctcatatctgtttcctccatcggagcaaaaccactgagatcatccattcaaccctgaatcccacgtgggaccaaacaattatattcgatgaagttgaaatctatggggaaccccaaacagttctacagaatccacccaaagttatcatggaactttttgacaatgaccaagtgggcaaagatgaatttttaggacgaagcattttctctcctgtggtgaaactgaactcagaaatggacatcacacccaaacttctctggcacccagtaatgaatggagacaaagcctgcggggatgttcttgtaactgcagagctgattctgaggggcaaggatggctccaaccttcccattcttccccctcaaagggcgccaaatctatacatggtcccccaggggatcaggcctgtggtccagctcactgccattgagattctagcttggggcttaagaaatatgaaaaacttccagatggcttctatcacatcccccagtcttgttgtggagtgtggaggagaaagggtggaatcggtggtgatcaaaaaccttaagaagacacccaactttccaagttctgttctcttcatgaaagtgttcttgcccaaggaggaattgtacatgcccccactggtgatcaaggtcatcgaccacaggcagtttgggcggaagcctgtcgtcggccagtgcaccatcgagcgcctggaccgctttcgctgtgacccttatgcagggaaagaggacatcgtcccacagctcaaagcctcccttctgtctgccccaccatgccgggacatcgttatcgaaatggaagacaccaaaccattactggcttctaagctgacagaaaaggaggaagaaatcgtggactggtggagtaaattttatgcttcctcaggggaacatgaaaaatgcggacagtatattcagaaaggctattccaagctcaagatatataattgtgaactagaaaatgtagcagaatttgagggcctgacagacttctcagatacgttcaagttgtaccgaggcaagtcggatgaaaatgaagatccttctgtggttggagagtttaagggctcctttcggatctaccctctgccggatgaccccagcgtgccagcccctcccagacagtttcgggaattacctgacagcgtcccacaggaatgcacggttaggatttacattgttcgaggcttagagctccagccccaggacaacaatggcctgtgtgacccttacataaaaataacactgggcaaaaaagtcattgaagaccgagatcactacattcccaacactctcaacccagtctttggcaggatgtacgaactgagctgctacttacctcaagaaaaagacctgaaaatttctgtctatgattatgacacctttacccgggatgaaaaagtaggagaaacaattattgatctggaaaaccgattcctttcccgctttgggtcccactgcggcataccagaggagtactgtgtttctggagtcaatacctggcgagatcaactgagaccaacacagctgcttcaaaatgtcgccagattcaaaggcttcccacaacccatcctttccgaagatgggagtagaatcagatatggaggacgagactacagcttggatgaatttgaagccaacaaaatcctgcaccagcacctcggggcccctgaagagcggcttgctcttcacatcctcaggactcaggggctggtccctgagcacgtggaaacaaggactttgcacagcaccttccagcccaacatttcccagggaaaacttcagatgtgggtggatgttttccccaagagtttggggccaccaggccctcctttcaacatcacaccccggaaagccaagaaatactacctgcgtgtgatcatctggaacaccaaggacgttatcttggacgagaaaagcatcacaggagaggaaatgagtgacatctacgtcaaaggctggattcctggcaatgaagaaaacaaacagaaaacagatgtccattacagatctttggatggtgaagggaattttaactggcgatttgttttcccgtttgactaccttccagccgaacaactctgtatcgttgcgaaaaaagagcatttctggagtattgaccaaacggaatttcgaatcccacccaggctgatcattcagatatgggacaatgacaagttttctctggatgactacttgggtttcctagaacttgacttgcgtcacacgatcattcctgcaaaatcaccagagaaatgcaggttggacatgattccggacctcaaagccatgaacccccttaaagccaagacagcctccctctttgagcagaagtccatgaaaggatggtggccatgctacgcagagaaagatggcgcccgcgtaatggctgggaaagtggagatgacattggaaatcctcaacgagaaggaggccgacgagaggccagccgggaaggggcgggacgaacccaacatgaaccccaagctggacttaccaaatcgaccagaaacctccttcctctggttcaccaacccatgcaagaccatgaagttcatcgtgtggcgccgctttaagtgggtcatcatcggcttgctgttcctgcttatcctgctgctcttcgtggccgtgctcctctactctttgccgaactatttgtcaatgaagattgtaaagccaaatgtgtaacaaaggcaaaggcttcatttcaagagtcatccagcaatgagagaatcctgcctctgtagaccaacatccagtgtgattttgtgtctgagaccacaccccagtagcaggttacgccatgtcaccgagccccattgattcccagagggtcttagtcctggaaagtcaggccaacaagcaacgtttgcatcatgttatctcttaagtattaaaagttttattttctaaagtttaaatcatgtttttcaaaatatttttcaaggtggctggttccatttaaaaatcatctttttatatgtgtcttcggttctagacttcagcttttggaaattgctaaatagaattcaaaaatctctgcatcctgaggtgatatacttcatatttgtaatcaactgaaagagctgtgcattataaaatcagttagaatagttagaacaattcttatttatgcccacaaccattgctatattttgtatggatgtcataaaagtctatttaacctctgtaatgaaactaaataaaaatgtttcacctttaaaaaaaaaaaaaaaaaaaaaa

SEQ ID NO: 13595 - DNA, 6829 bp, Homo sapiens
cttctctcccagggcggtgcgacccggagctccagcgcccgagtctccacttcgtttgctgaaacttgctttctaccagctaagaaccatgctgcgagtgattgtggaatctgccagcaatatccctaaaacgaaatttggcaagccggatcctattgtttctgtcatttttaaggatgagaaaaagaaaacaaagaaagttgataatgaattgaaccctgtctggaatgagattttggagtttgacttgaggggtataccactggacttttcatcttcccttgggattattgtgaaagattttgagacaattggacaaaataaattaattggcacggcgactgtagccctgaaggacctgactggtgaccagagcagatccctgccgtacaagctgatctccctgctaaatgaaaaagggcaagatactggggccaccattgacttggtgatcggctatgatccgccttctgctccacatccaaatgacctgagcgggcccagcgtgccaggcatgggaggagatggggaagaagatgaaggtgatgaagacaggttggacaatgcagtcaggggccctgggcccaaggggccagttgggacggtgtcggaagctcagcttgctcggaggctcaccaaagtaaagaacagccggcggatgctgtcaaataagccacaggacttccagatccgcgtccgagtgattgagggccgacagttaagtggtaacaacataaggcctgtggtcaaagttcacgtctgtggccagacacaccgaacaagaatcaagagaggaaacaaccctttttttgatgagttgtttttctacaatgtcaacatgaccccttctgaattgatggatgagatcatcagcatccgggtttataattctcactctctgcgggcagattgtctgatgggggaatttaagattgatgttggatttgtttatgatgaacctggccatgctgtcatgagaaagtggcttcttctcaatgacccggaagataccagttcaggttctaaaggttatatgaaagtcagcatgtttgtcctgggaaccggagatgagcctcctcctgagagacgagatcgtgataatgacagtgatgatgtggagagtaatttgttactccctgctggcattgccctccggtgggtgaccttcttgctgaaaatctaccgagctgaggacatcccccagatggatgatgccttctcacagacagtaaaggaaatatttggaggcaatgcagataagaaaaatctcgtggatccttttgtagaagtttcctttgctggaaaaaaggtttgtacaaacataattgagaaaaatgcaaacccagagtggaatcaggtcgtcaatcttcagatcaagtttccttcagtgtgtgaaaaaataaaactaacaatatatgactgggaccgtcttactaaaaatgatgtagttggaacaacatatctacacctctctaaaattgctgcctctggtggggaagtggaagatttctcatcttcgggaactggggctgcatcatatacagtaaacacaggagaaacagaggtaggctttgttccaacgtttggaccttgttacctgaatctttatggaagccccagggagtacacgggattcccagacccctatgatgagctgaatactggaaagggggaaggagttgcctacagaggcaggatcttggttgaattagccacttttcttgagaagacaccaccagataaaaagcttgagcccatttcaaatgatgacctgctggttgttgagaaataccagcgaaggcggaagtacagcctgtctgccgtgtttcattcagccaccatgttgcaagatgttggtgaggccattcagtttgaagtcagcattgggaactatggcaacaagtttgacaccacctgtaagcctttggcatcaacaactcagtacagccgtgctgtatttgatggcaactactattattacttgccttgggcccacaccaagccagttgttaccctgacttcatactgggaggatattagtcatcgcctggatgcggtgaacactctcctagctatggcagaacggctgcaaacaaatatagaagctctaaaatcagggatacaaggtaaaattcctgcaaaccagctggctgaattgtggctgaagctgatagatgaagttatagaagacacgagatacacgttgcctctcacagaaggaaaagccaacgtcacagttctcgatactcagatccgaaagctgcggtccaggtctctctcccaaatacatgaggcggctgtgaggatgaggtcggaagccacagatgtgaagtccacactggcagaaattgaggactggcttgataaattaatgcagctgactgaagagccacagaacagcatgcctgacatcatcatctggatgatccggggagagaagagactggcctatgcacgaattcccgcacatcaggtcttgtactccaccagtggtgagaatgcatctggaaaatactgtgggaaaacccaaaccatctttctgaagtatccacaggagaaaaacaacgggccaaaggtgcctgtggagttgcgagtgaacatctggctaggcttaagtgctgtggagaagaagtttaacagcttcgcagaaggaactttcaccgtctttgctgaaatgtatgaaaatcaagctctcatgtttggaaaatggggtacttctggattagtaggacgtcataagttttctgatgtcacaggaaaaataaaactcaagagggaattttttctgcctccaaaaggctgggaatgggaaggagagtggatagttgatcctgaaagaagcttgctgactgaggcagatgcaggtcacacggagttcactgatgaagtctatcagaacgagagccgctaccccgggggcgactggaagccggccgaggacacctacacggatgcgaacggcgataaagcagcatcacccagcgagttgacttgtcctccaggttgggaatgggaagatgatgcatggtcttatgacataaatcgagcggtggatgagaaaggctgggaatatggaatcaccattcctcctgatcataagcccaaatcctgggttgcagcagagaaaatgtaccacactcatagacggcgaaggctggtccgaaaacgcaagaaagatttaacacagactgcttcaagcaccgcaagggccatggaggaattgcaagaccaagagggctgggaatatgcttctctaattggctggaaatttcactggaaacaacgtagttcagataccttccgccgcagacgctggaggagaaaaatggctccttcagaaacacatggtgcagctgccatctttaaacttgaaggtgcccttggggcagacactaccgaagatggggatgagaagagcctggagaaacagaagcacagtgccaccactgtgttcggagcaaacacccccattgtttcctgcaattttgacagagtctacatctaccatctgcgctgctatgtctatcaagccagaaacctcttggctttagataaggatagcttttcagatccatatgctcatatctgtttcctccatcggagcaaaaccactgagatcatccattcaaccctgaatcccacgtgggaccaaacaattatattcgatgaagttgaaatctatggggaaccccaaacagttctacagaatccacccaaagttatcatggaactttttgacaatgaccaagtgggcaaagatgaatttttaggacgaagcattttctctcctgtggtgaaactgaactcagaaatggacatcacacccaaacttctctggcacccagtaatgaatggagacaaagcctgcggggatgttcttgtaactgcagagctgattctgaggggcaaggatggctccaaccttcccattcttccccctcaaagggcgccaaatctatacatggtcccccaggggatcaggcctgtggtccagctcactgccattgagattctagcttggggcttaagaaatatgaaaaacttccagatggcttctatcacatcccccagtcttgttgtggagtgtggaggagaaagggtggaatcggtggtgatcaaaaaccttaagaagacacccaactttccaagttctgttctcttcatgaaagtgttcttgcccaaggaggaattgtacatgcccccactggtgatcaaggtcatcgaccacaggcagtttgggcggaagcctgtcgtcggccagtgcaccatcgagcgcctggaccgctttcgctgtgacccttatgcagggaaagaggacatcgtcccacagctcaaagcctcccttctgtctgccccaccatgccgggacatcgttatcgaaatggaagacaccaaaccattactggcttctaagctgacagaaaaggaggaagaaatcgtggactggtggagtaaattttatgcttcctcaggggaacatgaaaaatgcggacagtatattcagaaaggctattccaagctcaagatatataattgtgaactagaaaatgtagcagaatttgagggcctgacagacttctcagatacgttcaagttgtaccgaggcaagtcggatgaaaatgaagatccttctgtggttggagagtttaagggctcctttcggatctaccctctgccggatgaccccagcgtgccagcccctcccagacagtttcgggaattacctgacagcgtcccacaggaatgcacggttaggatttacattgttcgaggcttagagctccagccccaggacaacaatggcctgtgtgacccttacataaaaataacactgggcaaaaaagtcattgaagaccgagatcactacattcccaacactctcaacccagtctttggcaggatgtacgaactgagctgctacttacctcaagaaaaagacctgaaaatttctgtctatgattatgacacctttacccgggatgaaaaagtaggagaaacaattattgatctggaaaaccgattcctttcccgctttgggtcccactgcggcataccagaggagtactgtgtttctggagtcaatacctggcgagatcaactgagaccaacacagctgcttcaaaatgtcgccagattcaaaggcttcccacaacccatcctttccgaagatgggagtagaatcagatatggaggacgagactacagcttggatgaatttgaagccaacaaaatcctgcaccagcacctcggggcccctgaagagcggcttgctcttcacatcctcaggactcaggggctggtccctgagcacgtggaaacaaggactttgcacagcaccttccagcccaacatttcccagggaaaacttcagatgtgggtggatgttttccccaagagtttggggccaccaggccctcctttcaacatcacaccccggaaagccaagaaatactacctgcgtgtgatcatctggaacaccaaggacgttatcttggacgagaaaagcatcacaggagaggaaatgagtgacatctacgtcaaaggctggattcctggcaatgaagaaaacaaacagaaaacagatgtccattacagatctttggatggtgaagggaattttaactggcgatttgttttcccgtttgactaccttccagccgaacaactctgtatcgttgcgaaaaaagagcatttctggagtattgaccaaacggaatttcgaatcccacccaggctgatcattcagatatgggacaatgacaagttttctctggatgactacttgggtttcctagaacttgacttgcgtcacacgatcattcctgcaaaatcaccagagaaatgcaggttggacatgattccggacctcaaagccatgaacccccttaaagccaagacagcctccctctttgagcagaagtccatgaaaggatggtggccatgctacgcagagaaagatggcgcccgcgtaatggctgggaaagtggagatgacattggaaatcctcaacgagaaggaggccgacgagaggccagccgggaaggggcgggacgaacccaacatgaaccccaagctggacttaccaaatcgaccagaaacctccttcctctggttcaccaacccatgcaagaccatgaagttcatcgtgtggcgccgctttaagtgggtcatcatcggcttgctgttcctgcttatcctgctgctcttcgtggccgtgctcctctactctttgccgaactatttgtcaatgaagattgtaaagccaaatgtgtaacaaaggcaaaggcttcatttcaagagtcatccagcaatgagagaatcctgcctctgtagaccaacatccagtgtgattttgtgtctgagaccacaccccagtagcaggttacgccatgtcaccgagccccattgattcccagagggtcttagtcctggaaagtcaggccaacaagcaacgtttgcatcatgttatctcttaagtattaaaagttttattttctaaagtttaaatcatgtttttcaaaatatttttcaaggtggctggttccatttaaaaatcatctttttatatgtgtcttcggttctagacttcagcttttggaaattgctaaatagaattcaaaaatctctgcatcctgaggtgatatacttcatatttgtaatcaactgaaagagctgtgcattataaaatcagttagaatagttagaacaattcttatttatgcccacaaccattgctatattttgtatggatgtcataaaagtctatttaacctctgtaatgaaactaaataaaaatgtttcacctttaaaaaaaaaaaaaaaaaaaaaa

SEQ ID NO: 13596 - DNA, 2434 bp, Homo sapiens
tgtctgcctggtggccactagagacagcccagcctgggccatggaagaaaacccgaccttggaatcagaagcctggggctcctctagggggtggctggccccccgggaggccagaggaggcccatcgctgtcttctgtgctgaacgagctgcccagtgctgccacccttcggtaccgagaccctggggtgctgccttggggggcgctggaggaggaggaggaggatggaggaaggagcagaaaggccttcacagaagtcacccagacagagctgcaggaccctcacccttcccgggaactgccctggcccatgcaggccagacgggcacacaggcaaagaaatgccagcagggaccaggtggtctatggctctggaactaagacggaccgatgggcgcggctacttcggaggtccaaggagaaaacaaaggaaggcttgcgaagcctgcagccctgggcgtggacactgaagaggatcgggggccagtttggcgccggcacggagtcctacttctccctgctgcgcttcctgctccttcttaacgtgctggcctctgtgctcatggcctgcatgacgctgctgcccacctggttgggaggcgctcccccaggccctcccggccccgacatctcctcgccctgcggctcctataacccccactcccagggcctggtcacctttgccacccagctcttcaacttgctctcgggtgagggttacctggaatggtcccctctcttctatggcttctacccgccccgcccacgcctggcggtcacctacctgtgctgggcctttgccgttggcctcatctgcctcctgctcatcctgcatcgctcggtgtctgggctgaagcagacactgctggcggagtccgaggctctgaccagctacagccaccgggtgttctcggcctgggacttcggtctctgcggggacgtccacgtgcggctgcgccagcgcatcatcttgtacgaattaaaggtggagctggaggagacagtggtgcggcgccaggctgcggtgcggacgctgggccagcaagccagggtttggttggtgcgggtgctgctcaacctgctggtggtcgcgctcctgggggcagccttctatggcgtctactgggctacggggtgcaccgtggagctgcaggagatgccccttgtccaggagttgccactgctgaagcttggggtgaattaccttccgtccatcttcatcgctggggtcaattttgtgctgccgcccgtgttcaagctcattgctccactggagggctacactcggagtcgccagatcgtttttatcctgctcaggaccgtgtttcttcgcctcgcctccctggtggtcctgctcttctctctctggaatcagatcacttgtgggggcgactccgaggctgaggactgcaaaacctgtggctacaattacaaacaacttccgtgctgggagactgtcctgggccaggaaatgtacaaacttctgctctttgatctgctgactgtcttggcagtcgcgctgctcatccagtttcctagaaagctcctctgtggcctctgtcctggggcgctgggtcgtctggcggggacccaggagttccaggtgcccgacgaggtgctggggctcatctacgcgcagacggtggtctgggtggggagttttttctgccctttactgcccctgcttaacacggtcaagttcctgctgcttttctacctgaagaagcttaccctcttctccacctgctccccggctgcccgcaccttccgggcctccgcggcgaatttctttttccccttggtccttctcctgggtctggccatctccagcgttcccctgctttacagcatcttcctgatcccgccttctaagctttgtggtccattccgggggcagtcgtccatctgggcccagatccctgagtctatttccagcctccctgagaccacccagaatttcctcttcttcctggggacccaggcttttgctgtgccccttctgctgatctccagcatcctgatggcgtacactgtggctctggctaactcctacggacgcctcatctctgagctcaaacgtcagagacagacggaggcgcagaataaagtcttcctggcacggcgcgctgtggcgctgacctccaccaaaccggctctttgacccccgcagcccacgtcccgctttcagaccccaggcccattgtaagcctaggtcacaacatctgtaaactaggagaactggagaagactccacgcccttccagctttggtatctggagatttccagggcccctcgccgccacgtccctgactctcgggtgatcttccttgtatcaataaatacagccgaggttgctgaaaaaaaaaaaaaaaaaaaaaaaaaaaaaaaaaaaaaaaaaaaaaaaaaaaaaaaaaaaaaaaaaaaaaaaaaaaa

SEQ ID NO: 13597 - DNA, 6310 bp, Homo sapiens
attcacaatgaatgtgaaattaaaagcatgatgtagtagtgacccaaaaggaatgtgaattctcctccagaacatgcagagacccatggatgaactgtgtttctagatttttcctccagctttcctgagagaaacaggtcaaaatgagcaagagacgcatgagcgtgggtcagcaaacatgggctcttctctgcaagaactgtctcaaaaaatggagaatgaaaagacagaccttgttggaatggctcttttcatttcttctggtactgtttctgtacctatttttctccaatttacatcaagttcatgacactcctcaaatgtcttcaatggatctgggacgtgtagatagttttaatgatactaattatgttattgcatttgcacctgaatccaaaactacccaagagataatgaacaaagtggcttcagccccattcctaaaaggaagaacaatcatggggtggcctgatgaaaaaagcatggatgaattggatttgaactattcaatagacgcagtgagagtcatctttactgataccttctcctaccatttgaagttttcttggggacatagaatccccatgatgaaagagcacagagaccattcagctcactgtcaagcagtgaatgaaaaaatgaagtgtgaaggttcagagttctgggagaaaggctttgtagcttttcaagctgccattaatgctgctatcatagaaatcgcaacaaatcattcagtgatggaacagctgatgtcagttactggtgtacatatgaagatattaccttttgttgcccaaggaggagttgcaactgattttttcattttcttttgcattatttctttttctacatttatatactatgtatcagtcaatgttacacaagaaagacaatacattacgtcattgatgacaatgatgggactccgagagtcagcattctggctttcctggggtttgatgtatgctggcttcatccttatcatggccactttaatggctcttattgtaaaatctgcacaaattgtcgtcctgactggttttgtgatggtcttcaccctctttctcctctatggcctgtctttgataactttagctttcctgatgagtgtgttgataaagaaacctttccttacgggcttggttgtgtttctccttattgtcttttgggggatcctgggattcccagcattgtatacacgtcttcctgcatttttggaatggactttgtgtcttcttagcccctttgccttcactgttgggatggcccagcttatacatttggactatgatgtgaattctaatgcccacttggattcttcacaaaatccatacctcataatagctactcttttcatgttggtttttgacacccttctgtatttggtattgacattatattttgacaaaattttgcccgctgaatatggacatcgatgttctcccttgtttttcctgaaatcctgtttttggtttcaacacggaagggctaatcatgtggtccttgagaatgaaacagattctgatcctacacctaatgactgttttgaaccagtgtctccagaattctgtgggaaagaagccatcagaatcaaaaatcttaaaaaagaatatgcagggaagtgtgagagagtagaagctttgaaaggtgtggtgtttgacatatatgaaggccagatcactgccctccttggtcacagtggagctggaaaaactaccctgttaaacatacttagtgggttgtcagttccaacatcaggttcagtcactgtctataatcacacactttcaagaatggctgatatagaaaatatcagcaagttcactggattttgtccacaatccaatgtgcaatttggatttctcactgtgaaagaaaacctcaggctgtttgctaaaataaaagggattttgccacatgaagtggagaaagaggtacaacgagttgtacaggaattagaaatggaaaatattcaagacatccttgctcaaaacttaagtggtggacaaaataggaaactaacttttgggattgccattttaggagatcctcaagttttgctattggatgaaccgactgctggattggatcctctttcaaggcaccgaatatggaatctcctgaaagaggggaaatcagacagagtaattctcttcagcacccagtttatagatgaggctgacattctggcggacaggaaggtgttcatatccaatgggaagctgaagtgtgcaggctcttctctgttccttaagaagaaatggggcataggctaccatttaagtttgcatctgaatgaaaggtgtgatccagagagtataacatcactggttaagcagcacatctctgatgccaaattgacagcacaaagtgaagaaaaacttgtatatattttgcctttggaaaggacaaacaaatttccagaactttacagggatcttgatagatgttctaaccaaggcattgaggattatggtgtttccataacaactttgaatgaggtgtttctgaaattagaaggaaaatcaactattgatgaatcagatattggaatttggggacaattacaaactgatggggcaaaagatataggaagccttgttgagctggaacaagttttgtcttccttccacgaaacaaggaaaacaatcagtggcgtggcgctctggaggcagcaggtctgtgcaatagcaaaagttcgcttcctaaagttaaagaaagaaagaaaaagcctgtggactatattattgctttttggtattagctttatccctcaacttttggaacatctattctacgagtcatatcagaaaagttacccgtgggaactgtctccaaatacatacttcctctcaccaggacaacaaccacaggatcctctgacccatttactggtcatcaataagacagggtcaaccattgataactttttacattcactgaggcgacagaacatagctatagaagtggatgcctttggaactagaaatggcacagatgacccatcttacaatggtgctatcattgtgtcaggtgatgaaaaggatcacagattttcaatagcatgtaatacaaaacggctgaattgctttcctgtcctcctggatgtcattagcaatggactacttggaatttttaattcgtcagaacacattcagactgacagaagcacattttttgaagagcatatggattatgagtatgggtaccgaagtaacaccttcttctggataccgatggcagcctctttcactccatacattgcaatgagcagcattggtgactacaaaaaaaaagctcattcccagctacggatttcaggcctctacccttctgcatactggtttggccaagcactggtggatgtttccctgtactttttgatcctcctgctaatgcaaataatggattatatttttagcccagaggagattatatttataattcaaaacctgttaattcaaatcctgtgtagtattggctatgtctcatctcttgttttcttgacatatgtgatttcattcatttttcgcaatgggagaaaaaatagtggcatttggtcatttttcttcttaattgtggtcatcttctcgatagttgctactgatctaaatgaatatggatttctagggctattttttggcaccatgttaatacctcccttcacattgattggctctctattcattttttctgagatttctcctgattccatggattacttaggagcttcagaatctgaaattgtatacctggcactgctaataccttaccttcattttctcatttttcttttcattctgcgatgcctagaaatgaactgcaggaagaaactaatgagaaaggatcctgtgttcagaatttctccaagaagcaacgctatttttccaaacccagaagagcctgaaggagaggaggaagatatccagatggaaagaatgagaacagtgaatgctatggctgtgcgagactttgatgagacacccgtcatcattgccagctgtctacggaaggaatatgcaggcaaaaagaaaaattgcttttctaaaaggaagaaaaaaattgccacaagaaatgtctctttttgtgttaaaaaaggtgaagttataggactgttaggacacaatggagctggtaaaagtacaactattaagatgataactggagacacaaaaccaactgcaggacaggtgattttgaaagggagcggtggaggggaacccctgggcttcctggggtactgccctcaggagaatgcgctgtggcccaacctgacagtgaggcagcacctggaggtgtacgctgccgtgaaaggtctcaggaaaggggacgcaatgatcgccatcacacggttagtggatgcgctcaagctgcaggaccagctgaaggctcccgtgaagaccttgtcagagggaataaagcgaaagctgtgctttgtgctgagcatcctggggaacccgtcagtggtgcttctggatgagccgtcgaccgggatggaccccgaggggcagcagcaaatgtggcaggtgattcgggccacctttagaaacacggagaggggcgccctcctgaccacccactacatggcagaggctgaggcggtgtgtgaccgagtggccatcatggtgtcaggaaggctgagatgtattggttccatccaacacctgaaaagcaaatttggcaaagactacctgctggagatgaagctgaagaacctggcacaaatggagcccctccatgcagagatcctgaggcttttcccccaggctgctcagcaggaaaggttctcctccctgatggtctataagttgcctgttgaggatgtgcgacctttatcacaggctttcttcaaattagagatagttaaacagagtttcgacctggaggagtacagcctctcacagtctaccctggagcaggttttcctggagctctccaaggagcaggagctgggtgatcttgaagaggactttgatccctcggtgaagtggaaactcctcctgcaggaagagccttaaagctccaaataccctatatctttctttaatcctgtgactcttttaaagataatattttatagccttaatatgccttatatcagaggtggtacaaaatgcatttgaaactcatgcaataattatcctcagtagtatttcttacagtgagacaacaggcgatgtcagtgagggcgatcatagggcataagcctaagccataccatgcagcctttgtgccagcaaccaaatcccatgtttcctactgtgttaagtttaaaaatgcatttattatagaattgtctacatttctgaggatgtcatggagaatgcttaattttctttctctgaacttcaaaatattaaatattttcttatttatttttttgattaaagtataaattaagacaccctattgacttccgggtaaggggagtcaattgattacccagcagcacagtatttgctttttataattccctttttaaatacttgttcttaattcactggttttccttttctgtcatttttcagagtttagattgtgagtccatgttttgtctgttgtgcctataaaggaaatttgaaatctgtatcattctactataaagacacatgcacacgtatgtttattgcagcactgtttacaatagcaaagacttggaaccaaccaaaatacccacaaatgatagaccggataaagaaaacgtgacacatatacaccatggaatactatgcagccatagaaaaggatgagttcatattcttcacagggacatggatgaagctggaaaccatcatcctcagcaaactaacacaggaacagaaaaccaaacaccgcatgttctcactcataagtgggaattgaacaatgagaatacatggacacagggaggggaacaccacaccctggggcctgttggggggatgggggctaggggagggatagcattaggagaaatacctgatgtagatgatgggttgatgggtgcagcaaagtaccatggcacatgtatacctgtgtaacaaacctgcacattcagcacatgtatcccagaacttaaagtataataaaaataaataaataatttcagtaagaacctgatcaagttgaacatgtatatatatgttatacacaagtttgaaacatatttctgtttttatatgttttcttatgatgcaagggcatactcttatgcaaataattaaaacttcataggtcttaatttcccatatctctatatattattatgacctatccaactggtaaccctatgaacaccttaaaataaacttgtatactcttaaaaaaaaaa

SEQ ID NO: 13598 - DNA, 5176 bp, Homo sapiens
ctccggcgcccgctctgcccgccgctgggtccgaccgcgctcgccttccttgcagccgcgcctcggccccatggacgccctgtgcggttccggggagctcggctccaagttctgggactccaacctgtctgtgcacacagaaaacccggacctcactccctgcttccagaactccctgctggcctgggtgccctgcatctacctgtgggtcgccctgccctgctacttgctctacctgcggcaccattgtcgtggctacatcatcctctcccacctgtccaagctcaagatggtcctgggtgtcctgctgtggtgcgtctcctgggcggaccttttttactccttccatggcctggtccatggccgggcccctgcccctgttttctttgtcacccccttggtggtgggggtcaccatgctgctggccaccctgctgatacagtatgagcggctgcagggcgtacagtcttcgggggtcctcattatcttctggttcctgtgtgtggtctgcgccatcgtcccattccgctccaagatccttttagccaaggcagagggtgagatctcagaccccttccgcttcaccaccttctacatccactttgccctggtactctctgccctcatcttggcctgcttcagggagaaacctccatttttctccgcaaagaatgtcgaccctaacccctaccctgagaccagcgctggctttctctcccgcctgtttttctggtggttcacaaagatggccatctatggctaccggcatcccctggaggagaaggacctctggtccctaaaggaagaggacagatcccagatggtggtgcagcagctgctggaggcatggaggaagcaggaaaagcagacggcacgacacaaggcttcagcagcacctgggaaaaatgcctccggcgaggacgaggtgctgctgggtgcccggcccaggccccggaagccctccttcctgaaggccctgctggccaccttcggctccagcttcctcatcagtgcctgcttcaagcttatccaggacctgctctccttcatcaatccacagctgctcagcatcctgatcaggtttatctccaaccccatggccccctcctggtggggcttcctggtggctgggctgatgttcctgtgctccatgatgcagtcgctgatcttacaacactattaccactacatctttgtgactggggtgaagtttcgtactgggatcatgggtgtcatctacaggaaggctctggttatcaccaactcagtcaaacgtgcgtccactgtgggggaaattgtcaacctcatgtcagtggatgcccagcgcttcatggaccttgcccccttcctcaatctgctgtggtcagcacccctgcagatcatcctggcgatctacttcctctggcagaacctaggtccctctgtcctggctggagtcgctttcatggtcttgctgattccactcaacggagctgtggccgtgaagatgcgcgccttccaggtaaagcaaatgaaattgaaggactcgcgcatcaagctgatgagtgagatcctgaacggcatcaaggtgctgaagctgtacgcctgggagcccagcttcctgaagcaggtggagggcatcaggcagggtgagctccagctgctgcgcacggcggcctacctccacaccacaaccaccttcacctggatgtgcagccccttcctggtgaccctgatcaccctctgggtgtacgtgtacgtggacccaaacaatgtgctggacgccgagaaggcctttgtgtctgtgtccttgtttaatatcttaagacttcccctcaacatgctgccccagttaatcagcaacctgactcaggccagtgtgtctctgaaacggatccagcaattcctgagccaagaggaacttgacccccagagtgtggaaagaaagaccatctccccaggctatgccatcaccatacacagtggcaccttcacctgggcccaggacctgccccccactctgcacagcctagacatccaggtcccgaaaggggcactggtggccgtggtggggcctgtgggctgtgggaagtcctccctggtgtctgccctgctgggagagatggagaagctagaaggcaaagtgcacatgaagggctccgtggcctatgtgccccagcaggcatggatccagaactgcactcttcaggaaaacgtgcttttcggcaaagccctgaaccccaagcgctaccagcagactctggaggcctgtgccttgctagctgacctggagatgctgcctggtggggatcagacagagattggagagaagggcattaacctgtctgggggccagcggcagcgggtcagtctggctcgagctgtttacagtgatgccgatattttcttgctggatgacccactgtccgcggtggactctcatgtggccaagcacatctttgaccacgtcatcgggccagaaggcgtgctggcaggcaagacgcgagtgctggtgacgcacggcattagcttcctgccccagacagacttcatcattgtgctagctgatggacaggtgtctgagatgggcccgtacccagccctgctgcagcgcaacggctcctttgccaactttctctgcaactatgcccccgatgaggaccaagggcacctggaggacagctggaccgcgttggaaggtgcagaggataaggaggcactgctgattgaagacacactcagcaaccacacggatctgacagacaatgatccagtcacctatgtggtccagaagcagtttatgagacagctgagtgccctgtcctcagatggggagggacagggtcggcctgtaccccggaggcacctgggtccatcagagaaggtgcaggtgacagaggcgaaggcagatggggcactgacccaggaggagaaagcagccattggcactgtggagctcagtgtgttctgggattatgccaaggccgtggggctctgtaccacgctggccatctgtctcctgtatgtgggtcaaagtgcggctgccattggagccaatgtgtggctcagtgcctggacaaatgatgccatggcagacagtagacagaacaacacttccctgaggctgggcgtctatgctgctttaggaattctgcaagggttcttggtgatgctggcagccatggccatggcagcgggtggcatccaggctgcccgtgtgttgcaccaggcactgctgcacaacaagatacgctcgccacagtccttctttgacaccacaccatcaggccgcatcctgaactgcttctccaaggacatctatgtcgttgatgaggttctggcccctgtcatcctcatgctgctcaattccttcttcaacgccatctccactcttgtggtcatcatggccagcacgccgctcttcactgtggtcatcctgcccctggctgtgctctacaccttagtgcagcgcttctatgcagccacatcacggcaactgaagcggctggaatcagtcagccgctcacctatctactcccacttttcggagacagtgactggtgccagtgtcatccgggcctacaaccgcagccgggattttgagatcatcagtgatactaaggtggatgccaaccagagaagctgctacccctacatcatctccaaccggtggctgagcatcggagtggagttcgtggggaactgcgtggtgctctttgctgcactatttgccgtcatcgggaggagcagcctgaacccggggctggtgggcctttctgtgtcctactccttgcaggtgacatttgctctgaactggatgatacgaatgatgtcagatttggaatctaacatcgtggctgtggagagggtcaaggagtactccaagacagagacagaggcgccctgggtggtggaaggcagccgccctcccgaaggttggcccccacgtggggaggtggagttccggaattattctgtgcgctaccggccgggcctagacctggtgctgagagacctgagtctgcatgtgcacggtggcgagaaggtggggatcgtgggccgcactggggctggcaagtcttccatgaccctttgcctgttccgcatcctggaggcggcaaagggtgaaatccgcattgatggcctcaatgtggcagacatcggcctccatgacctgcgctctcagctgaccatcatcccgcaggaccccatcctgttctcggggaccctgcgcatgaacctggaccccttcggcagctactcagaggaggacatttggtgggctttggagctgtcccacctgcacacgtttgtgagctcccagccggcaggcctggacttccagtgctcagagggcggggagaatctcagcgtgggccagaggcagctcgtgtgcctggcccgagccctgctccgcaagagccgcatcctggttttagacgaggccacagctgccatcgacctggagactgacaacctcatccaggctaccatccgcacccagtttgatacctgcactgtcctgaccatcgcacaccggcttaacactatcatggactacaccagggtcctggtcctggacaaaggagtagtagctgaatttgattctccagccaacctcattgcagctagaggcatcttctacgggatggccagagatgctggacttgcctaaaatatattcctgagatttcctcctggcctttcctggttttcatcaggaaggaaatgacaccaaatatgtccgcagaatggacttgatagcaaacactgggggcaccttaagattttgcacctgtaaagtgccttacagggtaactgtgctgaatgctttagatgaggaaatgatccccaagtggtgaatgacacgcctaaggtcacagctagtttgagccagttagactagtcccccggtctcccgattcccaactgagtgttatttgcacactgcactgttttcaaataacgattttatgaaatgacctctgtcctccctctgatttttcatattttcctaaagtttcgtttctgttttttaataaaaagctttttcctcctggaacagaagacagctgctgggtcaggccacccctaggaactcagtcctgtactctggggtgctgcctgaatccattaaaaatgggagtactgatgaaataaaactacatggtcaacagtaaaaaaaaaaaaaaaaaaa

SEQ ID NO: 13599 - DNA, 3185 bp, Homo sapiens
ggtcgcccctccccggattcccccaccctccgtgcctgcaggagcccctgggctttcccggaggagctcgccctgaagggcccggacctcggcgagcccaccaccgttccctccagcgccgccgccgccaccgcagcagccggagcagcatggtccagctgaggaagctgctccgcgtcctgactttgatgaagttcccctgctgcgtgctggaggtgctcctgtgcgcgctggcggcggcggcgcgcggccaggagatgtacgccccgcactcaatccggatcgagggggacgtcaccctcggggggctgttccccgtgcacgccaagggtcccagcggagtgccctgcggcgacatcaagagggaaaacgggatccacaggctggaagcgatgctctacgccctggaccagatcaacagtgatcccaacctactgcccaacgtgacgctgggcgcgcggatcctggacacttgttccagggacacttacgcgctcgaacagtcgcttactttcgtccaggcgctcatccagaaggacacctccgacgtgcgctgcaccaacggcgaaccgccggttttcgtcaagccggagaaagtagttggagtgattggggcttcggggagttcggtctccatcatggtagccaacatcctgaggctcttccagatcccccagattagttatgcatcaacggcacccgagctaagtgatgaccggcgctatgacttcttctctcgcgtggtgccacccgattccttccaagcccaggccatggtagacattgtaaaggccctaggctggaattatgtgtctaccctcgcatcggaaggaagttatggagagaaaggtgtggagtccttcacgcagatttccaaagaggcaggtggactctgcattgcccagtccgtgagaatcccccaggaacgcaaagacaggaccattgactttgatagaattatcaaacagctcctggacacccccaactccagggccgtcgtgatttttgccaacgatgaggatataaagcagatccttgcagcagccaaaagagctgaccaagttggccattttctttgggtgggatcagacagctggggatccaaaataaacccactgcaccagcatgaagatatcgcagaaggggccatcaccattcagcccaagcgagccacggtggaagggtttgatgcctactttacgtcccgtacacttgaaaacaacagaagaaatgtatggtttgccgaatactgggaggaaaacttcaactgcaagttgacgattagtgggtcaaaaaaagaagacacagatcgcaaatgcacaggacaggagagaattggaaaagattccaactatgagcaggagggtaaagtccagttcgtgattgacgcagtctatgctatggctcacgcccttcaccacatgaacaaggatctctgtgctgactaccggggtgtctgcccagagatggagcaagctggaggcaagaagttgctgaagtatatacgcaatgttaatttcaatggtagtgctggcactccagtgatgtttaacaagaacggggatgcacctgggcgttatgacatctttcagtaccagaccacaaacaccagcaacccgggttaccgtctgatcgggcagtggacagacgaacttcagctcaatatagaagacatgcagtggggtaaaggagtccgagagatacccgcctcagtgtgcacactaccatgtaagccaggacagagaaagaagacacagaaaggaactccttgctgttggacctgtgagccttgcgatggttaccagtaccagtttgatgagatgacatgccagcattgcccctatgaccagaggcccaatgaaaatcgaaccggatgccaggatattcccatcatcaaactggagtggcactccccctgggctgtgattcctgtcttcctggcaatgttggggatcattgccaccatctttgtcatggccactttcatccgctacaatgacacgcccattgtccgggcatctgggcgggaactcagctatgttcttttgacgggcatctttctttgctacatcatcactttcctgatgattgccaaaccagatgtggcagtgtgttctttccggcgagttttcttgggcttgggtatgtgcatcagttatgcagccctcttgacgaaaacaaatcggatttatcgcatatttgagcagggcaagaaatcagtaacagctcccagactcataagcccaacatcacaactggcaatcacttccagtttaatatcagttcagcttctaggggtgttcatttggtttggtgttgatccacccaacatcatcatagactatgatgaacacaagacaatgaaccctgagcaagccagaggggttctcaagtgtgacattacagatctccaaatcatttgctccttgggatatagcattcttctcatggtcacatgtactgtgtatgccatcaagactcggggtgtacccgagaattttaacgaagccaagcccattggattcactatgtacacgacatgtatagtatggcttgccttcattccaattttttttggcaccgctcaatcagcggaaaagctctacatacaaactaccacgcttacaatctccatgaacctaagtgcatcagtggcgctggggatgctatacatgccgaaagtgtacatcatcattttccaccctgaactcaatgtccagaaacggaagcgaagcttcaaggcggtagtcacagcagccaccatgtcatcgaggctgtcacacaaacccagtgacagacccaacggtgaggcaaagaccgagctctgtgaaaacgtagacccaaacaatttttttttttggctgtacagtggaacttggattacactttaaattaactttctctaggaatcaaagtaacctctgaggacctcagcttgcacaaagaggattgagataacatttccaaagcttgttcttcttgagctgacccaacacttaggaaaacatgacatggatcagcaactccattttctgtgagaagtgcaactgctactgaccatctgcactggcatctagtcaagcgattgtctgaggaaaggattttggagattcccatctgatattcttctatttggtctcttgtacccattgtcatcctgtaccacacataataaagtttaagaa

SEQ ID NO: 13600 - DNA, 4021 bp, Homo sapiens
ggtcgcccctccccggattcccccaccctccgtgcctgcaggagcccctgggctttcccggaggagctcgccctgaagggcccggacctcggcgagcccaccaccgttccctccagcgccgccgccgccaccgcagcagccggagcagcatggtccagctgaggaagctgctccgcgtcctgactttgatgaagttcccctgctgcgtgctggaggtgctcctgtgcgcgctggcggcggcggcgcgcggccaggagatgtacgccccgcactcaatccggatcgagggggacgtcaccctcggggggctgttccccgtgcacgccaagggtcccagcggagtgccctgcggcgacatcaagagggaaaacgggatccacaggctggaagcgatgctctacgccctggaccagatcaacagtgatcccaacctactgcccaacgtgacgctgggcgcgcggatcctggacacttgttccagggacacttacgcgctcgaacagtcgcttactttcgtccaggcgctcatccagaaggacacctccgacgtgcgctgcaccaacggcgaaccgccggttttcgtcaagccggagaaagtagttggagtgattggggcttcggggagttcggtctccatcatggtagccaacatcctgaggctcttccagatcccccagattagttatgcatcaacggcacccgagctaagtgatgaccggcgctatgacttcttctctcgcgtggtgccacccgattccttccaagcccaggccatggtagacattgtaaaggccctaggctggaattatgtgtctaccctcgcatcggaaggaagttatggagagaaaggtgtggagtccttcacgcagatttccaaagaggcaggtggactctgcattgcccagtccgtgagaatcccccaggaacgcaaagacaggaccattgactttgatagaattatcaaacagctcctggacacccccaactccagggccgtcgtgatttttgccaacgatgaggatataaagcagatccttgcagcagccaaaagagctgaccaagttggccattttctttgggtgggatcagacagctggggatccaaaataaacccactgcaccagcatgaagatatcgcagaaggggccatcaccattcagcccaagcgagccacggtggaagggtttgatgcctactttacgtcccgtacacttgaaaacaacagaagaaatgtatggtttgccgaatactgggaggaaaacttcaactgcaagttgacgattagtgggtcaaaaaaagaagacacagatcgcaaatgcacaggacaggagagaattggaaaagattccaactatgagcaggagggtaaagtccagttcgtgattgacgcagtctatgctatggctcacgcccttcaccacatgaacaaggatctctgtgctgactaccggggtgtctgcccagagatggagcaagctggaggcaagaagttgctgaagtatatacgcaatgttaatttcaatggtagtgctggcactccagtgatgtttaacaagaacggggatgcacctgggcgttatgacatctttcagtaccagaccacaaacaccagcaacccgggttaccgtctgatcgggcagtggacagacgaacttcagctcaatatagaagacatgcagtggggtaaaggagtccgagagatacccgcctcagtgtgcacactaccatgtaagccaggacagagaaagaagacacagaaaggaactccttgctgttggacctgtgagccttgcgatggttaccagtaccagtttgatgagatgacatgccagcattgcccctatgaccagaggcccaatgaaaatcgaaccggatgccaggatattcccatcatcaaactggagtggcactccccctgggctgtgattcctgtcttcctggcaatgttggggatcattgccaccatctttgtcatggccactttcatccgctacaatgacacgcccattgtccgggcatctgggcgggaactcagctatgttcttttgacgggcatctttctttgctacatcatcactttcctgatgattgccaaaccagatgtggcagtgtgttctttccggcgagttttcttgggcttgggtatgtgcatcagttatgcagccctcttgacgaaaacaaatcggatttatcgcatatttgagcagggcaagaaatcagtaacagctcccagactcataagcccaacatcacaactggcaatcacttccagtttaatatcagttcagcttctaggggtgttcatttggtttggtgttgatccacccaacatcatcatagactatgatgaacacaagacaatgaaccctgagcaagccagaggggttctcaagtgtgacattacagatctccaaatcatttgctccttgggatatagcattcttctcatggtcacatgtactgtgtatgccatcaagactcggggtgtacccgagaattttaacgaagccaagcccattggattcactatgtacacgacatgtatagtatggcttgccttcattccaattttttttggcaccgctcaatcagcggaaaagctctacatacaaactaccacgcttacaatctccatgaacctaagtgcatcagtggcgctggggatgctatacatgccgaaagtgtacatcatcattttccaccctgaactcaatgtccagaaacggaagcgaagcttcaaggcggtagtcacagcagccaccatgtcatcgaggctgtcacacaaacccagtgacagacccaacggtgaggcaaagaccgagctctgtgaaaacgtagacccaaacagccctgctgcaaaaaagaagtatgtcagttataataacctggttatctaacctgttccattccatggaaccatggaggaggaagaccctcagttattttgtcacccaacctggcataggactctttggtcctacccgcttcccatcaccggaggagcttccccggccgggagaccagtgttagaggatccaagcgacctaaacagctgctttatgaaatatccttactttatctgggcttaataagtcactgacatcagcactgccaactcggctgcaattgtggaccttccctaccaaagggagtgttgaaactcaagtcccgccctggctctttagaatggaccactgagagccacaggaccgttttggggctgacctgtcttattacgtatgtacttctaggttgcaaggttttgaaattttctgtacagtttgtgaggacctttgcactttgccatctgatgtcgtacctcggttcactgtttgttttcgaatgccttgttttcatagagccctattctctcagacggtggaatatttggaaaaattttaaaacaattaaaattttaaagcaatcttggcagactaaaacaagtacatctgtacatgactgtataattacgattatagtaccactgcacatcatgtttttttttttaagacaaaaaagatgtttaaagaccaaaaactgtgctgagaaagtatgccccacctatctttggtatatgataggttacataaaaggaaggtattggctgaactgaatagaggtcttgatctttggaatgcatgccagtaatgtattttacagtacatgtttattatgttcaatatttgtatttgtgttctcttttgttatttttaattagggtatatgaatattttgcaataattttaataattattaagctgtttgaaggaaagaatatggatttttcatgtcttgaggttttgttcatgccccctttgactgatcagtgtgataaggactttaggaaaaaaagcatgtatgttttttactgtttgtaataagtactttcgttaatcttgctgcttatgtgccaatttagtggaaaaaaacaacccttgctgaaaaattccctctttccattctctttcaattctgtgatattgtccaagaatgtatcaataaaatactttggttaactttt

SEQ ID NO: 13601 - DNA, 4113 bp, Homo sapiens
ggtcgcccctccccggattcccccaccctccgtgcctgcaggagcccctgggctttcccggaggagctcgccctgaagggcccggacctcggcgagcccaccaccgttccctccagcgccgccgccgccaccgcagcagccggagcagcatggtccagctgaggaagctgctccgcgtcctgactttgatgaagttcccctgctgcgtgctggaggtgctcctgtgcgcgctggcggcggcggcgcgcggccaggagatgtacgccccgcactcaatccggatcgagggggacgtcaccctcggggggctgttccccgtgcacgccaagggtcccagcggagtgccctgcggcgacatcaagagggaaaacgggatccacaggctggaagcgatgctctacgccctggaccagatcaacagtgatcccaacctactgcccaacgtgacgctgggcgcgcggatcctggacacttgttccagggacacttacgcgctcgaacagtcgcttactttcgtccaggcgctcatccagaaggacacctccgacgtgcgctgcaccaacggcgaaccgccggttttcgtcaagccggagaaagtagttggagtgattggggcttcggggagttcggtctccatcatggtagccaacatcctgaggctcttccagatcccccagattagttatgcatcaacggcacccgagctaagtgatgaccggcgctatgacttcttctctcgcgtggtgccacccgattccttccaagcccaggccatggtagacattgtaaaggccctaggctggaattatgtgtctaccctcgcatcggaaggaagttatggagagaaaggtgtggagtccttcacgcagatttccaaagaggcaggtggactctgcattgcccagtccgtgagaatcccccaggaacgcaaagacaggaccattgactttgatagaattatcaaacagctcctggacacccccaactccagggccgtcgtgatttttgccaacgatgaggatataaagcagatccttgcagcagccaaaagagctgaccaagttggccattttctttgggtgggatcagacagctggggatccaaaataaacccactgcaccagcatgaagatatcgcagaaggggccatcaccattcagcccaagcgagccacggtggaagggtttgatgcctactttacgtcccgtacacttgaaaacaacagaagaaatgtatggtttgccgaatactgggaggaaaacttcaactgcaagttgacgattagtgggtcaaaaaaagaagacacagatcgcaaatgcacaggacaggagagaattggaaaagattccaactatgagcaggagggtaaagtccagttcgtgattgacgcagtctatgctatggctcacgcccttcaccacatgaacaaggatctctgtgctgactaccggggtgtctgcccagagatggagcaagctggaggcaagaagttgctgaagtatatacgcaatgttaatttcaatggtagtgctggcactccagtgatgtttaacaagaacggggatgcacctgggcgttatgacatctttcagtaccagaccacaaacaccagcaacccgggttaccgtctgatcgggcagtggacagacgaacttcagctcaatatagaagacatgcagtggggtaaaggagtccgagagatacccgcctcagtgtgcacactaccatgtaagccaggacagagaaagaagacacagaaaggaactccttgctgttggacctgtgagccttgcgatggttaccagtaccagtttgatgagatgacatgccagcattgcccctatgaccagaggcccaatgaaaatcgaaccggatgccaggatattcccatcatcaaactggagtggcactccccctgggctgtgattcctgtcttcctggcaatgttggggatcattgccaccatctttgtcatggccactttcatccgctacaatgacacgcccattgtccgggcatctgggcgggaactcagctatgttcttttgacgggcatctttctttgctacatcatcactttcctgatgattgccaaaccagatgtggcagtgtgttctttccggcgagttttcttgggcttgggtatgtgcatcagttatgcagccctcttgacgaaaacaaatcggatttatcgcatatttgagcagggcaagaaatcagtaacagctcccagactcataagcccaacatcacaactggcaatcacttccagtttaatatcagttcagcttctaggggtgttcatttggtttggtgttgatccacccaacatcatcatagactatgatgaacacaagacaatgaaccctgagcaagccagaggggttctcaagtgtgacattacagatctccaaatcatttgctccttgggatatagcattcttctcatggtcacatgtactgtgtatgccatcaagactcggggtgtacccgagaattttaacgaagccaagcccattggattcactatgtacacgacatgtatagtatggcttgccttcattccaattttttttggcaccgctcaatcagcggaaaagctctacatacaaactaccacgcttacaatctccatgaacctaagtgcatcagtggcgctggggatgctatacatgccgaaagtgtacatcatcattttccaccctgaactcaatgtccagaaacggaagcgaagcttcaaggcggtagtcacagcagccaccatgtcatcgaggctgtcacacaaacccagtgacagacccaacggtgaggcaaagaccgagctctgtgaaaacgtagacccaaacaactgtataccaccagtaagaaagagtgtacaaaagtctgttacttggtacactatcccaccaacagtatagcttttgactgctttcccaaaggccctgctgcaaaaaagaagtatgtcagttataataacctggttatctaacctgttccattccatggaaccatggaggaggaagaccctcagttattttgtcacccaacctggcataggactctttggtcctacccgcttcccatcaccggaggagcttccccggccgggagaccagtgttagaggatccaagcgacctaaacagctgctttatgaaatatccttactttatctgggcttaataagtcactgacatcagcactgccaactcggctgcaattgtggaccttccctaccaaagggagtgttgaaactcaagtcccgccctggctctttagaatggaccactgagagccacaggaccgttttggggctgacctgtcttattacgtatgtacttctaggttgcaaggttttgaaattttctgtacagtttgtgaggacctttgcactttgccatctgatgtcgtacctcggttcactgtttgttttcgaatgccttgttttcatagagccctattctctcagacggtggaatatttggaaaaattttaaaacaattaaaattttaaagcaatcttggcagactaaaacaagtacatctgtacatgactgtataattacgattatagtaccactgcacatcatgtttttttttttaagacaaaaaagatgtttaaagaccaaaaactgtgctgagaaagtatgccccacctatctttggtatatgataggttacataaaaggaaggtattggctgaactgaatagaggtcttgatctttggaatgcatgccagtaatgtattttacagtacatgtttattatgttcaatatttgtatttgtgttctcttttgttatttttaattagggtatatgaatattttgcaataattttaataattattaagctgtttgaaggaaagaatatggatttttcatgtcttgaggttttgttcatgccccctttgactgatcagtgtgataaggactttaggaaaaaaagcatgtatgttttttactgtttgtaataagtactttcgttaatcttgctgcttatgtgccaatttagtggaaaaaaacaacccttgctgaaaaattccctctttccattctctttcaattctgtgatattgtccaagaatgtatcaataaaatactttggttaactttt

SEQ ID NO: 13602 - DNA, 5221 bp, Homo sapiens
ggcccgagccaccgactgcaggaggagaaggggttgtgctcctggccgaggaaggagaaaggggcggggccggcgggcagcgtgcggcagtgcggagctcctgagaccggcgggcacacgggggtctgtggcccccgccgtagcagtggctgccgccgtcgcttggttcccgtcggtctgcgggaggcgggttatggcggcggcggcagtgagagctgtgaatgaattctccgggtggacgagggaagaagaaaggctccggcggcgccagcaacccggtgcctcccaggcctccgcccccttgcctggcccccgcccctcccgccgccgggccggcccctccgcccgagtcgccgcataagcggaacctgtactatttctcctacccgctgtttgtaggcttcgcgctgctgcgtttggtcgccttccacctggggctcctcttcgtgtggctctgccagcgcttctcccgcgccctcatggcagccaagaggagctccggggccgcgccagcacctgcctcggcctcggccccggcgccggtgccgggcggcgaggccgagcgcgtccgagtcttccacaaacaggccttcgagtacatctccattgccctgcgcatcgatgaggatgagaaagcaggacagaaggagcaagctgtggaatggtataagaaaggtattgaagaactggaaaaaggaatagctgttatagttacaggacaaggtgaacagtgtgaaagagctagacgccttcaagctaaaatgatgactaatttggttatggccaaggaccgcttacaacttctagagaagatgcaaccagttttgccattttccaagtcacaaacggacgtctataatgacagtactaacttggcatgccgcaatggacatctccagtcagaaagtggagctgttccaaaaagaaaagaccccttaacacacactagtaattcactgcctcgttcaaaaacagttatgaaaactggatctgcaggcctttcaggccaccatagagcacctagttacagtggtttatccatggtttctggagtgaaacagggatctggtcctgctcctaccactcataagggtactccgaaaacaaataggacaaataaaccttctacccctacaactgctactcgtaagaaaaaagacttgaagaattttaggaatgtggacagcaaccttgctaaccttataatgaatgaaattgtggacaatggaacagctgttaaatttgatgatatagctggtcaagacttggcaaaacaagcattgcaagaaattgttattcttccttctctgaggcctgagttgttcacagggcttagagctcctgccagagggctgttactctttggtccacctgggaatgggaagacaatgctggctaaagcagtagctgcagaatcgaatgcaaccttctttaatataagtgctgcaagtttaacttcaaaatacgtgggagaaggagagaaattggtgagggctctttttgctgtggctcgagaacttcaaccttctataatttttatagatgaagttgatagccttttgtgtgaaagaagagaaggggagcacgatgctagtagacgcctaaaaactgaatttctaatagaatttgatggtgtacagtctgctggagatgacagagtacttgtaatgggtgcaactaataggccacaagagcttgatgaggctgttctcaggcgtttcatcaaacgggtatatgtgtctttaccaaatgaggagacaagactacttttgcttaaaaatctgttatgtaaacaaggaagtccattgacccaaaaagaactagcacaacttgctagaatgactgatggatactcaggaagtgacctaacagctttggcaaaagatgcagcactgggtcctatccgagaactaaaaccagaacaggtgaagaatatgtctgccagtgagatgagaaatattcgattatctgacttcactgaatccttgaaaaaaataaaacgcagcgtcagccctcaaactttagaagcgtacatacgttggaacaaggactttggagataccactgtttaaggaaatacctttgtaaacctgcagaacattttacttaaaagaggaaacacaagatcttcaatgaacgtcatcggctacagaaacagcctaagtttacaggactttttagagtcttacatatttgtgcaccaaacttgaagatgaaccagaaaacagacttaaacaaaatatacaatgcaaatgtaattttttgttgtttaaggccttgccttgatggtcacagttatcccaatggacactaagttagagcacaacaaaacctgattctggtcttctttaccaatataatcataatgtaaataataatttgtatattgtgttgcagatgaaagtattccaggaacagtgaatggtagaagacacaagaacatttgtttgtttgtcttctgatgttttttcttaaaatagtaatttctcctacttttcttttctactgttgtcttaactacaggtgattggaatgccaaacactcttaagtttattttcttttttcgttttataaattcagtgtgccaaatgaaacttttttcctaagtaactgtaataggaaaaagtttattttgagagtttcttcttcataaatctacagacattaaacaattgttgtgttctttttaccttttatttttctattaccttgctaccaaacagtttagatagcaatataatagcaaaaaagcaaatatggtaaaatagagaaggtttgaaggtttgagttactctgtcatataacatgtagatcagtcttcatgtgacctgcagtatttttttttctaatgtatttgtcagaaatctgttgtagactgttaacttcttcctgatggaatttattttctgcaagaattattctgatatttaagagagccaattttaactgctgtgaaaatgtttccagtgcaagagaagggaaatactaggaactaagacatttctaatttattgcttattactttcttaattttacaggataattataagcaagtggaactaccatcttttattcttaataattattaatcccttcaatgaaactttaaaaaaactgaatttttatacatggcatacatttttctagttccttctgcttgctttattaactcaaaagttctagttctagtctgttgatctgccttttgttctcccaaaatgtacagtaattccatttgtttgtataaatatgcctggattttcattataaaaatgtcattgtagggagtagagactcatatcatggccttttaaatattgtaataaaggcaaatagatatttgcccttagtttactggttaaaagtttgtttacagaacttttctctggtgcttaaatgatgctatgtaaaatgtcatgagtggaaagaatatttgtagtagtaacaagaatttttcatttaggaaagatttcttaggttttgaaagaatacattaaaataaaaaacttgcccctactaggtaagaactttataatgaagacatacattcttcttaattttactcttgctcttgttaaagatttgtttgaatatagaagatgcatgatttctgggtttttttttttttttgagacagagtttcgctcttgttgcccaggctggagtgcaatggcgcaatctcgactcaccacaacctccgcctcccaggttcaagcaattctcctgcctcagcctcccgagtagctgggattacaggcatgcgccactaccccagctaattttgtatttttagtagagatggggtttctccatgttggtcaggctggtcttgaactcctgacctcaggtgatccgcctgcctcggcctcccaaagtgctgggattacaggcataagccactgcgcccagccagaagatgcatgatttcttaggatcatatgctgtttgtagccataaggtaaatcatgtctcttccaatcatgactttggaactccctgaataataaaaatgagagttgagataaataggggaaaaaaaatttttttcaagccagagctatgcatatgttaggtgatgggtagtatccctttaaggtctcaaacattacaacatcaattatgaaatactgataacgaaaggtagtaatgaaatatatatgatgaaaagaattgagaagttctaaattaagacatttcagttaagctcataaaatttcattgttttcatttaaaagattaacgttattgatacttggataactggctaatcatattaaaggactatgtggttccagctcaacttttaatatattgtctcctttaaaactatcatggttataattctattgggaaagacttttagataacaaagatttcaaatgttaaaagagataaaagtcaggttaatactatcttaaacactgagtcagaaaatcattactgtatagaagttgctttcctgatcaagtctgaacttcagctagtgctagagaactattttctatgacttaactctaaccaagttttattttaagctgtttctttgatagaagggccatgaaaatagagtaatgatatagtaggagataagggattggtttggtctttttcaataaagatagaagttgctgaagttttctgaattaataatgacttagattgtgaccttttagattcggtgttgagctctgtgttgtattacttcctaaaagataatgcttaaacattaagcattagtgtgctcttcatgttaatatggcagagttttgtaaactaaattaaaacttactgatatattggactttgagccaagggaaagaatgagtactatctttccagatatcttaagggtaaaagcttattctaagacagtctgtccattgagaatattagatttctgacttgcaaatatgtttgtactccagaagaattagaggaaaagcagatactagaattctaatttaattacatatacagccgtctttgtttatagtgtagaattctttatattttgtacaaaaactaattcttttggtaaaatgaaccatttacagttcggttttggactctgagtcaaaggattttcctttaaatgcttgtctcaattttagtctggtcttttgtacttttcttcagaagaaatgaattaaagggtacagttgcataaagtgggtttttatcctaatgtattggaaataaatgataaactttaaaaaaaaa

SEQ ID NO: 13603 - DNA, 9123 bp, Homo sapiens
agcgaagcggaggcataagcagagaggattctggaaaggtctctttgttttcttatccacagagaaagaaagaaaaaaaattgtaactaatttgtaaacctctgtggtcaaaaaaaaaaaaaaaaaaaaagctgaacagctgccagaggaagacacgttataccctaaccatcttggatgctgggctttgttatgctgtaattcataaggctctgttttatcagagattatggagcaagaaaactgaagccaagccacatcaaggtttgacagggatgagatacctgtcaaggattcatagtagagtggcttactgggaaaggagcaaagaatctcttctagggatattgtaagaataaatgagataattcacagaagggacctggagcttttccggaaaaaggtgctgtgactatctaaggtaattcgtatgcaagaagctacacgtaattaaatgtgcaggatgaaaagatggcacaggcactgttggtacccccaggacctgaaagcttccgcctttttactagagaatctcttgctgctatcgaaaaacgtgctgcagaagagaaagccaagaagcccaaaaaggaacaagataatgatgatgagaacaaaccaaagccaaatagtgacttggaagctggaaagaaccttccatttatttatggagacattcctccagagatggtgtcagagcccctggaggacctggatccctactatatcaataagaaaacttttatagtaatgaataaaggaaaggcaattttccgattcagtgccacctctgccttgtatattttaactccactaaaccctgttaggaaaattgctatcaagattttggtacattctttattcagcatgcttatcatgtgcactattttgaccaactgtgtatttatgaccttgagcaaccctcctgactggacaaagaatgtagagtacacattcactggaatctatacctttgagtcacttataaaaatcttggcaagagggttttgcttagaagattttacgtttcttcgtgatccatggaactggctggatttcagtgtcattgtgatggcatatgtgacagagtttgtggacctgggcaatgtctcagcgttgagaacattcagagttctccgagcactgaaaacaatttcagtcattccaggtttaaagaccattgtgggggccctgatccagtcggtaaagaagctttctgatgtgatgatcctgactgtgttctgtctgagcgtgtttgctctcattgggctgcagctgttcatgggcaatctgaggaataaatgtttgcagtggcccccaagcgattctgcttttgaaaccaacaccacttcctactttaatggcacaatggattcaaatgggacatttgttaatgtaacaatgagcacatttaactggaaggattacattggagatgacagtcacttttatgttttggatgggcaaaaagaccctttactctgtggaaatggctcagatgcaggccagtgtccagaaggatacatctgtgtgaaggctggtcgaaaccccaactatggctacacaagctttgacacctttagctgggctttcctgtctctatttcgactcatgactcaagactattgggaaaatctttaccagttgacattacgtgctgctgggaaaacatacatgatattttttgtcctggtcattttcttgggctcattttatttggtgaatttgatcctggctgtggtggccatggcctatgaggagcagaatcaggccaccttggaagaagcagaacaaaaagaggccgaatttcagcagatgctcgaacagcttaaaaagcaacaggaagaagctcaggcagttgcggcagcatcagctgcttcaagagatttcagtggagtaggtgggttaggagagctgttggaaagttcttcagaagcatcaaagttgagttccaaaggtgctaaagaatggaggaaccggaggaagaaaagaagacagagagagcaccttgaaggaaacaacaaaggagagagagacagctttcccaaatccgaatctgaagacagcgtcaaaagaagcagcttccttttctccatggatggaaacagactgaccagtgacaaaaaattctgctcccctcatcagtctctcttgagtatccgtggctccctgttttccccaagacgcaatagcaaaacaagcattttcagtttcagaggtcgggcaaaggatgttggatctgaaaatgactttgctgatgatgaacacagcacatttgaagacggcgaaagcaggagagactcactgtttgtgccgcacagacatggagagcgacgcaacagtaacgttagtcaggccagtatgtcatccaggatggtgccagggcttccagcaaatgggaagatgcacagcactgtggattgcaatggtgtggtttccttggtgggtggaccttcagctctaacgtcacctactggacaacttcccccagagggcaccaccactgaaacggaagtcagaaagagaaggttaagctcttaccagatttcaatggagatgctggaggattcctctggaaggcaaagagccgtgagcatagccagcattctgaccaacacaatggaagaacttgaagaatctagacagaaatgtccgccatgctggtatagatttgccaatgtgttcttgatctgggactgctgtgatgcatggttaaaagtaaaacatcttgtgaatttaattgttatggatccatttgttgatcttgccatcactatttgcattgtcttaaataccctctttatggccatggagcactaccccatgactgagcaattcagtagtgtgttgactgtaggaaacctggtctttactgggattttcacagcagaaatggttctcaagatcattgccatggatccttattactatttccaagaaggctggaatatctttgatggaattattgtcagcctcagtttaatggagcttggtctgtcaaatgtggagggattgtctgtactgcgatcattcagactgcttagagttttcaagttggcaaaatcctggcccacactaaatatgctaattaagatcattggcaattctgtgggggctctaggaaacctcaccttggtgttggccatcatcgtcttcatttttgctgtggtcggcatgcagctctttggtaagagctacaaagaatgtgtctgcaagatcaatgatgactgtacgctcccacggtggcacatgaacgacttcttccactccttcctgattgtgttccgcgtgctgtgtggagagtggatagagaccatgtgggactgtatggaggtcgctggccaaaccatgtgccttattgttttcatgttggtcatggtcattggaaaccttgtggttctgaacctctttctggccttattattgagttcatttagctcagacaaccttgctgctactgatgatgacaatgaaatgaataatctgcagattgcagtaggaagaatgcaaaagggaattgattatgtgaaaaataagatgcgggagtgtttccaaaaagccttttttagaaagccaaaagttatagaaatccatgaaggcaataagatagacagctgcatgtccaataatactggaattgaaataagcaaagagcttaattatcttagagatgggaatggaaccaccagtggtgtaggtactggaagcagtgttgaaaaatacgtaatcgatgaaaatgattatatgtcattcataaacaaccccagcctcaccgtcacagtgccaattgctgttggagagtctgactttgaaaacttaaatactgaagagttcagcagtgagtcagaactagaagaaagcaaagagaaattaaatgcaaccagctcatctgaaggaagcacagttgatgttgttctaccccgagaaggtgaacaagctgaaactgaacccgaagaagactttaaaccggaagcttgttttactgaagggtgtattaaaaagtttccattctgtcaagtaagtacagaagaaggcaaagggaagatctggtggaatcttcgaaaaacctgctacagtattgttgagcacaactggtttgagactttcattgtgttcatgatccttctcagtagtggtgcattggcctttgaagatatatacattgaacagcgaaagactatcaaaaccatgctagaatatgctgacaaagtctttacctatatattcattctggaaatgcttctcaaatgggttgcttatggatttcaaacatatttcactaatgcctggtgctggctagatttcttgatcgttgatgtttctttggttagcctggtagccaatgctcttggctactcagaactcggtgccatcaaatcattacggacattaagagctttaagacctctaagagccttatcccggtttgaaggcatgagggtggttgtgaatgctcttgttggagcaattccctctatcatgaatgtgctgttggtctgtctcatcttctggttgatctttagcatcatgggtgtgaatttgtttgctggcaagttctaccactgtgttaacatgacaacgggtaacatgtttgacattagtgatgttaacaatttgagtgactgtcaggctcttggcaagcaagctcggtggaaaaacgtgaaagtaaactttgataatgttggcgctggctatcttgcactgcttcaagtggccacatttaaaggctggatggatattatgtatgcagctgttgattcacgagatgttaaacttcagcctgtatatgaagaaaatctgtacatgtatttatactttgtcatctttatcatctttgggtcattcttcactctgaatctattcattggtgtcatcatagataacttcaaccagcagaaaaagaagtttggaggtcaagacatctttatgacagaggaacagaaaaaatattacaatgcaatgaagaaacttggatccaagaaacctcagaaacccatacctcgcccagcaaacaaattccaaggaatggtctttgattttgtaaccagacaagtctttgatatcagcatcatgatcctcatctgcctcaacatggtcaccatgatggtggaaacggatgaccagggcaaatacatgaccctagttttgtcccggatcaacctagtgttcattgttctgttcactggagaatttgtgctgaagctcgtttccctcagacactactacttcactataggctggaacatctttgactttgtggtggtgattctctccattgtaggtatgtttctggctgagatgatagaaaagtattctgtgtcccctaccttgttccgagtgatccgtcttgccaggattggccgaatcctacgtctgatcaaaggagcaaaggggatccgcacgctgctctttgctttgatgatgtcccttcctgcgttgtttaacatcggcctcctgctcttcctggtcatgtttatctatgccatctttgggatgtccaactttgcctatgttaaaaaggaagctggaattgatgacatgttcaactttgagacctttggcaacagcatgatctgcttgttccaaattacaacctctgctggctgggatggattgctagcacctattcttaatagtgcaccacccgactgtgaccctgacacaattcaccctggcagctcagttaagggagaccgtggggacccatctgttgggattttcttttttgtcagttacatcatcatatccttcctggttgtggtgaacatgtacatcgcggtcatcctggagaacttcagtgttgctactgaagaaagtgcagagcccctgagtgaggatgactttgagatgttctatgaggtttgggaaaagtttgatcccgatgcgacccagtttatagagttctctaaactctctgattttgcagctgccctggatcctcctcttctcatagcaaaacccaacaaagtccagcttattgccatggatctgcccatggtcagtggtgaccggatccactgtcttgatattttatttgcctttacaaagcgtgttttgtgtgagagtggagagatggatgcccttcgaatacagatggaagacaggtttatggcatcaaacccctccaaagtctcttatgagcctattacaaccactttgaaacgtaaacaagaggaggtgtctgccgctatcattcagcgtaatttcagatgttatcttttaaagcaaaggttaaaaaatatatcaagtaactataacaaagaggcaattaaagggaggattgacttacctataaaacaagacatgattattgacaaactaaatgggaactccactccagaaaaaacagatgggagttcctctaccacccctcctccttcctatgatagtgtaacaaaaccagacaaggaaaagtttgagaaagacaaaccagaaaaagaaagcaaaggaaaagaggtcagagaaaatcaaaagtaaaaagaaacaaagaattatctttgtgatcaattgtttacagcctatgaaggtaaagtatatgtgtcaactggacttcaagaggaggtccatgccaaactgactgttttaacaaatactcatagtcagtgcctatacaagacagtgaagtgacctctctgtcactgcaactctgtgaagcagggtatcaacgttgacaagaggttgctgtttttattaccagctgacactgctgaggagaaacccaatggctacctagactatagggatagttgtgcaaagtgaacattgtaactacaccaaacacctttagtacagtccttgcatccattctatttttaacttccatatctgccatatttttacaaaatttgttctagtgcatttccatggtccccaattcatagtttattcataatgctatgtcactatttttgtaaatgaggtttacgttgaagaaacagtatacaagaaccctgtctctcaaatgatcagacaaaggtgttttgccagagagataaaatttttgctcaaaaccagaaaaagaattgtaatggctacagtttcagttacttccattttctagatggctttaattttgaaagtattttagtctgttatgtttgtttctatctgaacagttatgtgcctgtaaagtctcctctaatatttaaaggattatttttatgcaaagtattctgtttcagcaagtgcaaattttattctaagtttcagagctctatatttaatttaggtcaaatgctttccaaaaagtaatctaataaatccattctagaaaaatatatctaaagtattgctttagaatagttgttccactttctgctgcagtattgctttgccatcttctgctctcagcaaagctgatagtctatgtcaattaaataccctatgttatgtaaatagttattttatcctgtggtgcatgtttgggcaaatatatatatagcctgataaacaacttctattaaatcaaatatgtaccacagtgtatgtgtcttttgcaagcttccaacagggatgtatcctgtatcattcattaaacatagtttaaaggctatcactaatgcatgttaatattgcctatgctgctctattttactcaatccattcttcacaagtcttggttaaagaatgtcacatattggtgatagaatgaattcaacctgctctgtccattatgtcaagcagaataatttgaagctatttacaaacacctttacttttgcacttttaattcaacatgagtatcatatggtatctctctggatttcaaggaaacacactggatactgcctactgacaaaacctattcttcatattttgctaaaaatatgtctaaaacttgtttaaatataaataatgtaaaaatataatcaactttatttgtcagcattttgtacataagaaaattattttcaggttgatgacatcacaatttattttactttatgcttttgcttttgatttttaatcacaattccaaacttttgaatccataagatttttcaatggataatttcctaaaataaaagttagataatgggttttatggatttctttgttataatatattttctaccattccaataggagatacattggtcaaacactcaaacctagatcattttctaccaactatggttgcctcaatataaccttttattcatagatgtttttttttattcaacttttgtagtatttacgtatgcagactagtcttatttttttaattcctgctgcactaaagctattacaaatataacatggactttgttctttttagccatgaacaaagtggcaaagttgtgcaattacctaacatgatataaatttttgttttttgcacaaaccaaaagtttaatgttaattctttttacaaaactatttactgtagtgtattgaagaactgcatgcagggaattgctattgctaaaaagaatggtgagctacgtcattattgagccaaaagaataaatttcattttttattgcatttcacttattgggctctggggttttttgtttttgttttttgctgttggcagtttaaaatatatataattaataaaacctgtgcttgatctgacatttgtatacataaaagtttacatgaattttacaacaaactagtgcatgattcaccaagcagtactacagaacaaaggcaaattaaaagcagctttgtgaacttttatgtgtgcaaaggatcaagttcacatgttccaactttcaggtttgataataatagtagtaaccacctacaatagctttcaatttcaattaactcccttggctataagcatctaaactcatcttctttcaatataattgatgctatctcctaattacttggtggctaataaatgttacattctttgttacttaaatgcattatataaactcctatgtatacataaggtattaatgatatagttattgagaatttatattaacttttttttcaagaacccttggatttatgtgaggtcaaaaccaaactcttattctcagtggaaaactccagttgtaatgcatatttttaaagacaatttggatctaaatatgtatttcataattctcccataataaattatataaggtggaaaaaaaaaaaaaaaaaaaaaaaaaaaaa

SEQ ID NO: 13604 - DNA, 3905 bp, Homo sapiens
gcgacgaggagggcgacgacgaggagacgggcagcggcgaggaggaggaagaggaggcggaggcggcggccgggtgggagcgcagcgaggacgcgcggctgctgcgcgcagggctgcctcctgccgctgtccccgccgcggccgcccgcgacaggagcggccgccgcccgccgaggccgccgcccggccgcccgaggatgcggccgtccggcgacgaggaccgcgcgcgtcgccgccgccgccgccgccgccggagggaccttctgctgagccagctctgcttcctggcctcggtggcgctgctgctctggtcgctgtcgagcctgcgagagcagaaggagcttgacctcatggacctcgtaggggaagacagaaagtggatgatggcgaggaagctgatgcaggtgaacgacactctgacttccgaagatgccggactccggaacagcaagaactgcaccgaaccagccctgcatgaattccccaatgacatcttcacaaacgaggatagaagacaaggtgcggtggtcctccatgtgctctgtgccatatacatgttctatgcgctggccattgtgtgtgatgacttcttcgtcccttccttggaaaagatctgtgagcgcctgcacctcagtgaagatgtggctggggccacattcatggcagcgggaagttcggccccagagctgttcacatcggtcataggggtcttcatcaccaaaggcgatgtgggagttggcaccatcgtgggctcagcggtattcaacatcctgtgcatcattggtgtctgtgggctctttgctgggcaggttgtggctctttcctcctggtgcctgctgagggattctatttactacacgctgtctgtgatcgcgctcatcgtgtttatttatgatgaaaaagtttcctggtgggagtctttagtccttgtgctgatgtatcttatctacattgtcatcatgaaatataacgcttgcatacatcagtgctttgagaggaggacaaaaggtgccgggaacatggtcaacggattggccaacaatgctgaaattgatgacagcagcaactgcgacgcaactgtggtgctacttaagaaagcaaatttccaccgcaaagcatcagtgatcatggtagacgagctgctgtcagcctacccacaccagctttccttctctgaggctggccttcgaatcatgataaccagccactttccccccaagacccggctctccatggccagtcgcatgttgatcaatgagagacaaagattgataaacagcagggcttataccaacggggaatctgaggtggccatcaaaatcccaattaagcacaccgtggagaatgggacagggcccagcagtgccccagacaggggcgtgaatgggacacggagggacgatgttgtggctgaggctggcaacgaaacagagaatgaaaatgaggacaatgagaatgatgaggaggaagaggaggacgaggatgatgatgaaggaccgtacacaccattcgacaccccctcgggtaaactggaaacagtgaaatgggcgttcacctggccgctgagtttcgtcttatacttcactgtacccaactgcaacaagccgcgctgggagaaatggttcatggtgacgtttgcttcctccacgctgtggatcgcagccttctcctacatgatggtgtggatggtcacaatcattggttacaccctggggattcctgacgtcatcatggggatcaccttcctggctgctgggaccagcgtgcctgactgcatggccagcctcattgtggccagacaagggatgggggacatggctgtgtccaactccattgggagcaacgtgtttgacatcctgattggcctcggtctcccctgggctctgcagaccctggctgtggattacggatcctacatccggctgaatagcagggggctgatctactccgtaggcttgctcctggcctctgtttttgtcacggtgttcggcgtccacctgaacaagtggcagctggacaagaagctgggctgtgggtgcctcctcctgtatggtgtgttcctgtgcttctccatcatgactgagttcaacgtgttcacctttgtgaacctgcccatgtgcggggaccactgagccgccgggtgcccacagaggctcagctccttcttttctgtgcaatacgagacccggccgcaccccgagtcacacaggcccccggggccacggcgttcgtctctcctgtgctgtcctcaggcctccgctcctgttttggtggcccaggctctcccctgacccatcctcgctcccccacctccttgggtcatgcccacccaccctttcctgcctcctccgtgtgaagacatccaacatccacgtgacttttccagctccatttttgaacagtgactgagattctagaaaaactggctgctaactggcctgagccaggcaacactgattccaatccctcctccttttttaagttatttgatggaagactcacctaatttgtgacctgagactgttgaagaaatagagaggagggggcccgttgattacagagagcatttgggattttgtttggtttggagatgatgcctaggttactgggtttggggggattgttttcttttgggggccttccccttttactccttttcttccagagatcaagagcttctcttgcatcttcttccactgggctctggattaatcaattacccaaaggctgcacctgccgtgttgtctgggcttgcatcccagatgtgttggagtatgcatggatgtagtgctttttagaggagccactgggcaaggccaccaagaacaaatgcatgacattttatagccaaggacgcctcgctaaagtcttatgggcgtcccctggggttgggggggcacaaggttttggaggaagaagacaacttccctcattccatcatcaccatctctttctcactaggttctttctagttttcaagcaatagttctagcctgccttggacaagggggccccagttaaacaaactacccatccatgagctgccaggcagtcaaaaacagaagcttccccgacttgtgagtccctgagatgtgctcttgttgtttggcatttggggtgacagggagtgacccagaggccaccactgcttttcatgcaggagttacagacactggtttcttggaaaatggagagaagcgcactttgcacagacgtcgtcaattaagtcccaatttgccacttggtattgagtacactggaccctgaccactggctcttgggcaaacgtccttcctcacggggcgcctccgccaagccggcccagctgcacccctcccttcctggagggatggccagggaaggagaaaacagagaactgacacctttgaaaccacagaatgtgttacatgcagactcgctcaagggcataagttattgtgaacgtttttgccaatcactgctcaacagccctgctagattttgtatgatgctgaattattatgcagactaattccacccagttgagacacaccatgcttgttcacttgtatttattgaaactgtggattcttgcccgtgctgtcccttgtatttactttaagcactgatcacttatcattcattcggtatggttttccctgtcccttgtacacattctggtatgaatttgtaaaaataacctgctacaaattggttgaatgtttctgtctgtggtgcgaaccagcattaacggatggggcacgtgcccaactgaggaacaggagaagaaatcaccaatttgggctctcagagctaagacacacttattgattctgttgcacattttgcactggtttatggcgattgttttcttggacggatagtgtaaaataaacttctctgttctctaaaaaaaaaaaaaaaaa

SEQ ID NO: 13605 - DNA, 2219 bp, Homo sapiens
gttgactggaggcggaggttgcagtgagccgagatcgccccactgcactccagcctggtgactccgtctcaaaaaaaaggggaggggggcgggggagagttgaaagcttaatatgtactttgggggctattaaagcaaacatttcgactaaaggggcgaatcctcgaattgtgcgatcaagcacccgagaggagagttggggggggtcaggaggggtgggggctccagggaacgcccgggggcctgggccggggtctcgcggggcccttccggaaggatcgcggcccccgaaggtgggcgtcccgcggggctccagtctccaggacgttccgggaggctccgcgctctgggaggccggctgcgtggggtccccgcgctgcagccgcagaggccccccagggccgcggttcccggagcgggaaagtcccgcgcgggggcggtggcctcgggggcgggacggggcgggggcgggggcgcgggcggccgagccgaatcccctccaccgggacgccccgctgctgctcgggaagaggcgggccctgcgcgccctgcgctcgccatggcggtttgggcggcgacgtgagcggctccgcggaccccgagcggggccccggccgcgacctgagccgccgccgagcgcccggggccatgcgaccgacgctgctgtggtcgctgctgctgctgctcggagtcttcgccgccgccgccgcggccccgccagaccctctttcccagctgcccgctcctcagcacccgaagattcgcctgtacaacgcagagcaggtcctgagttgggagccagtggccctgagcaatagcacgaggcctgttgtctaccaagtgcagtttaaatacaccgacagtaaatggttcacggccgacatcatgtccataggggtgaattgtacacagatcacagcaacagagtgtgacttcactgccgccagtccctcagcaggcttcccaatggatttcaatgtcactctacgccttcgagctgagctgggagcactccattctgcctgggtgacaatgccttggtttcaacactatcggaatgtgactgtcgggcctccagaaaacattgaggtgaccccaggagaaggctccctcatcatcaggttctcctctccctttgacatcgctgatacctccacggcctttttttgttattatgtccattactgggaaaaaggaggaatccaacaggtcaaaggccctttcagaagcaactccatttcattggataacttaaaaccctccagagtgtactgtttacaagtccaggcacaactgctttggaacaaaagtaacatctttagagtcgggcatttaagcaacatatcttgctacgaaacaatggcagatgcctccactgagcttcagcaagtcatcctgatctccgtgggaacattttcgttgctgtcggtgctggcaggagcctgtttcttcctggtcctgaaatatagaggcctgattaaatactggtttcacactccaccaagcatcccattacagatagaagagtatttaaaagacccaactcagcccatcttagaggccttggacaaggacagctcaccaaaggatgacgtctgggactctgtgtccattatctcgtttccggaaaaggagcaagaagatgttctccaaacgctttgaaccaaagcatgggcctagcccactggctccctggaagagatcaagccatcggagctgctagagttctgtctggactttccagagaccagtattcccttttgctgcctctaaaaggcctgtccctgcagacatgagagacagcaggtctcatgggggtgacaagctttttttttttttcttaaagaattttcaaaatcaaattccagaatgattttacggagatatcccaggaaaattaaggcttctcttaaacactaaaaaggcatgtaattgcttgttagcaaaatggatatgacacatctctgatacttttttcattattggttgggctgagcagtcagaagacctggtcgtcgtcttgactttggcaaatgagccggagccccttgggcaggtcacacaacctgtcccagcgagggacaccgagtggcccttcatgtacatccatggtgtgctggcttaaaatgtaattaatcttgtaaatatactcctagtaatttaagattttgtttttaaactggaaataaaagattgtatagtgcatgttttttaaagtc

SEQ ID NO: 13606 - DNA, 4006 bp, Homo sapiens
tgccaaggctccagcccggccgggctccgaggcgagaggctgcatggagtggccggcgcggctctgcgggctgtgggcgctgctgctctgcgccggcggcgggggcgggggcgggggcgccgcgcctacggaaactcagccacctgtgacaaatttgagtgtctctgttgaaaacctctgcacagtaatatggacatggaatccacccgagggagccagctcaaattgtagtctatggtattttagtcattttggcgacaaacaagataagaaaatagctccggaaactcgtcgttcaatagaagtacccctgaatgagaggatttgtctgcaagtggggtcccagtgtagcaccaatgagagtgagaagcctagcattttggttgaaaaatgcatctcacccccagaaggtgatcctgagtctgctgtgactgagcttcaatgcatttggcacaacctgagctacatgaagtgttcttggctccctggaaggaataccagtcccgacactaactatactctctactattggcacagaagcctggaaaaaattcatcaatgtgaaaacatctttagagaaggccaatactttggttgttcctttgatctgaccaaagtgaaggattccagttttgaacaacacagtgtccaaataatggtcaaggataatgcaggaaaaattaaaccatccttcaatatagtgcctttaacttcccgtgtgaaacctgatcctccacatattaaaaacctctccttccacaatgatgacctatatgtgcaatgggagaatccacagaattttattagcagatgcctattttatgaagtagaagtcaataacagccaaactgagacacataatgttttctacgtccaagaggctaaatgtgagaatccagaatttgagagaaatgtggagaatacatcttgtttcatggtccctggtgttcttcctgatactttgaacacagtcagaataagagtcaaaacaaataagttatgctatgaggatgacaaactctggagtaattggagccaagaaatgagtataggtaagaagcgcaattccacactctacataaccatgttactcattgttccagtcatcgtcgcaggtgcaatcatagtactcctgctttacctaaaaaggctcaagattattatattccctccaattcctgatcctggcaagatttttaaagaaatgtttggagaccagaatgatgatactctgcactggaagaagtacgacatctatgagaagcaaaccaaggaggaaaccgactctgtagtgctgatagaaaacctgaagaaagcctctcagtgatggagataatttatttttaccttcactgtgaccttgagaagattcttcccattctccatttgttatctgggaacttattaaatggaaactgaaactactgcaccatttaaaaacaggcagctcataagagccacaggtctttatgttgagtcgcgcaccgaaaaactaaaaataatgggcgctttggagaagagtgtggagtcattctcattgaattataaaagccagcaggcttcaaactaggggacaaagcaaaaagtgatgatagtggtggagttaatcttatcaagagttgtgacaacttcctgagggatctatacttgctttgtgttctttgtgtcaacatgaacaaattttatttgtaggggaactcatttggggtgcaaatgctaatgtcaaacttgagtcacaaagaacatgtagaaaacaaaatggataaaatctgatatgtattgtttgggatcctattgaaccatgtttgtggctattaaaactcttttaacagtctgggctgggtccggtggctcacgcctgtaatcccagcaatttgggagtccgaggcgggcggatcactcgaggtcaggagttccagaccagcctgaccaaaatggtgaaacctcctctctactaaaactacaaaaattaactgggtgtggtggcgcgtgcctgtaatcccagctactcgggaagctgaggcaggtgaattgtttgaacctgggaggtggaggttgcagtgagcagagatcacaccactgcactctagcctgggtgacagagcaagactctgtctaaaaaacaaaacaaaacaaaacaaaacaaaaaaacctcttaatattctggagtcatcattcccttcgacagcattttcctctgctttgaaagccccagaaatcagtgttggccatgatgacaactacagaaaaaccagaggcagcttctttgccaagacctttcaaagccattttaggctgttaggggcagtggaggtagaatgactccttgggtattagagtttcaaccatgaagtctctaacaatgtattttcttcacctctgctactcaagtagcatttactgtgtctttggtttgtgctaggcccccgggtgtgaagcacagaccccttccaggggtttacagtctatttgagactcctcagttcttgccacttttttttttaatctccaccagtcatttttcagaccttttaactcctcaattccaacactgatttccccttttgcattctccctccttcccttccttgtagccttttgactttcattggaaattaggatgtaaatctgctcaggagacctggaggagcagaggataattagcatctcaggttaagtgtgagtaatctgagaaacaatgactaattcttgcatattttgtaacttccatgtgagggttttcagcattgatatttgtgcattttctaaacagagatgaggtggtatcttcacgtagaacattggtattcgcttgagaaaaaaagaatagttgaacctatttctctttctttacaagatgggtccaggattcctcttttctctgccataaatgattaattaaatagcttttgtgtcttacattggtagccagccagccaaggctctgtttatgcttttggggggcatatattgggttccattctcacctatccacacaacatatccgtatatatcccctctactcttacttcccccaaatttaaagaagtatgggaaatgagaggcatttcccccaccccatttctctcctcacacacagactcatattactggtaggaacttgagaactttatttccaagttgttcaaacatttaccaatcatattaatacaatgatgctatttgcaattcctgctcctaggggaggggagataagaaaccctcactctctacaggtttgggtacaagtggcaacctgcttccatggccgtgtagaagcatggtgccctggcttctctgaggaagctggggttcatgacaatggcagatgtaaagttattcttgaagtcagattgaggctgggagacagccgtagtagatgttctactttgttctgctgttctctagaaagaatatttggttttcctgtataggaatgagattaattcctttccaggtattttataattctgggaagcaaaacccatgcctccccctagccatttttactgttatcctatttagatggccatgaagaggatgctgtgaaattcccaacaaacattgatgctgacagtcatgcagtctgggagtggggaagtgatcttttgttcccatcctcttcttttagcagtaaaatagctgagggaaaagggagggaaaaggaagttatgggaatacctgtggtggttgtgatccctaggtcttgggagctcttggaggtgtctgtatcagtggatttcccatcccctgtgggaaattagtaggctcatttactgttttaggtctagcctatgtggattttttcctaacatacctaagcaaacccagtgtcaggatggtaattcttattctttcgttcagttaagtttttcccttcatctgggcactgaagggatatgtgaaacaatgttaacatttttggtagtcttcaaccagggattgtttctgtttaacttcttataggaaagcttgagtaaaataaatattgtctttttgtatgtca

SEQ ID NO: 13607 - DNA, 5042 bp, Homo sapiens
gcaagcatttaggaatagcatttgccaactcccaagacttggctgtccctctcgctctggccttacttacctaactgacctcctgtagtactgagttgtgtgctggccaagttcctattcctggactgctttctttcccttgaccttccttgaaatactgctaacctgacttttgactgtgatctatgtgctatctcctgtgtgaagcctaatgaaaggtccttctctaatggaaactttcattctaggagttacctcattctgttttatgtggatctgttagctccttcattaggtttcaagctgtttgaaacagtgattgaatttgctcacctttgctttcctctcagggtctacattgggaccctgagtgataatagagccttctgtagtattgaattgctttaaacagaattaaaggacattggcaccaaatgtgattttgccaatccttgggagtcttggtgcctctgtctgggcttgaccagggtagaatggctgaagaaaatgtgattcctccacccattaaattctttatttctcaactactctggaagtttttgcctctttttgtttctatccattttcatacttttaagatacccttttttactttaagataccttttttcttcctaacgtttctttacatgctcacatgcaagcccagtcatccatctctctttttcacctttctgtcctcatatatttttcttaaaatatcttttctcatctaatctcctttcctctatcaatcagcctcctaagcgaaaatggtagtgctaatgttttaaaaagtgggggaggactagaaatctgtatggaatgtaattcacttttattgcttttaaattaaatgaaacgtttttgcccttgtttccattctactcagaaggatttcagactaaatccttaagcctgccatatggaaataactgggctagagggctgctatctaatctaagcatttaattcaaacatttgaaatggtttttgcttcaagaaaacataggttgacactaagctttattttagcaaaggtttgggaaaggttctaatctgcagtatgtacactttgataaatttcatagactagagcaacagattacaatttagtttgttcttccaacataaaactattttaatcctagttataatttcactgaaggctggatttactcactggcttgttaaaactgtagataacaaccacaagcctgttatttaaacacaattcagaaatcataaatagaaattcaaaaggagagctcaatgctgcaagatgagatttgatgccctgaagaaactctctctgaaatttgccaaagaccttgtggaacttaaaatatcttcttgtttcctaccagctagatatggcagcttgagaactatttattatgaatcaagatagatattttaccaactcagaaaatgttgctttttgtttggatattaatcttgtttgttcatatttttaactaggaaagttagtacagtaatatggtggtcatccaacagaccacaagaagagaatttgtccctcattcagcattttagcaaatatttcttgaacactagccatgtgcaaggtattacagtgagtgtttctgctaataaaaatatgaattaaatttgatgtttgatcataagtagaagaactgtgatactataatattgtaagtgccatagaaaacttgctattataaaatgctgtaaggagttaatgcttgcatagggtgcagtgggtcagctagagaaggctttataaagaaagtggaatatgagctttgatgcctagccagatgtgggtatgtgaagaacagggcagggcagtggggagtgggtggattctggacagctgaaacattgttaacaaaatctcagaaatggtacaaaatggaatatgaatgagaaatacagaacatttgttaggttttatttttatgcaaattaaagagaagagttagagacaaagttaaagtcaatgggtctagaatttcagctaaaactttggtaggtagtggagaatattttatcattattctgctctttaaacaacttcagagatgattgattaatcttgattgtaaaggaagagaaattctttggaagaccagttagggggttatcatatggtctagtaaaagttaataagatctgcacaaggctgggaagagtaggattagaacagaggggtggaattaaaggacatcgtatattggaaatttctaggatttagaacctgattggaagaggaagaagaaagggaggagttaaaaataactgtaaagagccaaatctgagaactgaccctgctaaaaaagtcagacaagtcaagtggtgcagctggtgtgtgctagaagagtaaaaggccaagctatgatagcaactggtggagtgataactggcctggccgccttgaaaaggcaagactctgccagatcacagcagcatgtcaacctcagcccgtctcctgctacccaagagaagaagcccatcaggcgccggccccgggcagatgttgtggttgttcgtggcaaaatccggctttattccccatctggtttttttcttattttaggagtgctcatctccattataggaattgctatggccgttcttggatattggccccaaaaagaacattttattgatgctgaaacaacactgtcaacaaatgaaactcaggtcattcggaatgaaggcggtgtggtggttcgcttctttgagcagcatttgcattctgataagatgaaaatgcttggcccattcaccatggggattggcattttcattttcatttgtgctaatgccattcttcatgaaaaccgtgacaaagagaccaaaatcatacacatgagggatatctattccacagtcattgacattcacacgctaagaatcaaggagcaaaggcaaatgaacggcatgtacactggtttgatgggagaaacagaagtaaaacagaatgggagctcctgtgcctcgagattggcagcaaatacgatcgcctctttctcgggttttcggagcagttttcgaatggacagctccgtggaggaggatgaacttatgttaaatgaaggtaagagttctgggcatcttatgccccctttgctctctgacagctctgtgtctgtctttggcctctatccacctccttccaagacaactgatgataagaccagcggctctaagaaatgtgaaaccaagtcaattgtgtcatcgtccatcagtgcttttacattgcctgtgatcaaacttaataactgtgttattgatgagcccagtatagataacatcactgaagatgctgacaacctcaaaagtaggtcaaggaatttgtcaatggattcccttgtggttcctttgcccaacaccagtgaatccttccagcccgtcagcacagtgctaccaaggaataattccattggggagtcgttgtcgagtcagtacaagtcatctatggctctcggacctggggctggacagctcttgtctcctggggctgccagaagacagtttgggtccaatacatccttgcatttgctctcgtcacactcaaagtccttggacttagaccggggtccctccactctaactgttcaggcagaacaacggaaacatccaagttggcctaggttggatcggaacaacagcaagggatatatgaaactagagaacaaagaagacccgatggataggttgcttgtgccccaagttgccatcaaaaaggactttaccaataaggagaagcttcttatgatttcaagatctcacaataatttgagttttgaacatgatgagtttttgagtaacaacctaaagaggggaacttctgaaacaaggttttaatgttaaaagaatatatcattttacaagggtatatattttaaaacgattttcactggtgtttccttcttaaagtattggctgtaagcctttttaatcaaatggtttgtagtgtattagaattggctgcttagttctgtaatgaagatggttgtatgtttgggttacttgtgactgcagtactctatgttaccacacatgattttatttttctcttcctttgaaagcatgatctcttttattaatatgaatgcaaaatgcttgcatccaaattaaagcttattttctttacttttaagttctttgattgccctattcataaaatgaaatgtccagtatggaaaacatagggtaccaaagtgtggaccaggagtacaaattcagtcccaatactcaatacgtattatagatgactatgagtgcaaaccttaggatgtgattttctgaataattgttctttgtaggatttggttacattatttaaaatgaaaaagatctagttttagtgtgagctcagtaatgttaattggttaagttcattgtgaatcttgagttttagataagtagttatttttttcaatatcacttctgtttttagtgatattatatcaagaaacaacgtattcaagagccatggctgacagtgccagatatacttagggataaacatcaaaatgcaattatagttgctataacgttagatactcggaatcaaaatttatttgcaagctgacttgataaactaaatgaaccaataaaatttgtagaaatgctatcctgaaataattatatacatgaagacaatgttgactaatgaattaagatacattatatactagttaatgctaactagtctcagtacctgtttttagccatctgttactgtccaatagcacctcattcccacattctattttcccccggtattctttagatcctagtatttggaaaacaatcggctaaccttgacatttctttttaccttcatatgccactatctcggtagttcaaaaaaatttagttcttgataaattgccttgaagtttaccttgtgctggagagccttatgataactccaaagactttcttacggtataatacatgttgtttaggattgtgtttcttagtcactgaagataataaatattaaaatggatgttttcatcagaaaaaaaaaaaaaaaaaaaaaaa

SEQ ID NO: 13608 - DNA, 11389 bp, Homo sapiens
atggcgccgccgccgccgcccgtgctgcccgtgctgctgctcctggccgccgccgccgccctgccggcgatggggctgcgagcggccgcctgggagccgcgcgtacccggcgggacccgcgccttcgccctccggcccggctgtacctacgcggtgggcgccgcttgcacgccccgggcgccgcgggagctgctggacgtgggccgcgatgggcggctggcaggacgtcggcgcgtctcgggcgcggggcgcccgctgccgctgcaagtccgcttggtggcccgcagtgccccgacggcgctgagccgccgcctgcgggcgcgcacgcaccttcccggctgcggagcccgtgcccggctctgcggaaccggtgcccggctctgcggggcgctctgcttccccgtccccggcggctgcgcggccgcgcagcattcggcgctcgcagctccgaccaccttacccgcctgccgctgcccgccgcgccccaggccccgctgtcccggccgtcccatctgcctgccgccgggcggctcggtccgcctgcgtctgctgtgcgccctgcggcgcgcggctggcgccgtccgggtgggactggcgctggaggccgccaccgcggggacgccctccgcgtcgccatccccatcgccgcccctgccgccgaacttgcccgaagcccgggcggggccggcgcgacgggcccggcggggcacgagcggcagagggagcctgaagtttccgatgcccaactaccaggtggcgttgtttgagaacgaaccggcgggcaccctcatcctccagctgcacgcgcactacaccatcgagggcgaggaggagcgcgtgagctattacatggaggggctgttcgacgagcgctcccggggctacttccgaatcgactctgccacgggcgccgtgagcacggacagcgtactggaccgcgagaccaaggagacgcacgtcctcagggtgaaagccgtggactacagtacgccgccgcgctcggccaccacctacatcactgtcttggtcaaagacaccaacgaccacagcccggtcttcgagcagtcggagtaccgcgagcgcgtgcgggagaacctggaggtgggctacgaggtgctgaccatccgcgccagcgaccgcgactcgcccatcaacgccaacttgcgttaccgcgtgttggggggcgcgtgggacgtcttccagctcaacgagagctctggcgtggtgagcacacgggcggtgctggaccgggaggaggcggccgagtaccagctcctggtggaggccaacgaccaggggcgcaatccgggcccgctcagtgccacggccaccgtgtacatcgaggtggaggacgagaacgacaactacccccagttcagcgagcagaactacgtggtccaggtgcccgaggacgtggggctcaacacggctgtgctgcgagtgcaggccacggaccgggaccagggccagaacgcggccattcactacagcatcctcagcgggaacgtggccggccagttctacctgcactcgctgagcgggatcctggatgtgatcaaccccttggatttcgaggatgtccagaaatactcgctgagcattaaggcccaggatgggggccggcccccgctcatcaattcttcaggggtggtgtctgtgcaggtgctggatgtcaacgacaacgagcctatctttgtgagcagccccttccaggccacggtgctggagaatgtgcccctgggctaccccgtggtgcacattcaggcggtggacgcggactctggagagaacgcccggctgcactatcgcctggtggacacggcctccacctttctggggggcggcagcgctgggcctaagaatcctgcccccacccctgacttccccttccagatccacaacagctccggttggatcacagtgtgtgccgagctggaccgcgaggaggtggagcactacagcttcggggtggaggcggtggaccacggctcgccccccatgagctcctccaccagcgtgtccatcacggtgctggacgtgaatgacaacgacccggtgttcacgcagcccacctacgagcttcgtctgaatgaggatgcggccgtggggagcagcgtgctgaccctgcaggcccgcgaccgtgacgccaacagtgtgattacctaccagctcacaggcggcaacacccggaaccgctttgcactcagcagccagagagggggcggcctcatcaccctggcgctacctctggactacaagcaggagcagcagtacgtgctggcggtgacagcatccgacggcacacggtcgcacactgcgcatgtcctaatcaacgtcactgatgccaacacccacaggcctgtctttcagagctcccattacacagtgagtgtcagtgaggacaggcctgtgggcacctccattgctaccctcagtgccaacgatgaggacacaggagagaatgcccgcatcacctacgtgattcaggaccccgtgccgcagttccgcattgaccccgacagtggcaccatgtacaccatgatggagctggactatgagaaccaggtcgcctacacgctgaccatcatggcccaggacaacggcatcccgcagaaatcagacaccaccaccctagagatcctcatcctcgatgccaatgacaatgcaccccagttcctgtgggatttctaccagggttccatctttgaggatgctccaccctcgaccagcatcctccaggtctctgccacggaccgggactcaggtcccaatgggcgtctgctgtacaccttccagggtggggacgacggcgatggggacttctacatcgagcccacgtccggtgtgattcgcacccagcgccggctggaccgggagaatgtggccgtgtacaacctttgggctctggctgtggatcggggcagtcccactccccttagcgcctcggtagaaatccaggtgaccatcttggacattaatgacaatgcccccatgtttgagaaggacgaactggagctgtttgttgaggagaacaacccagtggggtcggtggtggcaaagattcgtgctaacgaccctgatgaaggccctaatgcccagatcatgtatcagattgtggaaggggacatgcggcatttcttccagctggacctgctcaacggggacctgcgtgccatggtggagctggactttgaggtccggcgggagtatgtgctggtggtgcaggccacgtcggctccgctggtgagccgagccacggtgcacatccttctcgtggaccagaatgacaacccgcctgtgctgcccgacttccagatcctcttcaacaactatgtcaccaacaagtccaacagtttccccaccggcgtgatcggctgcatcccggcccatgaccccgacgtgtcagacagcctcaactacaccttcgtgcagggcaacgagctgcgcctgttgctgctggaccccgccacgggcgaactgcagctcagccgcgacctggacaacaaccggccgctggaggcgctcatggaggtgtctgtgtctgatggcatccacagcgtcacggccttctgcaccctgcgtgtcaccatcatcacggacgacatgctgaccaacagcatcactgtccgcctggagaacatgtcccaggagaagttcctgtccccgctgctggccctcttcgtggagggggtggccgccgtgctgtccaccaccaaggacgacgtcttcgtcttcaacgtccagaacgacaccgacgtcagctccaacatcctgaacgtgaccttctcggcgctgctgcctggcggcgtccgcggccagttcttcccgtcggaggacctgcaggagcagatctacctgaatcggacgctgctgaccaccatctccacgcagcgcgtgctgcccttcgacgacaacatctgcctgcgcgagccctgcgagaactacatgaagtgcgtgtccgttctgcgattcgacagctccgcgcccttcctcagctccaccaccgtgctcttccggcccatccaccccatcaacggcctgcgctgccgctgcccgcccggcttcaccggcgactactgcgagacggagatcgacctctgctactccgacccgtgcggcgccaacggccgctgccgcagccgcgagggcggctacacctgcgagtgcttcgaggacttcactggagagcactgtgaggtggatgcccgctcaggccgctgtgccaacggggtgtgcaagaacgggggcacctgcgtgaacctgctcatcggcggcttccactgcgtgtgtcctcctggcgagtatgagaggccctactgtgaggtgaccaccaggagcttcccgccccagtccttcgtcaccttccggggcctgagacagcgcttccacttcaccatctccctcacgtttgccactcaggaaaggaacggcttgcttctctacaacggccgcttcaatgagaagcacgacttcatcgccctggagatcgtggacgagcaggtgcagctcaccttctctgcaggcgagacaacaacgaccgtggcaccgaaggttcccagtggtgtgagtgacgggcggtggcactctgtgcaggtgcagtactacaacaagcccaatattggccacctgggcctgccccatgggccgtccggggaaaagatggccgtggtgacagtggatgattgtgacacaaccatggctgtgcgctttggaaaggacatcgggaactacagctgcgctgcccagggcactcagaccggctccaagaagtccctggatctgaccggccctctactcctggggggtgtccccaacctgccagaagacttcccagtgcacaaccggcagttcgtgggctgcatgcggaacctgtcagtcgacggcaaaaatgtggacatggccggattcatcgccaacaatggcacccgggaaggctgcgctgctcggaggaacttctgcgatgggaggcggtgtcagaatggaggcacctgtgtcaacaggtggaatatgtatctgtgtgagtgtccactccgattcggcgggaagaactgtgagcaagccatgcctcacccccagctcttcagcggtgagagcgtcgtgtcctggagtgacctgaacatcatcatctctgtgccctggtacctggggctcatgttccggacccggaaggaggacagcgttctgatggaggccaccagtggtgggcccaccagctttcgcctccagatcctgaacaactacctccagtttgaggtgtcccacggcccctccgatgtggagtccgtgatgctgtccgggttgcgggtgaccgacggggagtggcaccacctgctgatcgagctgaagaatgttaaggaggacagtgagatgaagcacctggtcaccatgaccttggactatgggatggaccagaacaaggcagatatcgggggcatgcttcccgggctgacggtaaggagcgtggtggtcggaggcgcctctgaagacaaggtctccgtgcgccgtggattccgaggctgcatgcagggagtgaggatgggggggacgcccaccaacgtcgccaccctgaacatgaacaacgcactcaaggtcagggtgaaggacggctgtgatgtggacgacccctgtacctcgagcccctgtccccccaatagccgctgccacgacgcctgggaggactacagctgcgtctgtgacaaagggtaccttggaataaactgtgtggatgcctgtcacctgaacccctgcgagaacatgggggcctgcgtgcgctcccccggctccccgcagggctacgtgtgcgagtgtgggcccagtcactacgggccgtactgtgagaacaaactcgaccttccgtgccccagaggctggtgggggaaccccgtctgtggaccctgccactgtgccgtcagcaaaggctttgatcccgactgtaataagaccaacggccagtgccaatgcaaggagaattactacaagctcctagcccaggacacctgtctgccctgcgactgcttcccccatggctcccacagccgcacttgcgacatggccaccgggcagtgtgcctgcaagcccggcgtcatcggccgccagtgcaaccgctgcgacaacccgtttgccgaggtcaccacgctcggctgtgaagtgatctacaatggctgtcccaaagcatttgaggccggcatctggtggccacagaccaagttcgggcagccggctgcggtgccatgccctaagggatccgttggaaatgcggtccgacactgcagcggggagaagggctggctgcccccagagctctttaactgtaccaccatctccttcgtggacctcagggccatgaatgagaagctgagccgcaatgagacgcaggtggacggcgccagggccctgcagctggtgagggcgctgcgcagtgctacacagcacacgggcacgctctttggcaatgacgtgcgcacggcctaccagctgctgggccacgtccttcagcacgagagctggcagcagggcttcgacctggcagccacgcaggacgccgactttcacgaggacgtcatccactcgggcagcgccctcctggccccagccaccagggcggcgtgggagcagatccagcggagcgagggcggcacggcacagctgctccggcgcctcgagggctacttcagcaacgtggcacgcaacgtgcggcggacgtacctgcggcccttcgtcatcgtcaccgccaacatgattcttgctgtcgacatctttgacaagttcaactttacgggagccagggtcccgcgattcgacaccatccatgaagagttccccagggagctggagtcctccgtctccttcccagccgacttcttcagaccacctgaagaaaaagaaggccccctgctgaggccggctggccggaggaccaccccgcagaccacgcgcccggggcctggcaccgagagggaggccccgatcagcaggcggaggcgacaccctgatgacgctggccagttcgccgtcgctctggtcatcatttaccgcaccctggggcagctcctgcccgagcgctacgaccccgaccgtcgcagcctccggttgcctcaccggcccatcattaataccccgatggtgagcacgctggtgtacagcgagggggctccgctcccgagacccctggagaggcccgtcctggtggagttcgccctgctggaggtggaggagcgaaccaagcctgtctgcgtgttctggaaccactccctggccgttggtgggacgggagggtggtctgcccggggctgcgagctcctgtccaggaaccggacacatgtcgcctgccagtgcagccacacagccagctttgcggtgctcatggatatctccaggcgtgagaacggggaggtcctgcctctgaagattgtcacctatgccgctgtgtccttgtcactggcagccctgctggtggccttcgtcctcctgagcctggtccgcatgctgcgctccaacctgcacagcattcacaagcacctcgccgtggcgctcttcctctctcagctggtgttcgtgattgggatcaaccagacggaaaacccgtttctgtgcacagtggttgccatcctcctccactacatctacatgagcacctttgcctggaccctcgtggagagcctgcatgtctaccgcatgctgaccgaggtgcgcaacatcgacacggggcccatgcggttctactacgtcgtgggctggggcatcccggccattgtcacaggactggcggtcggcctggacccccagggctacgggaaccccgacttctgctggctgtcgcttcaagacaccctgatttggagctttgcggggcccatcggagctgttataatcatcaacacagtcacttctgtcctatctgcaaaggtttcctgccaaagaaagcaccattattatgggaaaaaagggatcgtctccctgctgaggaccgcattcctcctgctgctgctcatcagcgccacctggctgctggggctgctggctgtgaaccgcgatgcactgagctttcactacctcttcgccatcttcagcggcttacagggccccttcgtcctccttttccactgcgtgctcaaccaggaggtccggaagcacctgaagggcgtgctcggcgggaggaagctgcacctggaggactccgccaccaccagggccaccctgctgacgcgctccctcaactgcaacaccaccttcggtgacgggcctgacatgctgcgcacagacttgggcgagtccaccgcctcgctggacagcatcgtcagggatgaagggatccagaagctcggcgtgtcctctgggctggtgaggggcagccacggagagccagacgcgtccctcatgcccaggagctgcaaggatccccctggccacgattccgactcagatagcgagctgtccctggatgagcagagcagctcttacgcctcctcacactcgtcagacagcgaggacgatggggtgggagctgaggaaaaatgggacccggccaggggcgccgtccacagcacccccaaaggggacgctgtggccaaccacgttccggccggctggcccgaccagagcctggctgagagtgacagtgaggaccccagcggcaagccccgcctgaaggtggagaccaaggtcagcgtggagctgcaccgcgaggagcagggcagtcaccgtggagagtaccccccggaccaggagagcgggggcgcagccaggcttgctagcagccagcccccagagcagaggaaaggcatcttgaaaaataaagtcacctacccgccgccgctgacgctgacggagcagacgctgaagggccggctccgggagaagctggccgactgtgagcagagccccacatcctcgcgcacgtcttccctgggctctggcggccccgactgcgccatcacagtcaagagccctgggagggagccggggcgtgaccacctcaacggggtggccatgaatgtgcgcactgggagcgcccaggccgatggctccgactctgagaaaccgtgaggcaagcccgtcaccccacacaggctgcggcatcaccctcagaccttggagcccaaggggccactgcccttgaagtggagtgggcccagagtgtggcggtccccatggtggcagccccccgactgatcatccagacacaaaggtcttggttctcccaggagctcagggcctgtcagacctggtgacaagtgccaaaggccacaggcatgagggaggcgtggaccactgggccagcaccgctgagtcctaagactgcagtcaaagccagaactgagaggggaccccagactgggcccagaggctggccagagttcaggaacgccgggcacagaccaaagaccgcggtccagccccgcccaggcgggcatctcatggcagtgcggacccgtggctggcagcccgggcagtcctttgcaaaggcaccccttgtcttaaaatcacttcgctatgtgggaaaggtggagatacttttatatatttgtatgggactctgaggaggtgcaacctgtatatatattgcattcgtgctgactttgttatcccgagagatccatgcaatgatctcttgctgtcttctctgtcaagattgcacagttgtacttgaatctggcatgtgttgacgaaactggtgccccagcagatcaaaggtgggaaatacgtcagcagtggggctaaaaccaagcggctagaagccctacagctgccttcggccaggaagtgaggatggtgtgggccctccccgccggccccctgggtccccagtgttcgctgtgtgtgcgtttgtcctctgctgccatctgccccggctgtgtgaattcaagacagggcagtgcagcactaggcaggtgtgaggagccctgctgaggtcactgtggggcacggttgccacacggctgtcatttttcacctggtcattctgtgaccaccaccccctcccctcaccgcctcccaggtggcccgggagctgcaggtggggatggctttgtcctttgctcctgctccccgtgggacctgggaccttaaagcgttgcaggttcctgatttggacagaggtgtggggccttccaggccgttacatacctcctgccaattctctaactctctgagactgcgaggatctccaggcagggttctcccctctggagtctgaccaattacttcattttgcttcaaatggccaattgtgcagagggacaaagccacagccacactcttcaacggttaccaaactgtttttggaaattcacaccaaggtcgggcccactgcaggcagctggcacagcgtggcccgaggggctgtggaacgggtcccggaactgtcagacatgtttgattttagcgtttcctttgttcttcaaatcaggtgcccaaataagtgatcagcacagctgcttccaaataggagaaaccataaaataggatgaaaatcaagtaaaatgcaaagatgtccacactgttttaaacttgaccctgatgaaaatgtgagcactgttagcagatgcctatgggagaggaaaagcgtatctgaaaatggtccaggacaggaggatgaaatgagatcccagagtcctcacacctgaatgaattatacatgtgccttaccaggtgagtggtctttcgaagataaaaaactctagtccctttaaacgtttgcccctggcgtttcctaagtacgaaaaggtttttaagtcttcgaacagtctcctttcatgactttaacaggattctgccccctgaggtgtaatttttttgttctatttttttccacgtactccacagccaacatcacgaggtgtaatttttaatttgatcagaactgttaccaaaaaacaactgtcagttttattgagatgggaaaaatgtaaacctatttttattacttaagactttatgggagagattagacactggaggtttttaacagaacgtgtatttattaatgttcaaaacactggaattacaaatgagaagagtctacaataaattaagatttttgaatttgtacttctgcggtgctggtttttctccacaaacacccccgcccctccccatgcccagggtggccgtggaagggacggtttacggacgtgcagctgagctgtccgtgtcccatgctccctcagccagtggaacgtgccggaactttttgtccattccctagtaggcctgccacagcctagatgggcagtttttgtctttcaccaaatttgaggactttttttttttgccattatttcttcagttttcttttcttgcactgatctttctcctctccttctgtgactccagtgactcagacgttagacctcttgatgttttcccactggtccctgaggctctgttc

SEQ ID NO: 13609 - DNA, 983 bp, Homo sapiens
gatttagacattgaaggactatggaccaaagcaattatagttctttacatggttttattctgcttggcttctctaaccatccaaaaatggagatgatcctgtcaggagttgtcgccatcttctacttaattacattggtgggtaacacagccatcattcttgcatctctcctggattcccagcttcatacaccaatgtactttttcctcagaaatttatctttcctagatctatgtttcacaaccagcatcatccctcagatgctggtcaacttgtggggacctgataagaccatcagctatgtgggttgtatcatccaactctatgtttacatgtggttgggctcagttgagtgccttctcctggctgttatgtcctatgatcgttttacagctatatgtaagcccttgcattattttgtagtcatgaacccacatctatgtctaaagatgattatcatgatctggagtattagtttggccaattctgtagtattatgtacactcactctgaatttgcccacatgtggaaacaacattctggatcatttcttgtgtgagttgccagctctggtcaagatagcttgtgtagacaccacaacagttgaaatgtctgttttcgctttaggcattataattgtcctcacacctctcatccttattcttatatcctatggctacattgccaaagctgtgctgagaacgaagtcaaaagcaagccagcgaaaagcaatgaatacctgtggatctcatcttactgtagtgtctatgttctatggaactattatctacatgtacctgcaaccaggtaacagggcttccaaagaccagggcaagttcctcaccctcttttacaccgtcatcactccaagtctcaacccgctcatttacaccttaagaaataaggacatgaaggatgccctgaagaaactgatgagatttcaccacaaatctacaaaaataaagaggaattgcaagtcatag

SEQ ID NO: 13610 - DNA, 6348 bp, Homo sapiens
aattaattttacttaggataagtgttgttattattgtttttattgttgttctgttagttactcaaaacttcattctaattgtgccctgagtttgttaaaataccatactgtatttttgtgtaacatgtaaataggcattaatttttgagaaatagaaatgtttatccttaatgtatttttaatttgctaacattgattttttattttctttcctgaaatagcttatttcctaaaatgaaagaatttattctcagatgaataatttttatatcagctattcttatcagagcaataaacaaataccaatgatgcgctcagccaacaattcattacactctctgaagagtaactggacaaggagaaaaacatagggaaaaaaccaacagaatttgttggcatgttctacacacagaccatggcttttcagaagccaagctgaatcaaaacagttttaaaagaggcaaccatttgtagaggagtccttgaaggattcttcattgttttcttggacaaaaagagaccagtggatccaagtgcttcaaatacttctctcttattttcttaactctattgctctgcaatatttactttaccctgttaatgaacaggacaaaatggttaaaaaagagataagcgtgcgtcaacaaattcaggctcttctgtacaagaattttcttaaaaaatggagaataaaaagagagtttattggaatggacaataacattgtttctagggctatatttgtgcatcttttcggaacacttcagagctacccgttttcctgaacaacctcctaaagtcctgggaagcgtggatcagtttaatgactctggcctggtagtggcatatacaccagtcagtaacataacacaaaggataatgaataagatggccttggcttcctttatgaaaggaagaacagtcattgggacaccagatgaagagaccatggatatagaacttccaaaaaaataccatgaaatggtgggagttatatttagtgatactttctcatatcgcctgaagtttaattggggatatagaatcccagttataaaggagcactctgaatacacagaacactgttgggccatgcatggtgaaattttttgttacttggcaaagtactggctaaaagggtttgtagcttttcaagctgcaattaatgctgcaattatagaagtcacaacaaatcattctgtaatggaggagttgacatcagttattggaataaatatgaagataccacctttcatttctaagggagaaattatgaatgaatggtttcattttacttgcttagtttctttctcttcttttatatactttgcatcattaaatgttgcaagggaaagaggaaaatttaagaaactgatgacagtgatgggtctccgagagtcagcattctggctctcctggggattgacatacatttgcttcatcttcattatgtccatttttatggctctggtcataacatcaatcccaattgtatttcatactggcttcatggtgatattcacactctatagcttatatggcctttctttgatagcattggctttcctcatgagtgttttaataaggaaacctatgctcgctggtttggctggatttctcttcactgtattttggggatgtctgggattcactgtgttatatagacaacttcctttatctttgggatgggtattaagtcttcttagcccttttgccttcactgctggaatggcccaggttacacacctggataattacttaagtggtgttatttttcctgatccctctggggattcatacaaaatgatagccacttttttcattttggcatttgatactcttttctatttgatattcacattatattttgagcgagttttacctgataaagatggccatggggattctccattatttttccttaagtcctcattttggtccaaacatcaaaatactcatcatgaaatctttgagaatgaaataaatcctgagcattcctctgatgattcttttgaaccggtgtctccagaattccatggaaaagaagccataagaatcagaaatgttataaaagaatataatggaaagactggaaaagtagaagcattgcaaggcatattttttgacatatatgaaggacagatcactgcaatacttgggcataatggagctggtaaatcaacactgctaaacattcttagtggattgtctgtttctacagaaggatcagccactatttataatactcaactctctgaaataactgacatggaagaaattagaaagaatattggattttgtccacagttcaattttcaatttgacttcctcactgtgagagaaaacctcagggtatttgctaaaataaaagggattcagccaaaggaagtggaacaagaggtaaaaagaattataatggaattagacatgcaaagcattcaagacattattgctaaaaaattaagtggtgggcagaagagaaaactaacactagggattgccatcttaggagatcctcaggttttgctgctagatgaaccaactgctggattggatcccttttcaagacaccgagtgtggagcctcctgaaggagcataaagtagaccgacttatcctcttcagtacccaattcatggatgaggctgacatcttggctgataggaaagtatttctgtctaatgggaagttgaaatgtgcaggatcatctttgtttctgaagcgaaagtggggtattggatatcatttaagtttacacaggaatgaaatgtgtgacacagaaaaaatcacatcccttattaagcagcacattcctgatgccaagttaacaacagaaagtgaagaaaaacttgtatatagtttgcctttggaaaaaacgaacaaatttccagatctttacagtgaccttgataagtgttctgaccagggcataaggaattatgctgtttcagtgacatctctgaatgaagtattcttgaacctagaaggaaaatcagcaattgatgaaccagattttgacattgggaaacaagagaaaatacatgtgacaagaaatactggagatgagtctgaaatggaacaggttctttgttctcttcctgaaacaagaaaggctgtcagtagtgcagctctctggagacgacaaatctatgcagtggcaacacttcgcttcttaaagttaaggcgtgaaaggagagctcttttgtgtttgttactagtacttggaattgcttttatccccatcattctagagaagataatgtataaagtaactcgtgaaactcattgttgggagttttcacccagtatgtatttcctttctctggaacaaatcccgaagacgcctcttaccagcctgttaatcgttaataatacaggatcaaatattgaagacctcgtgcattcactgaagtgtcaggatatagttttggaaatagatgactttagaaacagaaatggctcagatgatccctcctacaatggagccatcatagtgtctggtgaccagaaggattacagattttctgttgcgtgtaataccaagaaattgaattgttttcctgttcttatgggaattgttagcaatgcccttatgggaatttttaacttcacggagcttattcaaatggagagcacttcattttctcgtgatgacatagtgctggatcttggttttatagatgggtccatatttttgttgttgatcacaaactgcgtttctccttttatcggcatgagcagcatcagcgattataaaaaaaatgttcaatcccagttatggatttcaggcctctggccttcagcatactggtgtggacaggctctggtggacattccattatacttcttgattctcttttcaatacatttaatttactacttcatatttctgggattccagctttcatgggaactcatgtttgttttggtggtatgcataattggttgtgcagtttctcttatattcctcacatatgtgctttcattcatctttcgcaagtggagaaaaaataatggcttttggtcttttggcttttttattatcttaatatgtgtatccacaattatggtatcaactcaatatgaaaaactcaacttaattttgtgcatgattttcataccttccttcactttgctggggtatgtcatgttattgatccagctcgactttatgagaaacttggacagtctggacaatagaataaatgaagtcaataaaaccattcttttaacaaccttaataccataccttcagagtgttattttcctttttgtcataaggtgtctggaaatgaagtatggaaatgaaataatgaataaagacccagttttcagaatctctccacggagtagagaaactcatcccaatccggaagagcccgaagaagaagatgaagatgttcaagctgaaagagtccaagcagcaaatgcactcactgctccaaacttggaggaggaaccagtcataactgcaagctgtttacacaaggaatattatgagacaaagaaaagttgcttttcaacaagaaagaagaaaatagccatcagaaatgtttccttttgtgttaaaaaaggtgaagttttgggattactaggacacaatggagctggtaaaagtacttccattaaaatgataactgggtgcacaaagccaactgcaggagtggtggtgttacaaggcagcagagcatcagtaaggcaacagcatgacaacagcctcaagttcttggggtactgccctcaggagaactcactgtggcccaagcttacaatgaaagagcacttggagttgtatgcagctgtgaaaggactgggcaaagaagatgctgctctcagtatttcacgattggtggaagctcttaagctccaggaacaacttaaggctcctgtgaaaactctatcagagggaataaagagaaagctgtgctttgtgctgagcatcctggggaacccatcagtggtgcttctagatgagccgttcaccgggatggaccccgaggggcagcagcaaatgtggcagatacttcaggctaccgttaaaaacaaggagaggggcaccctcttgaccacccattacatgtcagaggctgaggctgtgtgtgaccgtatggccatgatggtgtcaggaacgctaaggtgtattggttccattcaacatctgaaaaacaagtttggtagagattatttactagaaataaaaatgaaagaacctacccaggtggaagctctccacacagagattttgaagcttttcccacaggctgcttggcaggaaagatattcctctttaatggcgtataagttacctgtggaggatgtccaccctctatctcgggcctttttcaagttagaggcgatgaaacagaccttcaacctggaggaatacagcctctctcaggctaccttggagcaggtattcttagaactctgtaaagagcaggagctgggaaatgttgatgataaaattgatacaacagttgaatggaaacttctcccacaggaagacccttaaaatgaagaacctcctaacattcaattttaggtcctactacattgttagtttccataattctacaagaatgtttccttttacttcagttaacaaaagaaaacatttaataaacattcaataatgattacagttttcatttttaaaaatttaggatgaaggaaacaaggaaatatagggaaaagtagtagacaaaattaacaaaatcagacatgttattcatccccaacatgggtctattttgtgcttaaaaataatttaaaaatcatacaatattaggttggttatcggttattatcaataaagctaacactgagaacattttacaaataaaaatatgaggtttttagcctgaacttcaaatgtatcagctatttttaaacattatttactcggattctaatttaatgtgacattgactataagaaggtctgataaactgatgaaatggcacagcataacatttaattataatgacattctgattataaaataaatgcatgtgaattttagtacatattgaagttatatggaagaagatagccataatctgtaagaaagtaccgcagttaatattttctttagccaacttatattcaatgtattttttatggatcctttttcaaaggtagtatcagtaggcatagtcattttctgtatcttttcacctcacagttcatgaacatttcccatgtcattatagcacttttgtgttatataattgctgcattaatgttatagctgtattgatgtaataccagagttgttacgttcgggttatatgcaagtttatttcttagaaataaaactttgatggactttcaaaaaaaaaaaaaaaaa

SEQ ID NO: 13611 - DNA, 2332 bp, Homo sapiens
gtctgcatagaaagaccaacaaccagcaccacttccttgctttttccagccatgaatgcttccagtcggaatgtgtttgacacgttgatcagggtgttgacagaaagtatgttcaaacatcttcggaaatgggtcgtcactcgcttttttgggcattctcggcaaagagcaaggctagtctccaaagatggaaggtgcaacatagaatttggcaatgtggaggcacagtcaaggtttatattctttgtggacatctggacaacggtacttgacctcaagtggagatacaaaatgaccattttcatcacagccttcttggggagttggtttttctttggtctcctgtggtatgcagtagcgtacattcacaaagacctcccggaattccatccttctgccaatcacactccctgtgtggagaatattaatggcttgacctcagcttttctgttttctctggagactcaagtgaccattggatatggattcaggtgtgtgacagaacagtgtgccactgccatttttctgcttatctttcagtctatacttggagttataatcaattctttcatgtgtggggccatcttagccaagatctccaggcccaaaaaacgtgccaagaccattacgttcagcaagaacgcagtgatcagcaaacggggagggaagctttgcctcctaatccgagtggctaatctcaggaagagccttcttattggcagtcacatttatggaaagcttctgaagaccacagtcactcctgaaggagagaccattattttggaccagatcaatatcaactttgtagttgacgctgggaatgaaaatttattcttcatctccccattgacaatttaccatgtcattgatcacaacagccctttcttccacatggcagcggagacccttctccagcaggactttgaattagtggtgtttttagatggcacagtggagtccaccagtgctacctgccaagtccggacatcctatgtcccagaggaggtgctttggggctaccgttttgctcccatagtatccaagacaaaggaagggaaataccgagtggatttccataactttagcaagacagtggaagtggagacccctcactgtgccatgtgcctttataatgagaaagatgttagagccaggatgaagagaggctatgacaaccccaacttcatcttgtcagaagtcaatgaaacagatgacaccaaaatgtaacagtggcttttcaacgggagtaaagcaaagtctctaaagctcctagtacctagaagcattatgaagcagtcaacaatttaggggtacgaaagtaggatgagagccttcaaagtctaccagcacaaagacccctgagccccgcaattgtgatcccacaagacatgcatctccacaaggctactgtattagaacgtgcaatgcatttatatgaaactggtgtatggaagacataggtgctctcttgaaatcttaaatatgattatttgagctcatataaggtggattggagcagataaaattatcaaaagtttcatgaacaggccaaacaaaatattttttaaagtttccttaaagaagttatgaactttagaaaggatcaggggacaataataatctcattttgattctactgataagaatgactccacttttaatgtggacttttactcatggaaaaattgtctcctaatttggggagatgaaccaaccaatcaatgacaagaaaacgcttacacaaagaacaatttgaggctctaagcttctcatgtggtacgtttagacagaggctaaatctgcacactagaatcttgatgataccttcctgcaagacagaatgctttagttaaaagtggtgatgatatttctttcaatctgtattggatggcttaaagggctataaatctgtttataaagagcatttcctgctcttcgaagacagcaatgaggagttggaaggtgcaaagtcagtagagaagggaatgtatcattaatgcacctgagaagaaacagtttcatgtgttcctccacctagagtttgtactggaatgctatttctaaagaagaagtgggaaagagagaggaatgggatggagccccacagtcagaatgttactatgtctttctttccctgacagcccatcttcctaaaagggaccagcttatggaaggctcgaccttgaggggaaagttttactgtgaaagtcttcttcagatccccacctgcatcattccgaatgtgtcctggaaaaaaactggtactcaaagctgcttaggaatcaaaatgttttcagtgtgttgattaatatagtaaatttctgaaactgtg

SEQ ID NO: 13612 - DNA, 2579 bp, Homo sapiens
gttgcatacagatgagttggcagccggtctgagctggcccacagactcataaaatcaacagggcctcgggtaccctcacctagcatatccaaactcttgcatcaaaggtgcagggacttgctcacatcgagaatctggttgctttcttggagaccaagaaaatgagtttttgtttctacatttactccagcaatccatgaggactttataggaattttgcaccattctgaatggatacatttggatttctcaacatttgttcagcttcctaatgactgttgtgacaattgctctataccagtgaatgccaactgtttatctctgctctgaacagatcagggtgttgacagaaagtatgttcaaacatcttcggaaatgggtcgtcactcgcttttttgggcattctcggcaaagagcaaggctagtctccaaagatggaaggtgcaacatagaatttggcaatgtggaggcacagtcaaggtttatattctttgtggacatctggacaacggtacttgacctcaagtggagatacaaaatgaccattttcatcacagccttcttggggagttggtttttctttggtctcctgtggtatgcagtagcgtacattcacaaagacctcccggaattccatccttctgccaatcacactccctgtgtggagaatattaatggcttgacctcagcttttctgttttctctggagactcaagtgaccattggatatggattcaggtgtgtgacagaacagtgtgccactgccatttttctgcttatctttcagtctatacttggagttataatcaattctttcatgtgtggggccatcttagccaagatctccaggcccaaaaaacgtgccaagaccattacgttcagcaagaacgcagtgatcagcaaacggggagggaagctttgcctcctaatccgagtggctaatctcaggaagagccttcttattggcagtcacatttatggaaagcttctgaagaccacagtcactcctgaaggagagaccattattttggaccagatcaatatcaactttgtagttgacgctgggaatgaaaatttattcttcatctccccattgacaatttaccatgtcattgatcacaacagccctttcttccacatggcagcggagacccttctccagcaggactttgaattagtggtgtttttagatggcacagtggagtccaccagtgctacctgccaagtccggacatcctatgtcccagaggaggtgctttggggctaccgttttgctcccatagtatccaagacaaaggaagggaaataccgagtggatttccataactttagcaagacagtggaagtggagacccctcactgtgccatgtgcctttataatgagaaagatgttagagccaggatgaagagaggctatgacaaccccaacttcatcttgtcagaagtcaatgaaacagatgacaccaaaatgtaacagtggcttttcaacgggagtaaagcaaagtctctaaagctcctagtacctagaagcattatgaagcagtcaacaatttaggggtacgaaagtaggatgagagccttcaaagtctaccagcacaaagacccctgagccccgcaattgtgatcccacaagacatgcatctccacaaggctactgtattagaacgtgcaatgcatttatatgaaactggtgtatggaagacataggtgctctcttgaaatcttaaatatgattatttgagctcatataaggtggattggagcagataaaattatcaaaagtttcatgaacaggccaaacaaaatattttttaaagtttccttaaagaagttatgaactttagaaaggatcaggggacaataataatctcattttgattctactgataagaatgactccacttttaatgtggacttttactcatggaaaaattgtctcctaatttggggagatgaaccaaccaatcaatgacaagaaaacgcttacacaaagaacaatttgaggctctaagcttctcatgtggtacgtttagacagaggctaaatctgcacactagaatcttgatgataccttcctgcaagacagaatgctttagttaaaagtggtgatgatatttctttcaatctgtattggatggcttaaagggctataaatctgtttataaagagcatttcctgctcttcgaagacagcaatgaggagttggaaggtgcaaagtcagtagagaagggaatgtatcattaatgcacctgagaagaaacagtttcatgtgttcctccacctagagtttgtactggaatgctatttctaaagaagaagtgggaaagagagaggaatgggatggagccccacagtcagaatgttactatgtctttctttccctgacagcccatcttcctaaaagggaccagcttatggaaggctcgaccttgaggggaaagttttactgtgaaagtcttcttcagatccccacctgcatcattccgaatgtgtcctggaaaaaaactggtactcaaagctgcttaggaatcaaaatgttttcagtgtgttgattaatatagtaaatttctgaaactgtg

SEQ ID NO: 13613 - DNA, 2446 bp, Homo sapiens
gttgcatacagatgagttggcagccggtctgagctggcccacagactcataaaatcaacagggcctcgggtaccctcacctagcatatccaaactcttgcatcaaaggtgcagggacttgctcacatcgagaatctggttgctttcttggagaccaagaaaatgagtttttgtttctacatttactccagcaatccatgagatcagggtgttgacagaaagtatgttcaaacatcttcggaaatgggtcgtcactcgcttttttgggcattctcggcaaagagcaaggctagtctccaaagatggaaggtgcaacatagaatttggcaatgtggaggcacagtcaaggtttatattctttgtggacatctggacaacggtacttgacctcaagtggagatacaaaatgaccattttcatcacagccttcttggggagttggtttttctttggtctcctgtggtatgcagtagcgtacattcacaaagacctcccggaattccatccttctgccaatcacactccctgtgtggagaatattaatggcttgacctcagcttttctgttttctctggagactcaagtgaccattggatatggattcaggtgtgtgacagaacagtgtgccactgccatttttctgcttatctttcagtctatacttggagttataatcaattctttcatgtgtggggccatcttagccaagatctccaggcccaaaaaacgtgccaagaccattacgttcagcaagaacgcagtgatcagcaaacggggagggaagctttgcctcctaatccgagtggctaatctcaggaagagccttcttattggcagtcacatttatggaaagcttctgaagaccacagtcactcctgaaggagagaccattattttggaccagatcaatatcaactttgtagttgacgctgggaatgaaaatttattcttcatctccccattgacaatttaccatgtcattgatcacaacagccctttcttccacatggcagcggagacccttctccagcaggactttgaattagtggtgtttttagatggcacagtggagtccaccagtgctacctgccaagtccggacatcctatgtcccagaggaggtgctttggggctaccgttttgctcccatagtatccaagacaaaggaagggaaataccgagtggatttccataactttagcaagacagtggaagtggagacccctcactgtgccatgtgcctttataatgagaaagatgttagagccaggatgaagagaggctatgacaaccccaacttcatcttgtcagaagtcaatgaaacagatgacaccaaaatgtaacagtggcttttcaacgggagtaaagcaaagtctctaaagctcctagtacctagaagcattatgaagcagtcaacaatttaggggtacgaaagtaggatgagagccttcaaagtctaccagcacaaagacccctgagccccgcaattgtgatcccacaagacatgcatctccacaaggctactgtattagaacgtgcaatgcatttatatgaaactggtgtatggaagacataggtgctctcttgaaatcttaaatatgattatttgagctcatataaggtggattggagcagataaaattatcaaaagtttcatgaacaggccaaacaaaatattttttaaagtttccttaaagaagttatgaactttagaaaggatcaggggacaataataatctcattttgattctactgataagaatgactccacttttaatgtggacttttactcatggaaaaattgtctcctaatttggggagatgaaccaaccaatcaatgacaagaaaacgcttacacaaagaacaatttgaggctctaagcttctcatgtggtacgtttagacagaggctaaatctgcacactagaatcttgatgataccttcctgcaagacagaatgctttagttaaaagtggtgatgatatttctttcaatctgtattggatggcttaaagggctataaatctgtttataaagagcatttcctgctcttcgaagacagcaatgaggagttggaaggtgcaaagtcagtagagaagggaatgtatcattaatgcacctgagaagaaacagtttcatgtgttcctccacctagagtttgtactggaatgctatttctaaagaagaagtgggaaagagagaggaatgggatggagccccacagtcagaatgttactatgtctttctttccctgacagcccatcttcctaaaagggaccagcttatggaaggctcgaccttgaggggaaagttttactgtgaaagtcttcttcagatccccacctgcatcattccgaatgtgtcctggaaaaaaactggtactcaaagctgcttaggaatcaaaatgttttcagtgtgttgattaatatagtaaatttctgaaactgtg

SEQ ID NO: 13614 - DNA, 2616 bp, Homo sapiens
gttgcatacagatgagttggcagccggtctgagctggcccacagactcataaaatcaacagggcctcgggtaccctcacctagcatatccaaactcttgcatcaaaggtgcagggacttgctcacatcgagaatctggttgctttcttggagaccaagaaaatgagtttttgtttctacatttactccagcaatccatgaggtttcttctctactgtgccttcatccccatcctgggccctgacaaagacagtgtgacaagttctgagccccacaggtggaatcccaaaccaagcagctcttgctggtcaccccaagatctacttatacatgaagttttgaaaatcatctcctgaacctcttctgacagagatcagggtgttgacagaaagtatgttcaaacatcttcggaaatgggtcgtcactcgcttttttgggcattctcggcaaagagcaaggctagtctccaaagatggaaggtgcaacatagaatttggcaatgtggaggcacagtcaaggtttatattctttgtggacatctggacaacggtacttgacctcaagtggagatacaaaatgaccattttcatcacagccttcttggggagttggtttttctttggtctcctgtggtatgcagtagcgtacattcacaaagacctcccggaattccatccttctgccaatcacactccctgtgtggagaatattaatggcttgacctcagcttttctgttttctctggagactcaagtgaccattggatatggattcaggtgtgtgacagaacagtgtgccactgccatttttctgcttatctttcagtctatacttggagttataatcaattctttcatgtgtggggccatcttagccaagatctccaggcccaaaaaacgtgccaagaccattacgttcagcaagaacgcagtgatcagcaaacggggagggaagctttgcctcctaatccgagtggctaatctcaggaagagccttcttattggcagtcacatttatggaaagcttctgaagaccacagtcactcctgaaggagagaccattattttggaccagatcaatatcaactttgtagttgacgctgggaatgaaaatttattcttcatctccccattgacaatttaccatgtcattgatcacaacagccctttcttccacatggcagcggagacccttctccagcaggactttgaattagtggtgtttttagatggcacagtggagtccaccagtgctacctgccaagtccggacatcctatgtcccagaggaggtgctttggggctaccgttttgctcccatagtatccaagacaaaggaagggaaataccgagtggatttccataactttagcaagacagtggaagtggagacccctcactgtgccatgtgcctttataatgagaaagatgttagagccaggatgaagagaggctatgacaaccccaacttcatcttgtcagaagtcaatgaaacagatgacaccaaaatgtaacagtggcttttcaacgggagtaaagcaaagtctctaaagctcctagtacctagaagcattatgaagcagtcaacaatttaggggtacgaaagtaggatgagagccttcaaagtctaccagcacaaagacccctgagccccgcaattgtgatcccacaagacatgcatctccacaaggctactgtattagaacgtgcaatgcatttatatgaaactggtgtatggaagacataggtgctctcttgaaatcttaaatatgattatttgagctcatataaggtggattggagcagataaaattatcaaaagtttcatgaacaggccaaacaaaatattttttaaagtttccttaaagaagttatgaactttagaaaggatcaggggacaataataatctcattttgattctactgataagaatgactccacttttaatgtggacttttactcatggaaaaattgtctcctaatttggggagatgaaccaaccaatcaatgacaagaaaacgcttacacaaagaacaatttgaggctctaagcttctcatgtggtacgtttagacagaggctaaatctgcacactagaatcttgatgataccttcctgcaagacagaatgctttagttaaaagtggtgatgatatttctttcaatctgtattggatggcttaaagggctataaatctgtttataaagagcatttcctgctcttcgaagacagcaatgaggagttggaaggtgcaaagtcagtagagaagggaatgtatcattaatgcacctgagaagaaacagtttcatgtgttcctccacctagagtttgtactggaatgctatttctaaagaagaagtgggaaagagagaggaatgggatggagccccacagtcagaatgttactatgtctttctttccctgacagcccatcttcctaaaagggaccagcttatggaaggctcgaccttgaggggaaagttttactgtgaaagtcttcttcagatccccacctgcatcattccgaatgtgtcctggaaaaaaactggtactcaaagctgcttaggaatcaaaatgttttcagtgtgttgattaatatagtaaatttctgaaactgtg

SEQ ID NO: 13615 - DNA, 2749 bp, Homo sapiens
gttgcatacagatgagttggcagccggtctgagctggcccacagactcataaaatcaacagggcctcgggtaccctcacctagcatatccaaactcttgcatcaaaggtgcagggacttgctcacatcgagaatctggttgctttcttggagaccaagaaaatgagtttttgtttctacatttactccagcaatccatgaggactttataggaattttgcaccattctgaatggatacatttggatttctcaacatttgttcagcttcctaatgactgttgtgacaattgctctataccagtgaatgccaactgtttatccctgctctgaacaggtttcttctctactgtgccttcatccccatcctgggccctgacaaagacagtgtgacaagttctgagccccacaggtggaatcccaaaccaagcagctcttgctggtcaccccaagatctacttatacatgaagttttgaaaatcatctcctgaacctcttctgacagagatcagggtgttgacagaaagtatgttcaaacatcttcggaaatgggtcgtcactcgcttttttgggcattctcggcaaagagcaaggctagtctccaaagatggaaggtgcaacatagaatttggcaatgtggaggcacagtcaaggtttatattctttgtggacatctggacaacggtacttgacctcaagtggagatacaaaatgaccattttcatcacagccttcttggggagttggtttttctttggtctcctgtggtatgcagtagcgtacattcacaaagacctcccggaattccatccttctgccaatcacactccctgtgtggagaatattaatggcttgacctcagcttttctgttttctctggagactcaagtgaccattggatatggattcaggtgtgtgacagaacagtgtgccactgccatttttctgcttatctttcagtctatacttggagttataatcaattctttcatgtgtggggccatcttagccaagatctccaggcccaaaaaacgtgccaagaccattacgttcagcaagaacgcagtgatcagcaaacggggagggaagctttgcctcctaatccgagtggctaatctcaggaagagccttcttattggcagtcacatttatggaaagcttctgaagaccacagtcactcctgaaggagagaccattattttggaccagatcaatatcaactttgtagttgacgctgggaatgaaaatttattcttcatctccccattgacaatttaccatgtcattgatcacaacagccctttcttccacatggcagcggagacccttctccagcaggactttgaattagtggtgtttttagatggcacagtggagtccaccagtgctacctgccaagtccggacatcctatgtcccagaggaggtgctttggggctaccgttttgctcccatagtatccaagacaaaggaagggaaataccgagtggatttccataactttagcaagacagtggaagtggagacccctcactgtgccatgtgcctttataatgagaaagatgttagagccaggatgaagagaggctatgacaaccccaacttcatcttgtcagaagtcaatgaaacagatgacaccaaaatgtaacagtggcttttcaacgggagtaaagcaaagtctctaaagctcctagtacctagaagcattatgaagcagtcaacaatttaggggtacgaaagtaggatgagagccttcaaagtctaccagcacaaagacccctgagccccgcaattgtgatcccacaagacatgcatctccacaaggctactgtattagaacgtgcaatgcatttatatgaaactggtgtatggaagacataggtgctctcttgaaatcttaaatatgattatttgagctcatataaggtggattggagcagataaaattatcaaaagtttcatgaacaggccaaacaaaatattttttaaagtttccttaaagaagttatgaactttagaaaggatcaggggacaataataatctcattttgattctactgataagaatgactccacttttaatgtggacttttactcatggaaaaattgtctcctaatttggggagatgaaccaaccaatcaatgacaagaaaacgcttacacaaagaacaatttgaggctctaagcttctcatgtggtacgtttagacagaggctaaatctgcacactagaatcttgatgataccttcctgcaagacagaatgctttagttaaaagtggtgatgatatttctttcaatctgtattggatggcttaaagggctataaatctgtttataaagagcatttcctgctcttcgaagacagcaatgaggagttggaaggtgcaaagtcagtagagaagggaatgtatcattaatgcacctgagaagaaacagtttcatgtgttcctccacctagagtttgtactggaatgctatttctaaagaagaagtgggaaagagagaggaatgggatggagccccacagtcagaatgttactatgtctttctttccctgacagcccatcttcctaaaagggaccagcttatggaaggctcgaccttgaggggaaagttttactgtgaaagtcttcttcagatccccacctgcatcattccgaatgtgtcctggaaaaaaactggtactcaaagctgcttaggaatcaaaatgttttcagtgtgttgattaatatagtaaatttctgaaactgtg

SEQ ID NO: 13616 - DNA, 7586 bp, Homo sapiens
gttctttgtgacacatcacacagaattggagtgctgtccttctggagagtggtggagaaccaagatacagttcagaaccaaaggaatagagaagggctttgatttctttttggctttagattggggatttgggaggcttagcaggaaagatgtccactgaaaatgtggaagggaagcccagtaaccttggggagagaggaagagcccggagctccactttcctcagggttgtccagccaatgtttaaccacagtattttcacttctgcagtctctcctgctgcagaacgcatccgattcatcttgggagaggaggatgacagcccagctccccctcagctcttcacggaactggatgagctgctggccgtggatgggcaggagatggagtggaaggaaacagccaggtggatcaagtttgaagaaaaagtggaacagggtggggaaagatggagcaagccccatgtggccacattgtcccttcatagtttatttgagctgaggacatgtatggagaaaggatccatcatgcttgatcgggaggcttcttctctcccacagttggtggagatgattgttgaccatcagattgagacaggcctattgaaacctgaacttaaggataaggtgacctatactttgctccggaagcaccggcatcaaaccaagaaatccaaccttcggtccctggctgacattgggaagacagtctccagtgcaagtaggatgtttaccaaccctgataatggtagcccagccatgacccataggaatctgacttcctccagtctgaatgacatttctgataaaccggagaaggaccagctgaagaataagttcatgaaaaaattgccacgtgatgcagaagcttccaacgtgcttgttggggaggttgactttttggatactcctttcattgcctttgttaggctacagcaggctgtcatgctgggtgccctgactgaagttcctgtgcccacaaggttcttgttcattctcttaggtcctaaggggaaagccaagtcctaccacgagattggcagagccattgccaccctgatgtctgatgaggtgttccatgacattgcttataaagcaaaagacaggcacgacctgattgctggtattgatgagttcctagatgaagtcatcgtccttccacctggggaatgggatccagcaattaggatagagcctcctaagagtcttccatcctctgacaaaagaaagaatatgtactcaggtggagagaatgttcagatgaatggggatacgccccatgatggaggtcacggaggaggaggacatggggattgtgaagaattgcagcgaactggacggttctgtggtggactaattaaagacataaagaggaaagcgccattttttgccagtgatttttatgatgctttaaatattcaagctctttcggcaattctcttcatttatctggcaactgtaactaatgctatcacttttggaggactgcttggggatgccactgacaacatgcagggcgtgttggagagtttcctgggcactgctgtctctggagccatcttttgcctttttgctggtcaaccactcactattctgagcagcaccggacctgtcctagtttttgagaggcttctatttaatttcagcaaggacaataattttgactatttggagtttcgcctttggattggcctgtggtccgccttcctatgtctcattttggtagccactgatgccagcttcttggttcaatacttcacacgtttcacggaggagggcttttcctctctgattagcttcatctttatctatgatgctttcaagaagatgatcaagcttgcagattactaccccatcaactccaacttcaaagtgggctacaacactctcttttcctgtacctgtgtgccacctgacccagctaatatctcaatatctaatgacaccacactggccccagagtatttgccaactatgtcttctactgacatgtaccataatactacctttgactgggcatttttgtcgaagaaggagtgttcaaaatacggaggaaaccttgtcgggaacaactgtaattttgttcctgatatcacactcatgtcttttatcctcttcttgggaacctacacctcttccatggctctgaaaaaattcaaaactagtccttattttccaaccacagcaagaaaactgatcagtgattttgccattatcttgtccattctcatcttttgtgtaatagatgccctagtaggcgtggacaccccaaaactaattgtgccaagtgagttcaagccaacaagtccaaaccgaggttggttcgttccaccgtttggagaaaacccctggtgggtgtgccttgctgctgctatcccggctttgttggtcactatactgattttcatggaccaacaaattacagctgtgattgtaaacaggaaagaacataaactcaagaaaggagcagggtatcacttggatctcttttgggtggccatcctcatggttatatgctccctcatggctcttccgtggtatgtagctgctacggtcatctccattgctcacatcgacagtttgaagatggagacagagacttctgcacctggagaacaaccaaagtttctaggagtgagggaacaaagagtcactggaacccttgtgtttattctgactggtctgtcagtctttatggctcccatcttgaagtttatacccatgcctgtactctatggtgtgttcctgtatatgggagtagcatcccttaatggtgtgcagttcatggatcgtctgaagctgcttctgatgcctctgaagcatcagcctgacttcatctacctgcgtcatgttcctctgcgcagagtccacctgttcactttcctgcaggtgttgtgtctggccctgctttggatcctcaagtcaacggtggctgctatcatttttccagtaatgatcttggcacttgtagctgtcagaaaaggcatggactacctcttctcccagcatgacctcagcttcctggatgatgtcattccagaaaaggacaagaaaaagaaggaggatgagaagaaaaagaaaaagaagaagggaagtctggacagtgacaatgatgattctgactgcccatactcagaaaaagttccaagtattaaaattccaatggacatcatggaacagcaacctttcctaagcgatagcaaaccttctgacagagaaagatcaccaacattccttgaacgccacacatcatgctgataaaattcctttccttcagtcactcggtatgccaagtcctcctagaactccagtaaaagttgcctcaaattagactagaacttgaacctgaagacaatgattatttctggaggagcaagggaacagaaactacattgtaacctgtttgtctttcttaaaactgacatttgttgttaatgtcatttgtttttgtttggctgtttgtttattttttaacttttatttcgtctcagtttttggtcacaggccaaataatacagcgctctctctgcttctctcttgcatagatacaatcaagacaatagtgcaccgttccttaaaaacagcatctgaggaatcccccttttgttcttaaactttcagatgtgtcctttgataaccaaattctgtcactcaagacacagacacccacagaccctgtcctttgcctctattaagcagaggatggaagtattaaggattttgtaacaccttttatgaaaatgttgaaggaacttaaaactttagctttggagctgtgcttactggcttgtctttgtctggtagaacaaaccttgacctccagacagagtcccttctcacttatagagctctccaggactggaaaaagtgctgctattttaacttgctcttgcttgtaaatcctaatcttagagttatcaaaagaagaaaaaactgaaggtactttactccctatagagaaaccattgccatcattgtagcaagtgctggaatgtcccttttttcctatgcaacttttttataaccctttaatgaacttatctgtggagtacattgaagaatatttttcttcctagattttgttgtttaaattatggggcctaacctgccacttattttttgtcaatttttaaaacttttttttaattactgtaaagaaaatgaattttttcctgcagcaggaaacatagttttcagtagttctacctcttatttgtagctgccaggctttctgtaaaaattgtattgtatataatgtgatttttacacatacatacacacacaaatacacaatctctagggtaagccagaaggcaagatcagattaaaaacaccatgtttctaagcatccatttttccctttctttaaaagaaacttaactgttctatgaaggagattgagggagaagagacaaactcctatgtcatgagaataaccgatgttctgataatagtagcatctaggtacagatgctggttgtattaccacgtcaatgtcctatgcagtattgttagacattttctcattttgaaatatttgtgtgtttgtgtatgtgctctgtgccatggctggtgtatatatgtgcaatgttagaaggcaaaagagtgatggtaggcagagggcaaagtcattgaatctcttatgccagttttcataaaacccaaaccacatatgaaaaaatccattaagggtccaagaagtctgtccatatgaaaatgagggtaaatatagtttatttcccaggtatcagtcattataattgatataatagctctaacatgcaatataaaattcataggagtattaatagcccatttacacatctataaaatgtaatgggattgcagagctgcagagtacagtgtaacagtactctcatgcaatttttttcaggatgcaaaggcaattattctttgtaagcgggacatttagatatatttgtgtacatattatatgtatgtatatttcaaagtaccacactgaaaattagacatttattaaccaaatttaacgtggtatttaaaggtaatatttttaatatgatacattacatattgtgaatgtatactaaaaaaacattttaaatgttaaaattataatttcagattcatataaccacaactgtgatatatcctaactataaccagttgttgaggggtatactagaagcagaatgaaaccacattttttggtttgataatatgcacttattgactcccactcattgttatgttaattaagttattattctgtctccttgtaattttgattacaaaaattttattatcctgagttagctgttacttttacagtacctgatactcctaaaacttttaacttatacaaattagtcaataatgaccccaattttttcattaaaataatagtggtgaattatatgttattgtgttaaaacctcacttgccaaattctggcttcacatttgtatttagggctatccttaaaatgatgagtctatattatctagctttctattaccctaatataaactggtataagaagactttccttttttctttatgcatggaagcatcaataaattgtttaaaaaccatgtatagtaaattcagcttaacccgtgatcttcttaagttaaaggtacttttgttttataaaagctctagataaaactttcttttctgatcatgaatcaagtatctgtggtttcatgcccctctctatacctttcaaagaactcctgaagcaacttaactcatcatttcagcctctgagtagaggtaaaacctatgtgtacttctgtttatgatccatattgatatttatgacatgaacacagaatagtaccttacatttgctaaacagacagttaatatcaaatcctttcaatattctgggaacccagggaagtttttaaaaatgtcattactttcaaaggaacagaagtagttaaccaaactaacaagcaaaacctgaggtttacctagtgacaccaaattatcggtattttaactgaatttacccattgactaagaatgaaccggatttggtggtggttttgtttctatgcaaactggacacaaattacaacagtaaatttttttataagtgcttctcccttctccatgatgtgacttccggagataaaggattcaaaagataaagacaaagtacgctcagagttgttaaccagaaagtcctggctgtggttgcagaaacactgttggaagaaaagagatgactaagtcaagtgtctgccttatcaaaagagcaaaaatgcctctggttttgtgtttgggagaaaaatatcttggacgcactgttttccttgataaaagtcatcttctctactgtgtgaaatgaatacttggaattctaattgttttgtgtgccaggggcagtaatgtccctgcctcttctcccaatcaaggttgaggagtggggctggggagaggacttaactgacttaagaagtaggaaaacaaaaacctctctcctcagccttccacctccaagagaggaggaaaaacagttgtctgctgtctgtaattcagtttgcgtgtattttatgctcatgcaccaacccatacagagtaaatcttttatcaactatatactggtgtttaatagagaatgattgtcttccgagttttttggttccttttttaactgtgttaaagtacttgaaatgtattgactgctgactatattttaaaaacaaaatgaaataatttgagttgtattacagaggttgacattgttcagggatgggacaaagccttcttcaatccttttcatactacttaatgattttggtgcaggaacctgagattttctgatttatatttcatgatatttcacatttgctcttcacagcatgagcatgaagcccagtggcaccaaatggctgggtacaatcaagtgatattttgtagcacctcactatctgaaaggccatgagttttcagatgatttcattgagcttcattgcagcctgaaattttaaaaaagttgtgtaatacgccaaccagtcaagttgtgttttggccagagatttagatatgtccaatttcctggctcatttcattgtgctctatgggtacgtataaaaagcaagaattctgtttcctaggcaaacattgcaactcagggctaaagtcatccagtgaaacttttagagccagaagtaactttgtcccagtcctacaatgtgaaaagagtgaatagttgcctctttttagccattttcatggctggtacatattcgtacgcattacttttcagaatcaatacgcactttcagatattcttatttttattctcttaagtctttattaactttggagagagaaatgatgcatctttttattttaaatgaagtagatcaacatggtggaacaaaatgataaagaacagaaaacatttcaatatattactaataactttttccaatataaatcctaaaattcctataacatagtattttacagttttatgaagctttctattgtgacttttatggaattaagagatgaagaagatgagatattttagcatttatatttttcaaaattatatgtatacttaaaaataaagtaactttatgc

SEQ ID NO: 13617 - DNA, 4093 bp, Homo sapiens
cgcgcgctgcctgaggacgccgcggcccccgcccccgccatgggcgcccctgcctgcgccctcgcgctctgcgtggccgtggccatcgtggccggcgcctcctcggagtccttggggacggagcagcgcgtcgtggggcgagcggcagaagtcccgggcccagagcccggccagcaggagcagttggtcttcggcagcggggatgctgtggagctgagctgtcccccgcccgggggtggtcccatggggcccactgtctgggtcaaggatggcacagggctggtgccctcggagcgtgtcctggtggggccccagcggctgcaggtgctgaatgcctcccacgaggactccggggcctacagctgccggcagcggctcacgcagcgcgtactgtgccacttcagtgtgcgggtgacagacgctccatcctcgggagatgacgaagacggggaggacgaggctgaggacacaggtgtggacacaggggccccttactggacacggcccgagcggatggacaagaagctgctggccgtgccggccgccaacaccgtccgcttccgctgcccagccgctggcaaccccactccctccatctcctggctgaagaacggcagggagttccgcggcgagcaccgcattggaggcatcaagctgcggcatcagcagtggagcctggtcatggaaagcgtggtgccctcggaccgcggcaactacacctgcgtcgtggagaacaagtttggcagcatccggcagacgtacacgctggacgtgctggagcgctccccgcaccggcccatcctgcaggcggggctgccggccaaccagacggcggtgctgggcagcgacgtggagttccactgcaaggtgtacagtgacgcacagccccacatccagtggctcaagcacgtggaggtgaacggcagcaaggtgggcccggacggcacaccctacgttaccgtgctcaagacggcgggcgctaacaccaccgacaaggagctagaggttctctccttgcacaacgtcacctttgaggacgccggggagtacacctgcctggcgggcaattctattgggttttctcatcactctgcgtggctggtggtgctgccagccgaggaggagctggtggaggctgacgaggcgggcagtgtgtatgcaggcatcctcagctacggggtgggcttcttcctgttcatcctggtggtggcggctgtgacgctctgccgcctgcgcagcccccccaagaaaggcctgggctcccccaccgtgcacaagatctcccgcttcccgctcaagcgacaggtgtccctggagtccaacgcgtccatgagctccaacacaccactggtgcgcatcgcaaggctgtcctcaggggagggccccacgctggccaatgtctccgagctcgagctgcctgccgaccccaaatgggagctgtctcgggcccggctgaccctgggcaagccccttggggagggctgcttcggccaggtggtcatggcggaggccatcggcattgacaaggaccgggccgccaagcctgtcaccgtagccgtgaagatgctgaaagacgatgccactgacaaggacctgtcggacctggtgtctgagatggagatgatgaagatgatcgggaaacacaaaaacatcatcaacctgctgggcgcctgcacgcagggcgggcccctgtacgtgctggtggagtacgcggccaagggtaacctgcgggagtttctgcgggcgcggcggcccccgggcctggactactccttcgacacctgcaagccgcccgaggagcagctcaccttcaaggacctggtgtcctgtgcctaccaggtggcccggggcatggagtacttggcctcccagaagtgcatccacagggacctggctgcccgcaatgtgctggtgaccgaggacaacgtgatgaagatcgcagacttcgggctggcccgggacgtgcacaacctcgactactacaagaagacaaccaacggccggctgcccgtgaagtggatggcgcctgaggccttgtttgaccgagtctacactcaccagagtgacgtctggtcctttggggtcctgctctgggagatcttcacgctggggggctccccgtaccccggcatccctgtggaggagctcttcaagctgctgaaggagggccaccgcatggacaagcccgccaactgcacacacgacctgtacatgatcatgcgggagtgctggcatgccgcgccctcccagaggcccaccttcaagcagctggtggaggacctggaccgtgtccttaccgtgacgtccaccgacgagtacctggacctgtcggcgcctttcgagcagtactccccgggtggccaggacacccccagctccagctcctcaggggacgactccgtgtttgcccacgacctgctgcccccggccccacccagcagtgggggctcgcggacgtgaagggccactggtccccaacaatgtgaggggtccctagcagccctccctgctgctggtgcacagccactccccggcatgagactcagtgcagatggagagacagctacacagagctttggtctgtgtgtgtgtgtgtgcgtgtgtgtgtgtgtgtgcacatccgcgtgtgcctgtgtgcgtgcgcatcttgcctccaggtgcagaggtaccctgggtgtccccgctgctgtgcaacggtctcctgactggtgctgcagcaccgaggggcctttgttctggggggacccagtgcagaatgtaagtgggcccacccggtgggaccccgtggggcagggagctgggcccgacatggctcggcctctgcctttgcaccacgggacatcacagggtgcgctcggcccctcccacacccaaagctgagcctgcagggaagccccacatgtccagcaccttgtgcctggggtgttagtggcaccgcctccccacctccaggctttcccacttcccaccctgcccctcagagactgaaattacgggtacctgaagatgggagcctttaccttttatgcaaaaggtttattccggaaactagtgtacatttctataaatagatgctgtgtatatggtatatatacatatatatatataacatatatggaagaggaaaaggctggtacaacggaggcctgcgaccctgggggcacaggaggcaggcatggccctgggcggggcgtgggggggcgtggagggaggccccaggggtctcacccatgcaagcagaggaccagggctttttctggcaccgcagttttgttttaaaactggacctgtatatttgtaaagctatttatgggcccctggcactcttgttcccacaccccaacacttccagcatttagctggccacatggcggagagttttaatttttaacttattgacaaccgagaaggtttatcccgccgatagagggacggccaagaatgtacgtccagcctgccccggagctggaggatcccctccaagcctaaaaggttgttaatagttggaggtgattccagtgaagatattttatttgctttgtcctttttcaggagaattagatttctataggatttttctttaggagatttattttttggacttcaaagcaagctggtattttcatacaaattcttctaattgctgtgtgtcccaggcagggagacggtttccagggaggggccggccctgtgtgcaggttccgatgttattagatgttacaagtttatatatatctatatatataatttattgagtttttacaagatgtatttgttgtagacttaacacttcttacgcaatgcttctagagttttatagcctggactgctacctttcaaagcttggagggaagccgtgaattcagttggttcgttctgtactgttactgggccctgagtctgggcagctgtcccttgcttgcctgcagggccatggctcagggtggtctcttcttggggcccagtgcatggtggccagaggtgtcacccaaaccggcaggtgcgattttgttaacccagcgacgaactttccgaaaaataaagacacctggttgctaacctgaaaaaaaaaaaaaaaaaaaaaaaaaaaaaa

SEQ ID NO: 13618 - DNA, 3757 bp, Homo sapiens
cgcgcgctgcctgaggacgccgcggcccccgcccccgccatgggcgcccctgcctgcgccctcgcgctctgcgtggccgtggccatcgtggccggcgcctcctcggagtccttggggacggagcagcgcgtcgtggggcgagcggcagaagtcccgggcccagagcccggccagcaggagcagttggtcttcggcagcggggatgctgtggagctgagctgtcccccgcccgggggtggtcccatggggcccactgtctgggtcaaggatggcacagggctggtgccctcggagcgtgtcctggtggggccccagcggctgcaggtgctgaatgcctcccacgaggactccggggcctacagctgccggcagcggctcacgcagcgcgtactgtgccacttcagtgtgcgggtgacagacgctccatcctcgggagatgacgaagacggggaggacgaggctgaggacacaggtgtggacacaggggccccttactggacacggcccgagcggatggacaagaagctgctggccgtgccggccgccaacaccgtccgcttccgctgcccagccgctggcaaccccactccctccatctcctggctgaagaacggcagggagttccgcggcgagcaccgcattggaggcatcaagctgcggcatcagcagtggagcctggtcatggaaagcgtggtgccctcggaccgcggcaactacacctgcgtcgtggagaacaagtttggcagcatccggcagacgtacacgctggacgtgctggagcgctccccgcaccggcccatcctgcaggcggggctgccggccaaccagacggcggtgctgggcagcgacgtggagttccactgcaaggtgtacagtgacgcacagccccacatccagtggctcaagcacgtggaggtgaacggcagcaaggtgggcccggacggcacaccctacgttaccgtgctcaaggtgtccctggagtccaacgcgtccatgagctccaacacaccactggtgcgcatcgcaaggctgtcctcaggggagggccccacgctggccaatgtctccgagctcgagctgcctgccgaccccaaatgggagctgtctcgggcccggctgaccctgggcaagccccttggggagggctgcttcggccaggtggtcatggcggaggccatcggcattgacaaggaccgggccgccaagcctgtcaccgtagccgtgaagatgctgaaagacgatgccactgacaaggacctgtcggacctggtgtctgagatggagatgatgaagatgatcgggaaacacaaaaacatcatcaacctgctgggcgcctgcacgcagggcgggcccctgtacgtgctggtggagtacgcggccaagggtaacctgcgggagtttctgcgggcgcggcggcccccgggcctggactactccttcgacacctgcaagccgcccgaggagcagctcaccttcaaggacctggtgtcctgtgcctaccaggtggcccggggcatggagtacttggcctcccagaagtgcatccacagggacctggctgcccgcaatgtgctggtgaccgaggacaacgtgatgaagatcgcagacttcgggctggcccgggacgtgcacaacctcgactactacaagaagacaaccaacggccggctgcccgtgaagtggatggcgcctgaggccttgtttgaccgagtctacactcaccagagtgacgtctggtcctttggggtcctgctctgggagatcttcacgctggggggctccccgtaccccggcatccctgtggaggagctcttcaagctgctgaaggagggccaccgcatggacaagcccgccaactgcacacacgacctgtacatgatcatgcgggagtgctggcatgccgcgccctcccagaggcccaccttcaagcagctggtggaggacctggaccgtgtccttaccgtgacgtccaccgacgagtacctggacctgtcggcgcctttcgagcagtactccccgggtggccaggacacccccagctccagctcctcaggggacgactccgtgtttgcccacgacctgctgcccccggccccacccagcagtgggggctcgcggacgtgaagggccactggtccccaacaatgtgaggggtccctagcagccctccctgctgctggtgcacagccactccccggcatgagactcagtgcagatggagagacagctacacagagctttggtctgtgtgtgtgtgtgtgcgtgtgtgtgtgtgtgtgcacatccgcgtgtgcctgtgtgcgtgcgcatcttgcctccaggtgcagaggtaccctgggtgtccccgctgctgtgcaacggtctcctgactggtgctgcagcaccgaggggcctttgttctggggggacccagtgcagaatgtaagtgggcccacccggtgggaccccgtggggcagggagctgggcccgacatggctcggcctctgcctttgcaccacgggacatcacagggtgcgctcggcccctcccacacccaaagctgagcctgcagggaagccccacatgtccagcaccttgtgcctggggtgttagtggcaccgcctccccacctccaggctttcccacttcccaccctgcccctcagagactgaaattacgggtacctgaagatgggagcctttaccttttatgcaaaaggtttattccggaaactagtgtacatttctataaatagatgctgtgtatatggtatatatacatatatatatataacatatatggaagaggaaaaggctggtacaacggaggcctgcgaccctgggggcacaggaggcaggcatggccctgggcggggcgtgggggggcgtggagggaggccccaggggtctcacccatgcaagcagaggaccagggctttttctggcaccgcagttttgttttaaaactggacctgtatatttgtaaagctatttatgggcccctggcactcttgttcccacaccccaacacttccagcatttagctggccacatggcggagagttttaatttttaacttattgacaaccgagaaggtttatcccgccgatagagggacggccaagaatgtacgtccagcctgccccggagctggaggatcccctccaagcctaaaaggttgttaatagttggaggtgattccagtgaagatattttatttgctttgtcctttttcaggagaattagatttctataggatttttctttaggagatttattttttggacttcaaagcaagctggtattttcatacaaattcttctaattgctgtgtgtcccaggcagggagacggtttccagggaggggccggccctgtgtgcaggttccgatgttattagatgttacaagtttatatatatctatatatataatttattgagtttttacaagatgtatttgttgtagacttaacacttcttacgcaatgcttctagagttttatagcctggactgctacctttcaaagcttggagggaagccgtgaattcagttggttcgttctgtactgttactgggccctgagtctgggcagctgtcccttgcttgcctgcagggccatggctcagggtggtctcttcttggggcccagtgcatggtggccagaggtgtcacccaaaccggcaggtgcgattttgttaacccagcgacgaactttccgaaaaataaagacacctggttgctaacctgaaaaaaaaaaaaaaaaaaaaaaaaaaaaaa

SEQ ID NO: 13619 - DNA, 5846 bp, Homo sapiens
atgcataacacagcagatgaggtggttttgtatcacaaattagcaggtccgtggggaaggtgtacaggagactgtggtcccggaggagtccagagtcgggcagtgtggtgttttcatgttgacgggtggacaagtcacctgtctaactgtggtgagagcaacaggcctccaaaggaaagaagttgtttccgagtttgtgactggcacagtgacctctttcagtgggaggtttctgactggcaccactgtgtgcttgttccttacgctcgcggtgaagtcaagcctcggactgcagagtgtgtgacggctcagcatggactgcagcaccggatggtgcgctgcattcagaagctgaaccgaactgtggttgcaaatgaaatatgcgaacactttgcccttcagcctcctacagaacaggcttgcctcattccttgtccccgggattgtgtagtatctgagttcttaccatggtccaactgtagcaagggatgtgggaagaaattgcagcatagaactcgcgcggtcatagctccccctctctttggtggtttgcaatgtccaaatctgactgagtcaagagcctgtgatgctcccatttcctgtcctcttggggaagaggaatatacatttagccttaaggttggaccatggagtaaatgcagactgcctcatcttaaagaaattaatccaagcggaagaactgttctggattttaactctgattcaaatgagcgagtcacctttaaacatcaaagttacaaagcacatcatcattcgaagtcttgggcaatagagataggttatcaaacccggcaggtttcgtgtacaagaagtgatggacaaaatgctatgttaagcctttgccttcaagattccttcccattgactgttcagtcctgcatcatgcccaaagactgtgaaacctcccagtggtcctcctggagcccctgctccaagacatgccgttcagggagtctcttgccaggatttaggagcaggagccggaacgtgaagcacatggctattggaggtggaaaggagtgtcctgaacttcttgagaaagaggcctgcattgttgaaggagaacttctgcagcaatgtcccaggtattcctggagaacttctgaatggaaagaatgccaagtctctctcctcctcgagcagcaggatccccactggcatgtgacgggacccgtgtgtggcggtgggatccagacccgggaggtgtactgtgcccagagcgtaccagcagctgccgcactgagggccaaggaagtctctagacctgtggaaaaggcattatgtgtgggacccgccccgttgccctctcagctctgcaatatcccttgctctacggactgcatagtatcttcctggtcagcctggggcctgtgcatccatgaaaactgtcatgatcctcaggggaaaaaaggatttagaacgaggcagcgccatgtcctcatggaatctacagggcctgcagggcattgccctcatttggtggagtctgttccttgtgaggatccaatgtgctaccgatggctggcatcagaagggatctgtttccctgatcatggaaaatgtggcctgggacatcgtattctgaaggccgtctgccagaatgaccgcggagaagatgtatcagggagtctttgcccagttccccctcctcctgagaggaagtcttgtgaaattccctgccgaatggactgtgtgctgagcgagtggacggagtggtcatcctgttcccagtcctgttcaaataaaaactcagatgggaaacagaccaggtcaagaactatcctggcactggctggggaaggtggaaagccatgtccccctagtcaggctctccaagagcatcgtttgtgtaatgaccattcctgtatgcagcttcactgggagacatcgccttggggcccttgttctgaggacacattggtaactgcccttaatgcaaccattggctggaatggagaagccacgtgtggtgtaggcattcagactcggagagtcttctgtgtcaagagtcacgtgggacaagtaatgaccaaaagatgtccagattctactcgacctgaaactgtgcgcccctgttttctcccatgcaaaaaagactgtattgtgactgctttcagtgagtggacaccctgcccaaggatgtgccaagcaggaaatgccacagtaaaacagtctcgatacagaatcatcatccaagaagcagccaatggaggccaggaatgcccagataccttatatgaggagagagagtgtgaagatgtttccttgtgtcctgtatatcggtggaagccacagaaatggagcccttgcatcttagtgccagagtctgtctggcagggaataacgggcagcagtgaagcctgtggaaaggggttacaaacaagagctgtctcatgcatctctgatgacaaccggtcagcagaaatgatggaatgcctcaagcagacaaacggcatgcctctccttgtgcaagaatgcacagtcccatgtcgagaagactgcaccttcactgcttggtccaagtttacgccctgctccacgaactgtgaagccacaaaaagtaggcggcgacagctcacagggaaaagcagaaagaaggagaaatgccaggattctgacctttaccctctagtggagacagaactatgtccttgtgatgaatttatatcccaaccttatggaaactggtcagattgcattcttccagaaggcagaagggagcctcaccgaggactgcgggtacaagcagacagcaaagaatgtggagaaggcctgcgctttcgagcagtagcctgttctgataaaaatggaagacctgttgacccctccttctgcagcagctctggttacattcaagaaaaatgtgtcattccctgcccatttgattgcaagttaagcgattggtctagttgggggtcttgcagttcatcttgtggaattggagtgagaattcgatccaaatggctaaaagaaaaaccttacaatggaggacgaccatgtcccaaactggatctcaagaatcaggctcaggtacatgaggcagtcccatgttacagtgagtgcaatcagtattcctgggttgtagaacactggtcttcatgcaaaatcaacaatgagctgaggtccctgcgctgtggaggaggaacacaatctaggaaaatcagatgtgtgaatactgcggatggtgaaggtggagcagtggatagcaacctgtgcaaccaggatgaaattcccccagaaacccagtcctgttctcttatgtgtcccaatgagtgtgtcatgtctgagtggggactttggagcaaatgcccacagtcatgcgatccccacacaatgcagagaagaactcgccacctgctaagaccatcactgaactcaaggacttgtgctgaagactcacaggtgcagccttgcctcctgaatgaaaattgcttccagttccagtacaatctaacagagtggagcacatgccagctgagtgaaaacgcaccctgtggtcaaggcgtcaggacccgcctgctaagctgtgtgtgcagtgatggcaagccagtcagcatggaccaatgtgagcagcataatttggagaagccccagagaatgagcattccctgcttggtggaatgcgtggtcaactgtcagctctcagggtggacggcttggacagagtgttcacagacctgtggccatggaggtcgaatgagccggactcgatttatcattatgccaacccaaggagaaggacggccatgccccacagagcttacccaggagaaaacctgcccagtgaccccctgctacagctgggtccttggcaactggtctgcatgtaaattggagggtggagactgtggggaaggagttcagatccgcagcctttcctgcatggtccacagtggttcaatatctcatgcagctggacgtgtcgaggatgcactgtgtggagaaatgccctttcaggacagcatcctgaagcagctgtgttctgtgccttgcccaggagactgccatttaacagaatggtcagagtggagcacatgtgaattaacctgcattgatggaagaagctttgagactgtgggccgccagtctagatcaaggacttttataattcagtcttttgagaaccaagacagctgcccccaacaggttctagaaacacgcccttgtacaggaggcaaatgttatcactacacatggaaagcaagtctttggaacaataacgaacgaactgtatggtgccagcgttcagatggcgttaatgtcacaggaggctgctcccctcaggcccgtcctgctgccattcggcagtgcattccagcctgcagaaaacctttctcctactgtacacagggtggagtctgtggttgtgagaagggctatacagagataatgaaatcaaatggtttcctggattactgcatgaaagtaccaggctcagaggataaaaaagctgatgtgaaaaacctttctgggaaaaacagacctgtgaattcaaaaatacatgatatttttaaaggatggtctcttcaaccacttgatccagatggccgagtaaaaatttgggtttatggcgtttcaggtggcgcttttctcatcatgattttcctaatatttacttcctaccttgtttgcaagaagccaaaaccacatcaaagcacacctccccaacagaagcctctgaccttagcctacgatggagacttagacatgtaatctgaaaaagaaatccaaatgtagacatcaactgccttaaccgctttctcttttgtagctctcagacttctcagttttttgaggaatctcaagatgtgatatattgggcagaatacaaatattgcaaaagtaatattgcctcaacttcatttggacatggagtcaaggattattaggtctgccattttgttttcaagttgtttgtgggtgtgttttatttttttggttttcccaagggacctgaaaacccttctcttcctgtttggaactgggaggaagaaaacatgatggaattcccacagacttgagtaaacttgatcttcagcagcataatgacaatccagaggaaaatacagtcaaggcatttactctaaatgacgagtctgacactgcattgttacgcactatattagtgcaaagtctttattcttcccatacttcaacactgagttttctagagtttactttggtttaaagactttcaaattggattgcctatttttcatgaacacagagagaatggattaccatttcagaaattctctgagtttttaacctttaaatattgtattttgttttgtagccaggggatgatggcgcttcatgggttgcagctactgaaaatagcagcgtgtgtgtaattgctggactagatgaaagctaggtcatttctgaagggaatgtgtactgaatgttagagtgtacaaatgaaatatgtggttaaattggagaatgaggtagattatttgattactaaaactgtattttaacaaaaacttatccatgtagatatagcattaaccacacacagttgtaattcagtttaatgatgacaaactctgcttttgtaatttcaattttcttatctgaatatttataaattcttctttcaaatttaattatctgacctcatttaatatacatcaaacaccgatcctgtttgtacaaagtcttgcttttataaggtttcaataatatctaaaacaacacattaaaaagctgagaccattttatgaagataattgtttgtaatcataggtgttgaaagtaaaaaggtgccatcttgtggtattgacttgtatttataacaaataaactgctcaagagactgc

SEQ ID NO: 13620 - DNA, 3407 bp, Homo sapiens
ctgtgctggggtgtacatctacactagacaccttcctgcttccctccttccagagcagacctctttgtcaccccgagctccttgtttcttaagcagtcatgtctgtgacaaaaagtactgagggtccccagggagccgttgccatcaaattggaccttatgtcgcctcctgaaagtgccaagaagttggagaacaaggactctacattcttggatgaaagtccttcagagtcggcaggcttgaagaagaccaagggcataacagtgttccaggccttgattcacctggtgaaaggcaacatgggcacagggatcctgggactacccctcgctgtgaagaacgcgggcatcctgatgggcccactcagtctgctggtgatgggcttcattgcctgccactgtatgcacatcctggtcaagtgtgcccagcgcttctgtaagaggcttaacaagccctttatggactatggggacacggtgatgcatggactagaagccaaccccaacgcctggctccagaatcacgctcactggggaaggcatatcgtgagcttcttccttattaacacccaacttggcttctgctgtgtgtacattgtgtttttggctgataatttaaaacaggtagtggaagctgttaatagcacaaccaacaactgctattccaatgagacggtgattctgacccccaccatggactcgcgactctacatgctctccttcctgcccttcctggtgctgctggtcctcatccggaacctcaggatcttgaccatcttctccatgctggccaacatcagcatgctggtcagcttggtcatcatcatacagtacattacccaggaaatcccagaccccagccggttgccactggtagcaagctggaagacctaccctctcttcttcggaacagccattttttcttttgaaagcattggtgtggttctgcctctggaaaacaagatgaagaatgcccgccacttcccagccatcctgtctttgggaatgtccatcgtcacttccctatacattggcatggcggctctgggctacctgcggtttggagatgacatcaaggccagcataagccttaacctgcctaactgctggctgtaccagtctgtcaagcttctctacattgccggcatcctgtgcacctatgccctgcagttctacgtccctgcagaaatcatcatcccctttgccatctcccgggtgtcaacacgctgggcactgcctctggatctgtccattcgcctcgtcatggtctgcctgacatgcctcctggccatcctcatccctcgcctggacctggtcatccccctggtgggctccgtgagtggcaccgccctggccctcatcatcccaccgctcctggaggtcaccacgttctactcagagggcatgagccccctcaccatcttcaaggacgccctgatcagcatcctgggcttcgtgggctttgtggtggggacctaccaggccctggacgagctgctcaagtcagaagactctcaccccttttccaactccaccacttttgttcggtgagcctggcactgctccttgcctaccagcacccgacttttaattatatggatctcttttttttcttttttttttttttgagacggagtttctgtcttgttgcccagactggagcacaatgatgcgatctcagctcaccacaacttcggcctcctgggttcaagcgattctcctgcctcagcctcccgagtagttgggattagaggcatagtccagcacgcctggctaattttgtatttttagtagagacggggtttctccatgttggtcgggctggtcttgaactcccgacctcaggtgatccacccaccccggcctcccaaaatgctgggatcacaggcgtgagccacctcgcctggccagatctcttttatgtgcattatctttatgtcactgctttgccttttctctgggccaagtcatggtgaaacaagaaagctacaagctctaaatggtaattttttacatttttgttttgtttattacttcttcttttcatacctctggcattccactacattgtgagctttcccttggaaggctctggactctatccaagcttatgataattcacacaatgaatttcatacctagcgtggagctatgcaagaagcagccaccagagggccccaggtggcagcaactggccaaaggagatgcagccagctaagactgtccacactttggcagacaaccggttttcccttttctgggtctgttcaaaaagcaaacattaagggtgggcacataatccacaagccagaaagttgtgcacggctccagtgttgagatgggtagggcctagatgaccagtgtgaaaactctcagatagaaaggagccatgcatattaaatgaggggcaacaaacatttcaaacgattagataacattttctcccaactcaaagatcccaacaatgaataggaggcatggaagtagatgtgccaatggggagggatgaggagtgaacatgaatattatttgaatagactttacctcttaattcttgcaacatgcattcttgattacctactgtgtgccaaacaagattttgtagaatattgcaaaaatgaccataaattcctcgtgataatgtgactttgcacctgctcctatgaaaagatgaagtctgtatctgtatcccttaaatttttttgcttgtttgtcggttttgttttgggttttgtttttttgagatgaagtctcgctctgttgcccaggctggagtgcaatggcacaatctcggctcactgcaacctccacctcctgggttcaagcgattcttctgcctcagcctcccaagtagctaggattacaagtgcctgccactatgcctggctaatttttgtttttcgtagagatggggttttaccatgttggccaggctggtctcaaactcctgacctcaggtgatccacttgcctcggcctcccaaagtgctgagattacaagtgtgagccaccacgcccagcctctcccctttaaatttgatcttggccttgtaacttgctttggccaatgggacattagtaaatgtgatgcagtcagaggtttggtaataacctatgcatcaggacttacatcacttgctgctctatggagttgagaccaccaagtaaagcatcctgggctagcctaccggaggatcagagaccatgtggaacataaatgaatcatcccagttgagccctgtccgcagatcaaccagcctaccaacttccagacacgagtaaagccatcctagactatatccaaccccagtcaggctgacacagaccataagaattgtacagataatccacagaactgtgataaataataaagatgtttgtaattttaataaaaaaaaaaaaaaaaaaa

SEQ ID NO: 13621 - DNA, 7690 bp, Homo sapiens
gaggaggagctggagggggcgcggcttcctctcggtcgctccctggcgccgggcctctttctctgcctggcccagggctggcggccggcgggggtcgcggcggcggcagtgggggcgctggcgggccgcgggtggcgggggccgggccgcggctccgggtgttaggagacaagatggcggcggctctcagaaggccggtctcctcctctccgccgtcctccgccccgccgctcgccgcctcctcctctcgggtctcctcctcctcgtttgctgcctcctcctcctcctgcagcagcaccagcgaccgccgaagcgccggctcgctcacccggagctccggaggtggatagacggggcagctgcaggctccggcgaccgaggccgagctggggccggggcggggacggcggcggcggcggcggcgacggcggcggcgccgggtggggatggggtcgcagacgctgcagatcctccgacagggggtgtgggccgcgctcagcgggggctggtactacgacccgcaccaggccaccttcgtgaacgcgctgcacctctacctgtggctctttctgctgggcctacccttcaccctctacatggcccttccttctaccatgattatagtagcagtttattgtcctgtgatagctgctgttttcattgttctgaagatggtcaactatcgactacacagagcacttgatgctggagaagttgtagataggactgcaaatgagttcacggatcagcgaaccaaagctgaacaaggcaactgttcaaccaggagaaaagacagcaatggaccgagtgatcctggtggagggattgaaatgtctgagttcatccgagaggccacacccccagttggttgcagttccagaaattcttatgccggtctagatccaagcaaccagattggatctggttcctcgcgtcttggaacagcagcaactattaaaggagatacagacactgctaagacttctgatgatatcagtttaagtctgggccaaagttctagtctttgtaaggaaggaagtgaagaacaagatttggcagctgatcggaagctctttcgtcttgtctccaatgactccttcatctctattcagccttccttatcctcttgtggacaggacttgccaagggacttcagtgacaaagtgaacctgccaagtcataaccaccaccaccatgttgatcagtctctgtccagcgcctgtgacacagaagtagcttctcttgtacctttacactcacactcttatagaaaagaccaccggccgcgaggtgtaccacggacttctagctctgctgtggcttttccagacacttcactgaatgattttcccctttatcagcaaagacgtggattagatccagttagtgagttagaatcttccaagcctctttctggatccaaagaatccttggtggaaaattctggtttatctggggaatttcagcttgctggtgacttgaaaatcaatacttctcagccacccacaaaaagtgggaagagcaaacctttgaaagcagagaaaagcatggacagcttgaggagcctgagcacacggagtagtgggtcaacagaaagctactgcagtggaacggaccgggacactaacagtactgtcagcagctataaaagtgagcagaccagctcaactcacatagagagcatcctgtcagagcatgaggagtctcctaaagcaggaacaaaaagtgggaggaagaaagagtgctgtgcaggcccagaggagaagaatagctgtgccagtgacaaaaggactagcagtgaaaagattgctatggaagcgagtaccaacagtggggttcacgaggccaaggaccccaccccctctgatgagatgcacaaccagagaggtctcagcacctctgcatctgaagaagccaataaaaatccccatgcaaatgaatttacttcccaaggggacagaccacctgggaacactgcagaaaacaaagaagagaagagtgataagtcagctgtttctgtggattccaaagtgcgtaaagatgttggtggaaagcaaaaggaaggggatgttcgacctaaatcttctagcgtaatccatcggacagcttctgcccacaagtcaggcaggagacgcacaggaaaaaaacgggctagcagttttgattcaagccggcatagggactatgtttgctttcgaggtgtttctggtaccaagccacacagtgctatattttgtcatgacgaagactctagtgatcagagtgacttgagtagagcatcaagtgttcagtctgctcaccagttcagcagtgatagctcttctagcaccacttctcattcctgtcagtctcctgagggcagatacagtgctctaaagaccaaacacactcataaagaaaggggcacagactctgaacacacacacaaagctcatttggttcctgaaggaaccagcaaaaagcgtgcaacacgacggacttctagcacaaatagtgccaagactcgtgcccgagtgttgagcctggacagtggcacagtagcatgtttgaatgactcaaacaggttaatggcacctgaaagtataaagcccttaaccacttcaaaatcagatcttgaggccaaagagggagaggtgctagatgagctatctttattaggacgggcttcccagttagagacagtcactcgatctaggaatagcttgccaaaccaggttgcatttcctgaaggggaagagcaagatgcagtcagtggagcagcacaagccagcgaggaggcagtgtcatttcgccgtgaacgcagcacatttaggcgccaggcagtacggcgccggcacaatgcagggagtaaccctacccctcctacattgctcatcggatcacccctaagccttcaagatggtcagcaaggccagcagtccacagcccaggtcaaagtccagtcccgccccccttcccaggctgcagtgctcagtgctagtgcctccttgctggtgagaaatgggagtgtccacttagaagcatcacatgacaatgcatctgctgtaggcggtagcagtttgcacgatgaacttggtaagttctcttctacgctgtatgagactggtggctgtgatatgtcacttgtgaattttgaaccagcagcaagaagagcatccaatatctgtgacacagattctcatgtatccagttctacctcagttcgattttatccacatgatgtgctctctctcccacagattcgattgaatagactattgaccattgatacagatttgttggagcaacaggacattgatctaagccctgacttggcagctacttacggcccaacagaagaagctgcccaaaaggttaaacactattatcgcttttggatcctaccccagctgtggattggcattaactttgacagactcacacttttggccctgtttgatagaaatcgtgagatcctggaaaatgtgttagctgtcatcctggctattctcgtggcctttttgggatctattcttctcatacaaggattcttcagagatatctgggtcttccagttctgcctcgtcatagccagctgtcaatactcactgcttaagagtgttcaaccagattcttcttctcccagacatggtcataatcgtatcattgcctacagtagaccagtttatttctgcatatgttgcggtcttatttggctcttggattatggtagcagaaacctgactgcaaccaagttcaaattatatggaataactttcaccaatccactggtgtttatatcagccagggatttagttatagtgtttacactctgtttcccaatagtgtttttcattggtctcctgcctcaggtgaatacatttgtaatgtacctttgtgaacaattggatattcatatttttggtggtaatgccactacaagcctgcttgcagcactttacagttttatctgtagcattgttgcagtagccttattgtatggattatgttatggggctttaaaggattcttgggatggccagcatattccagtacttttctccattttttgtggtttattagtggcagtgtcttaccatctcagccgacaaagcagtgatccatctgtacttttctctttagtgcaatccaagatttttccaaaaacggaagagaaaaatccagaagaccctctatctgaagtaaaagatccactgcctgaaaaacttagaaattctgttagtgagcgattacagtctgacctggtagtatgcattgtaattggtgtgctgtattttgctattcatgtaagcacagtcttcacagtattgcagcctgccctcaagtatgtgttgtatacattggttggctttgtgggttttgtaacccattatgtgctgcctcaagttagaaaacagctaccatggcactgtttctctcatcctctgctaaagacactagagtataatcagtatgaagttcgaaatgcagccactatgatgtggtttgagaaacttcatgtgtggcttctttttgtggagaagaatataatctatccattgattgttctcaatgaactgagcagcagtgcagagacaattgctagtccaaagaaactgaatacagaattaggtgctttaatgatcactgttgctggtttgaagttgctacgatcctcttttagcagccctacatatcagtatgttacagtcatctttactgtgctgtttttcaaatttgactatgaagctttttcagagaccatgctgttggatctcttctttatgtccatactcttcaacaagctttgggaactactttataaattgcagtttgtgtatacctatattgccccatggcagatcacatggggttctgctttccatgcttttgctcagccttttgcagtgcctcattcagccatgctgtttattcaggctgctgtctcggccttcttctctactccactgaacccctttctgggaagtgcaatattcatcacttcatatgtccgacctgtgaaattctgggagagagactataacacaaaacgagtggatcattcaaataccagattggcttcccagcttgatagaaatccaggatcagatgacaacaatctgaattccatcttttatgagcatttaactagatccctacagcacagcctctgtggtgatttgctactaggacggtggggaaactacagtacaggggactgtttcatccttgcctctgactatctcaatgcattagtacaccttatagagataggcaatggtctggtcacttttcagctgcggggacttgaattcagaggtacctactgtcaacaacgggaagtggaggccattactgaaggtgtagaggaagatgaaggattttgctgttgtgaacctggccatattcctcacatgctttcatttaatgctgcatttagccagcgatggctagcttgggaagtgatagtcacaaagtacattctggagggttatagcatcactgataacagtgctgcttctatgcttcaagtctttgatcttcggaaagtactcaccacttactatgtcaagggtatcatttattatgttacgacctcgtctaagctagaggagtggctagctaatgagacaatgcaggaaggacttcgtctgtgtgctgatcgcaattatgtcgatgtggacccgacctttaatccaaacattgatgaagactatgaccaccgactggcaggcatatctagggagagtttctgtgtgatttacctcaactggatagagtactgctcttcccgaagagcaaagcctgtggatgtggacaaagattcatccctagtgactctctgttatggactctgtgttctgggacggagagctttggggactgcatcccatcatatgtccagtaatttagagtcattcctctatggattgcatgccctatttaaaggagatttccgtatttcttcaattcgagatgaatggatctttgctgacatggaattgctaagaaaagtagtagtccctgggatccgtatgtccattaaacttcatcaggatcattttacttctccagatgaatatgatgaccctactgtgctctatgaagccatagtatctcatgagaagaacctcgtaatagcccatgaaggggaccctgcatggcggagtgcagtacttgccaactctccctccttgcttgctctgcggcatgtcatggatgatggcaccaatgaatataaaatcatcatgctcaacagacgctacctgagcttcagggtcattaaagtgaataaggaatgtgtccgaggtctttgggcagggcaacagcaggagcttgtttttctacgtaaccgtaacccagagagaggtagcatccaaaatgcaaagcaagccctgagaaacatgataaactcatcttgtgatcaacctattggctacccaatctttgtctcacccctgacaacttcttactctgacagccacgaacagcttaaagacattcttgggggtcctatcagcttgggaaatatcaggaacttcatagtgtcaacctggcacaggcttaggaaaggttgcggagctggatgtaacagtggtggcaatattgaagattctgatactggaggtgggacttcctgcactggtaacaatgcaacaactgccaacaatccccacagcaacgtgacccagggaagcattggaaatcctgggcagggatcaggaactggactccacccacctgtcacatcttatcctccaacactaggcactagccacagctctcactctgtgcagtcgggcctggtcagacagtctcctgcccgggcctcagtagccagccagtcttcctactgctatagcagccggcattcatccctccggatgtccaccactgggtttgtgccttgtcggcgctcttctactagtcagatatcgcttcgaaacttgccatcatccatccaatcccgactgtcgatggtgaaccaaatggaaccctcaggtcagagcggcctggcctgtgtgcagcacggcctgccttcctccagcagctccagccaaagcatcccagcctgcaaacatcacactctcgtgggctttcttgcgacagagggaggtcagagcagtgccactgatgcacagccaggcaacaccttaagtcctgccaacaattcacactccaaaaaggcagaagtgatttacagagtccaaattgtggatcccagtcaaattctggaagggatcaacctgtctaaaaggaaagagctacagtggcctgatgaaggaatccggttaaaagctgggagaaatagctggaaagactggagtccgcaggagggcatggaaggccatgtgattcaccgatgggtgccttgcagcagagatccaggtaccagatcccacatcgacaaggcagtgcttctggtccagattgatgataaatatgtgactgtaattgaaactggggtactagaacttggggctgaagtgtgagccagtgtttattataaagacatttctttttccctctcaattccaaggcattggaaaaagagaggaacaagcagaagatgcctgcaggtatcactttgatcctatgtgggagcgactgaaaatagaatgagcttggttaagcacctctcctttgcccttcaccctgactcctgtcactgtctccatccccaaataaagctgaaatatttttttaagtt

SEQ ID NO: 13622 - DNA, 1860 bp, Homo sapiens
cgcgcggggaagggaagaagaggacgaggtggcgcagagaccgcgggagaacacagtgcctccggaggaaatctgctcggtccccggcagccgcgcttcccctttgatgttttggtacgccgtggccatgcgcctcacattagaattactgcactgggcagactaagttggatctcctctcttcagtgaaaccctcaattccatcaaaaactaaagggatgtggagagtgcggaaaaggggctactttgggatttggtccttccccttaataatcgccgctgtctgtgcgcagagtgtcaatgaccctagtaatatgtcgctggttaaagagacggtggatagactcctgaaaggctatgacattcgtctgagaccagattttggaggtccccccgtggctgtggggatgaacattgacattgccagcatcgatatggtttctgaagtcaatatggattataccttgacaatgtactttcaacaagcctggagagataagaggctgtcctataatgtaatacctttaaacttgactctggacaacagagtggcagaccagctctgggtgcctgatacctatttcctgaacgataagaagtcatttgtgcacggagtgactgttaagaaccgcatgattcgcctgcatcctgatggcaccgtcctttatggactcagaatcacaaccacagctgcctgcatgatggacctaaggaggtacccactggatgaacaaaactgcaccttggaaattgagagctatggatacacaactgatgacattgagttttactggcgtggcgatgataatgcagtaacaggagtaacgaaaattgaacttccacagttctctattgtagattacaaacttatcaccaagaaggttgttttttccacaggttcctatcccaggttatccctcagctttaagcttaagagaaacattggctactttatcctgcaaacatacatgccttccatcctgattaccatcctctcctgggtctccttctggattaattacgatgcttcagctgcaagggtggcattaggaatcacaactgtcctcacaatgaccacaatcaacacccacctccgggaaactctccctaaaatcccctatgtgaaggccattgacatgtacctgatggggtgctttgtcttcgttttcatggcccttctggaatatgccctagtcaactacatcttctttgggagggggccccaacgccaaaagaaagcagctgagaaggctgccagtgccaacaatgagaagatgcgcctggatgtcaacaagatggacccccatgagaacatcttactgagcactctcgagataaaaaatgaaatggccacatctgaggctgtgatgggacttggagaccccagaagcacaatgctagcctatgatgcctccagcatccagtatcggaaagctgggttgcccaggcatagttttggccgaaatgctctggaacgacatgtggcgcaaaagaaaagtcgcctgaggagacgcgcctcccaactgaaaatcaccatccctgacttgactgatgtgaatgccatagatcggtggtcccgcatattcttcccagtggttttttccttcttcaacatcgtctattggctttattatgtgaactaaaacatggcctcccactggaagcaaggactagattcctcctcaaaccagttgtacagcctgatgtaggacttggaaaacacatcaatccaggacaaaagtgacgctaaaataccttagttgctggcctatcctgtggtccatttcataccatttgggttgcttctgctaagtaatgaatacactaaggtccttgtggttttccagttaaaacgcaagt

SEQ ID NO: 13623 - DNA, 1974 bp, Homo sapiens
cgcgcggggaagggaagaagaggacgaggtggcgcagagaccgcgggagaacacagtgcctccggaggaaatctgctcggtccccggcagccgcgcttcccctttgatgttttggtacgccgtggccatgcgcctcacattagaattactgcactgggcagactaagttggatctcctctcttcagtgaaaccctcaattccatcaaaaactaaagggatgtggagagtccggaaaaggggctactttgggatttggtccttccccttaataatcgccgctgtctgtgcgcagagtgtcaatgaccctagtaatatgtcgctggttaaagagacggtggatagactcctgaaaggctatgacattcgtctgagaccagattttggaggtccccccgtggctgtggggatgaacattgacattgccagcatcgatatggtttctgaagtcaatatggattataccttgacaatgtactttcaacaagcctggagagataagaggctgtcctataatgtaatacctttaaacttgactctggacaacagagtggcagaccagctctgggtgcctgatacctatttcctgaacgataagaagtcatttgtgcacggagtgactgttaagaaccgcatgattcgcctgcatcctgatggcaccgtcctttatggactcagaatcacaaccacagctgcctgcatgatggacctaaggaggtacccactggatgaacaaaactgcaccttggaaattgagagctatggatacacaactgatgacattgagttttactggcgtggcgatgataatgcagtaacaggagtaacgaaaattgaacttccacagttctctattgtagattacaaacttatcaccaagaaggttgttttttccacaggttcctatcccaggttatccctcagctttaagcttaagagaaacattggctactttatcctgcaaacatacatgccttccatcctgattaccatcctctcctgggtctccttctggattaattacgatgcttcagctgcaagggtggcattaggaatcacaactgtcctcacaatgaccacaatcaacacccacctccgggaaactctccctaaaatcccctatgtgaaggccattgacatgtacctgatggggtgctttgtcttcgttttcatggcccttctggaatatgccctagtcaactacatcttctttgggagggggccccaacgccaaaagaaagcagctgagaaggctgccagtgccaacaatgagaagatgcgcctggatgtcaacaagattttttataaagatattaaacaaaatgggacccaatatcgatccttgtgggaccctactggaaacctctccccaactagacggactaccaattacgatttctctctgtatacgatggacccccatgagaacatcttactgagcactctcgagataaaaaatgaaatggccacatctgaggctgtgatgggacttggagaccccagaagcacaatgctagcctatgatgcctccagcatccagtatcggaaagctgggttgcccaggcatagttttggccgaaatgctctggaacgacatgtggcgcaaaagaaaagtcgcctgaggagacgcgcctcccaactgaaaatcaccatccctgacttgactgatgtgaatgccatagatcggtggtcccgcatattcttcccagtggttttttccttcttcaacatcgtctattggctttactatgtgaactaaacatggcctcccactggaagcaaggactagattcctcctcaaaccagttgtacagcctgatgtaggacttggaaaacacatcaatccaggacaaaagtgacgctaaaataccttagttgctggcctatcctgtggtccatttcataccatttgggttgcttctgctaagtaatgaatacactaaggtccttgtggttttccagttaaaacgcaagta

SEQ ID NO: 13624 - DNA, 4467 bp, Homo sapiens
gcggaaaccggaagcggcggctgtccgcggtgccggctgggggcggagaggcggcggtgggctccctggggtgtgtgagcccggtgatggagccgggcccgacagccgcgcagcggaggtgttcgttgccgccgtggctgccgctggggctgctgctgtggtcggggctggccctgggcgcgctccccttcggcagcagtccgcacagggtcttccacgacctcctgtcggagcagcagttgctggaggtggaggacttgtccctgtccctcctgcagggtggagggctggggcctctgtcgctgcccccggacctgccggatctggatcctgagtgccgggagctcctgctggacttcgccaacagcagcgcagagctgacagggtgtctggtgcgcagcgcccggcccgtgcgcctctgtcagacctgctaccccctcttccaacaggtcgtcagcaagatggacaacatcagccgagccgcggggaatacttcagagagtcagagttgtgccagaagtctcttaatggcagatagaatgcaaatagttgtgattctctcagaattttttaataccacatggcaggaggcaaattgtgcaaattgtttaacaaacaacagtgaagaattatcaaacagcacagtatatttccttaatctatttaatcacaccctgacctgctttgaacataaccttcaggggaatgcacatagtcttttacagacaaaaaattattcagaagtatgcaaaaactgccgtgaagcatacaaaactctgagtagtctgtacagtgaaatgcaaaaaatgaatgaacttgagaataaggctgaacctggaacacatttatgcattgatgtggaagatgcaatgaacatcactcgaaaactatggagtcgaactttcaactgttcagtcccttgcagtgacacagtgcctgtaattgctgtttctgtgttcattctctttctacctgttgtcttctaccttagtagctttcttcactcagagcaaaagaaacgcaaactcattctgcccaaacgtctcaagtccagtaccagttttgcaaatattcaggaaaattcaaactgagacctacaaaatggagaattgacatatcacgtgaatgaatggtggaagacacaacttggtttcagaaagaagataaactgtgatttgacaagtcaagctcttaagaaatacaaggacttcagatccatttttaaataagaattttcgatttttctttccttttccacttctttctaacagatttggatatttttaatttccaggcatagcaatgttatctattttaatgtgtatttgtcacaataacagaacatgcaagaacaatcattattttattttataggcatttgattactattctagacttctggtatcttcttactaacataaatatctcaagtagaaaagtttttgaaaactaacatttaaaaattaatcagttacagtaaagactttgaaaaagaaatgtacttgttaggaagtagcttaattaccccccattgcagtattattgttatatatatagttaatatgttgtacatcacaataatatataattcagtctctagtttccctagagtcatttttgaaaccactgattgcaaacctccctgacaatttttaaaagtagtaagccacattacatttatctttgtaaaaagatttatggtaactggtttcttacttgacttttataaatagtattttacatcttatttttgcctttatttcataagtaatttaaaaatcactggattgctttattatattcagggcaatatggattatttttataccaaggatttgcatcgtgaattacattaagttatttggcaatttataatttattactactttaaatcaaatgtagcattatcacactgtatttaaattgtcattttttaaaggaatattttcttcttaagatatatagaggattttggagaagagagacaggaggggtaaaaccagcttaaggttcagcgagcagaaagggacctgagaggatgctcactgtaagactgttggacagtggtgtgtattgaggggatgaatcggaacgatagtctcatgcagaaaatagtgagattaagatcatccttattgtttctaaattatttcaatcagatgaaagtgatacgattgaaatgaaatcacatagttcgtgctcagaaattctattttggtatgtttgtattagcctttagaaaaaacactccgtttcagaattgttcacagttttatttcttaggtttttagagttcaggatttcatttattaatttcttcttgcttttttggtggaaataggctttgttgtaaacattaagaatataaaatctcctctatatagaaacaagaattttgttaaaaagagaatttgaatcccttcctatactataaaatgctctatagggagacaaagtgtttcttttttcttttatgtttactgtttatgtggagtgaaatataaggctcttggatgtataacatactcaaaagctgttacactttctctgatctgctgtgatccactgaaaatgtgctggggtttgttctgctgtcactgtttatgctgctggaacttagcactgtcttgatttgaagcatatgattgagagccatttgaagcaatcttcattaatgcagataaaacaagtttacatgtgcagagttagaaaatgacatgttcaattctgtaagtggtgactttttgagcacctttcagtattatgtatttgtaaaaaccattgtttttggatataaagctaataagcactttaaaaaggaaaaggcagcctttactattttttctggttgagtcattgctctttagacctagcatcagcaatagatttcaaagataagtattaagcgctaccctaaagtgtgtaagtttttcattttgtcatattgaaaaatgatttgcatagtactgaatgttgacacacagcttatatgtatttacaagaatatctttaagtgtttttttgacacattaaaataaaggaaataaggaaattgtaagctttatttggatttttaaatacatttttaaaatttcagatgtaatttaacatcacatttgtttttcaggtattgagtttagatgcctacttttatgagtaccatcagctggacacagtgtctcatacctgtatttgcagcactttgggaggctgaagcagatcgctggagcttatgagttcgagaccagcctggacaacatagtgaaacactgtctctgcaaaaaatacaaaaattagctgggtatggtggtaagtgcctgtagtcctagctacttgggaggctgagatgggaggatgtcttgagcccgggaggtggaggttgcaatgagccaagattgtaccactgcattccaacctgggcgacagagccagaccttgtctcaaaaaaaaaaaaaaaaaaagaaaaaagaaagtactgtctgtcttaaattttgctgcaaataaaaatgtactttggattatttattgttgaacttgagagatagaaataacatcagatatattttttcttttttttttataattaattttttttttttttttttttgtagagacagtgtctcactatgttgcccaagctggtcttgaactcctgagttcaagagatcctcctgccttagcctcccaaagtgctgggattacaagcataagcaccacacctggctgaacatcagatattttaaagtgtagcccagagtctagttggtaaatgttacttatattgggactagtattttctaatgtttctgggatatgctccctataaaatgaaatgttttcctggaacaatgctaattaggattgcattcctggccaaagacatgacatcaaataagtaatagacatcaccagcaatgaattttgaaaagcaaaaaatactattaacctatataaccatttaaaatttaaaaaattatgttccaagtacctctattttctgagctagaagaaaccttagaggccatctgatgatagattcccagagctggatggatccctagggactacctaatctgactttctgtccactgcatggattcttctaaaaagtatgtcacttatttccctaccttattaagactaaataagtggaacatcatagagctctttatttataacagtcattctttgatagtcaactcttaaatggagacttgagatgcttaaatattgtactactgtgcttatcttgtaaagatttcataaaatgatagtattggttattttaaaaaggctttggcttatgctgaattatacatgtagcaccaaaatgttacaactctactaaatttccttgttctaaactattatattagctataataaatattagtcatacatgtaacatgtttaatgacaaataactttctttatctccttggaattaaagagggcttttaaaagataa

SEQ ID NO: 13625 - DNA, 12643 bp, Homo sapiens
gagactttgtgcccccgttggagagatggttgagtcctcgtcaaggttgctgtggtatcccagaaacaccattcactccgagctgtgaccgcgcaccaacaacagcaacaactccactgcgccgggctgaggagcaggaattaggagctcgcgaataatatgaaagggatccgcaaaggggaaagccgagcaaaggaatccaaaccctgggagcctggcaagcgaagatgcgctaaatgtggccgcctagacttcatcctgatgaagaaaatggggattaaaagtggatttacgttttggaacctcgtctttttattgacggtgtcttgtgtgaaaggatttatttatacatgtggtggaactttaaaaggacttaatggcactatagaaagccctggttttccatatggatatccaaatggtgcaaactgcacatgggtaataatagcagaagaacgaaatagaatacaaattgtttttcagtcatttgctctagaagaagaatacgactacttatcattatatgatggacatcctcatcctacaaactttaggacaaggttaacaggattccatctgccacctccagtgacaagtaccaaatctgtgttctcactacgtttgaccagtgattttgcagttagtgctcatggatttaaggtatattacgaagaattgcagagtagctcttgtggaaatcctggtgttccacccaaaggtgtattatatggcacaagattcgacgtcggggacaagatccgctacagctgtgtaactggatacatccttgatggccaccctcagctcacctgcatagccaattcagttaatacagcttcgtgggattttcctgttcctatctgtagagctgaagatgcttgtggaggaacaatgagaggatccagtggcatcatatccagccctagttttcctaatgagtaccataacaatgctgattgcacttggaccattgtagcagagcctggggacacaatttcactcatatttactgattttcaaatggaagagaaatatgattacttagaaatagaaggttctgagccacctaccatatggttatctggaatgaatataccaccaccaattatcagcaacaaaaactggctcagactgcattttgttacagacagcaatcatcgataccgtggatttagtgctccctatcaagtgaaaaaggccatagattttaaatctagaggatttaaattgtttccagggaaagacaacagcaacaagttttctatcttaaatgagggaggtattaaaacagcttccaatttatgcccagatccaggagaaccagaaaatgggaagagaatcggatcagattttagccttggatcaactgtgcagttctcttgtgatgaagattatgtcctacagggcgcaaagagcatcacctgtcaacggatagctgaagtttttgctgcttggagtgatcacaggcctgtgtgtaaagtgaaaacgtgtggctctaatcttcaaggaccaagtggtacctttacatctcccaactttccgttccagtatgacagcaatgcacaatgtgtctgggtcatcacagcagtgaatacaaataaggttatccagataaattttgaagaatttgatctggagattggctatgataccttgacaattggcgatgggggcgaagttggagatcctaggacagtgctccaagtgctgactggaagctttgtaccagacttgatagtgagcatgagtagccaaatgtggctgcaccttcaaacggacgaaagtgttggatctgttggtttcaaggttaactacaaagaaattgagaaagaaagttgtggtgatcctggtacacccttatatggaattagagaaggcgatggattttctaatcgtgatgttttaaggtttgaatgccagtttgggtttgaattaattggagagaaatccattgtttgtcaagagaataaccaatggtctgcaaacatacccatctgtatctttccctgcctgtctaactttactgcaccaatgggaacagttctttctcctgattacccagaagggtatggaaataatttaaattgcatctggacgataatctctgatccagggagccggatacatctttctttcaatgactttgacctggaatcccagtttgatttccttgctgttaaagatggtgactctccagaatccccaattcttggaacctttactggggctgaggtgccttcccatcttactagtaatagtcacatactgcgattggaatttcaggctgaccactcaatgtcaggacgtggctttaacatcacttacaacacatttggacataatgaatgccctgatcctggaataccaatcaatgcacggcggtttggggacaactttcaattaggaagttcaatttcagttatttgtgaagaaggatttattaaaacccagggaacagaaacaattacatgtattcttatggatggaaaagtaatgtggagtggactgattccaaaatgtggagccccatgtggtggccatttttcagctcccagtggagtgattctctcaccaggatggccaggatactacaaagactctttgaattgtgagtgggtgattgaagctgaacctggacactctatcaaaattacatttgaaagatttcagactgaactgaattatgatgttctggaagttcatgatgggccaaatcttctgtcacccttgcttggatcttacaatggcacccaagtgccccagtttctatttagtagcagtaattttatataccttctatttacaacagacaacagtcgttccaataatggtttcaagattcattatgaaagtgttacagtgaacacgtattcttgtttggaccctggcatacctgtacatggccgtcgctatggtcatgatttctccattggctctactgtttcatttagttgtgattcaggatacaggttgagtcatgaagagccccttctatgcgaaaaaaaccactggtggagtcatccacttccaacctgtgatgcattatgtggaggagatgttagagggcctagtggaacaatcttatcacctggttacccggaattttatccaaattctctgaattgtacatggactgttgatgtaacccatggaaaaggtgtgcagttcaacttccacacttttcatttggaagaccatcatgactacttactgatcacagagaatggcagttttacccaaccactggcacgcctgactggttcagatcttcctccaacaatcaatgctggtctctatggaaatttcagggctcaattgcgtttcatttcagatttttcaatatcatatgaaggatttaacataacattctctgaatataaccttgaaccttgtgaagatcctggcattcctcaatatggtagtcgaatcgggttcaactttgggattggtgacactctgaccttctcatgctcttcgggttatcgactggaaggaacatcagagatcatctgtcttggtggtggccgacgagtgtggagtgcacctctgccaaggtgtgtggctgaatgtggtgcatctgcaacgaataatgaaggaattttgctgtctccaaattatccactcaactatgaaaacaaccatgaatgcatttatagtattcaggttcaagcaggaaagggaatcaatatttcagccagaacatttcatttagcacaaggagatgttcttaagatttatgatggaaaagataaaacgactcatctactaggtgcttttactggtgcatctatgcgcggactgacacttagtagtacttcaaatcaactctggctagaatttaattccgatactgaagggacagatgaaggctttcaacttgtgtataccagttttgaactctcacactgtgaagatcctggcattccacaatttggatacaagatcagtgaccaaggccactttgctggtagcaccatcatttatggatgcaatccaggctacactctccacggaagtagccttctcaagtgcatgacaggggagagaagggcatgggactatcctctgccttcctgtattgctgaatgtggaggtcgttttaaaggagaatcatcaggaagaatcttatctcctggctatccttttccatatgacaataacctgcgttgcatgtggatgattgaggtagatcctggaaatattgtcagcttgcagtttcttgcttttgatacggaagcatcacatgatatactccgagtctgggacggtccaccagaaaatgatatgcttttaaaggaaattagtggatctcttattcctgaaggaattcatagcaccctcaatatagtaaccatccagtttgacacggatttttatattagcaaatctggatttgcaattcagttttcaagttctgttgccactgcgtgtcgtgacccaggggtccccatgaatgggactcgaaatggggatggaagagaacctggggacactgttgtttttcaatgtgacccaggatatgaacttcaaggagaggaaagaataacctgcattcaggtagaaaatcggtacttctggcagcccagcccaccagtctgtatagcaccctgtggaggcaatttaacaggatcttcaggctttattctttcaccaaacttccctcatccatatccgcatagcagagactgtgactggactatcaccgtcaatgcagactatgttatctccttggcgttcatcagttttagcatagaaccaaactatgacttcctctatatctatgatggaccagacagtaatagcccactgattggaagttttcaagacagcaagttaccagagagaatagaaagcagctcaaatacaatgcatttggcttttcggagtgatggatctgttagttacactggatttcatctagaatacaaagcaaaactgcgagagtcctgctttgatccaggcaatataatgaatggcaccagacttggaatggattataaattagggtcaacagtcacctattactgtgatgctggttatgttcttcaaggttattcaacactcacctgtatcatgggagatgatggaagacctggatggaatagagccttgccaagttgtcatgcgccctgtggaagtcgttcaacaggttcagaaggcactgttctatcaccaaactatccaaaaaattacagtgtgggacataattgtgtttattctatagcagttccaaaggagtttgtggtgtttggccagtttgtatttttccagacatcactccacgatgttgttgaggtgtatgatgggccaactcagcaatcttctctgttatcttccctctcaggatcccattcaggagaatcacttccactgagttcaggtaatcagatcacaattcgatttacttcagttggaccaataacagctaagggatttcactttgtttaccaagctgttcctagaacaagttctacacaatgcagttctgtgcctgaaccaagattcggaagaagaattggcaatgaatttgcagtcggttcatcggttctttttgattgtaatccaggatatattctccatggatccatagcaattaggtgtgaaacagtgcccaattctttggcccagtggaatgattccttacctacttgtattgtgccctgtggtggaattttaactaagcgcaaagggactattttgtcacctggataccctgagccttatgacaacaatctgaattgtgtgtggaagatcacagtgccagagggagctggcattcaagtgcaagttgttagctttgctacagaacataattgggattctctggacttttatgatgggggagacaacaatgctccaagacttggaagctattcaggaacaacaataccccatcttttgaatagtacgtctaataatctgtatctaaattttcaatcagacatcagtgtttctgctgcaggatttcatcttgaatacacagcaattggtttggattcctgtcctgaaccacaaactcctagcagtggaattaaaattggagacagatatatggttggagatgtagtatcctttcagtgtgatcaaggatattctcttcagggtcactctcacattacatgtatgccaggacctgtaagaagatggaattatccaatcccaatttgtttagctcagtgtggtggtgctatgtcagacttcagtggtgtgatcctcagtcctgggtttcctggaaactatcccagcagtttagattgcacatggacaataaatctacccataggttttggtgtacatctccagtttgtaaatttttctacagaaaccatacatgattatttggaagtacgaagtggatcctcagaaactagtactgttattggccggcttagtggtcctcaaataccatcttccttattcagcaccacccatgaaaccagcttatattttcacagtgactattcacaaaacaaacaagggtttcatattgtataccaagcctatcagttgcaaagctgtcctgatccacgcccgtttcgaaatggttttgtaattggtaatgattttactgtgggtcaaaccatttcatttgaatgtttcccaggatacacattaattggaaattcagctctcacatgccttcacggagtcagtcgtaattggaatcatccacttccaaggtgtgaagctctttgtggtgggaatataactgcaatgaatggcaccatttattctcctgggtatcctgatgaatatccaaactttcaagattgtttttggcttgtaagagtaccccctgggaatggcatctacatcaattttactgtccttcaaacagaaccaatatatgatttcattactgtatgggatggaccagaccaaaattcacctcagatcggtcagttcagtggcaataccgctttggaatcagtctacagtacttcaaatcagattctaatcaaattccacagtgatttcacaacaagtggcttttttgtgctcagttatcacgcctatcaactaagggtgtgccaacctccaccacctgtgcccaatgctgaaattttgacggaagatgatgaatttgaaataggtgatattattaggtatcagtgtcttccaggatttactttagttggtaatgcaattctgacgtgcagattaggagaacgactgcagatggatggagcacctccagtttgtcaagtgctctgtcctgccaatgaattacggctagattctactggagtcatattgagccctggatatcctgacagttacccaaatcttcaaatgtgtgcatggagcatttcagtggaaaagggttataatatcaccatgtttgtagaattcttccagacagaaaaggaatttgatgttcttcaggtgtatgatggaccaaatattcaaagtccagtgcttatttccctcagtggggattattcatctgcttttaatataacaagcaatggtcatgaagtatttcttcagtggtcagcagatcatggcaataacaaaaaaggcttccggataagatatatagctttctactgtagtacaccagaatccccacctcatggatatattatcagtcagacaggtgggcagcttaacagtgtggtccgttgggcctgtgatcgaggattccgacttgttggaaaaagcagtgctgtgtgcagaaagtcttcctatgggtatcatgcatgggatgcgccagtccctgcctgtcaagcaatttcctgtgggattcctaaagctccaacaaatggaggaatactaacaacagactatttggtaggaacgcgagttacctatttttgtaatgatggatatcgattgtcatccaaagaactcactacagctgtatgccaatcagatggaacatggagcaatcataacaagacccctcgctgtgttgttatttcctgtggagaactacctacacctccaaatggaaataagattggaactcaaacttcatatggctcaacagctatctttacctgcgacttgggattcatgcttgtgggctctgctgtaagggaatgcctttcctcaggtctttggagtgaatctgaaaccagatgcctagcgggtcattgtggaattccagaactgattgtgaatggtcaagtcattggagaaaattatggatatagagacacagttgtatatcaatgtaatcctggttttcgattgattggttcttcagtgaggatatgtcaacaggatcacaattggtctggtcagctcccatcctgtgtgcctgttagctgtggtcaccctggtagtccaatttatggaagaacaagtggaaatgggttcaactttaatgatgtggtaacattctcatgcaatattgggtatcttatgcaagggccaacaaaggcacagtgccaggccaacagacagtggagccatcctccacctatgtgcaaagtggtcaactgttctgatcctggaattccagccaattctaaaagagaaagtaaaatagaacatggaaattttacttacggcactgtggtattctatgactgcaatcctggatattttttatttggatcttcagttttgatatgtcaaccaaatggacaatgggacaaacctttaccagaatgtatcatgattgactgtggacaccctggcgttcctcctaatgcagtcctgtctggcgagaagtatacttttgggtctactgttcactattcctgcacaggaaagcgttcccttttaggccagtcatcaagaacctgccaattgaatggccattggagtggatcacaacctcattgttcaggtgatgctactgggacatgtggcgatccaggtactcccggccatggctctagacaggaaagcaatttcagaactaaaagtactgtacgttatgcttgtgatactggttacatccttcatggctcagaagaaagaacatgtttagctaatggcagttggaccggaaggcagccagagtgcaaagctgtgcagtgtggtaacccaggaaccacagccaatgggaaagtcttccgaattgatggcacaacattttctagttcagtcatttattcctgcatggagggatacatcctttctggaccttcagttagacagtgcacagccaatggaacatggtctggaactttacctaactgtacaataatcagttgtggagacccaggtataccagccaatggactgagatatggagatgattatgtggttggacaaaatgtttcttacatgtgccagccaggctacacgatggaattgaatggctccagaatcaggacttgtacaattaatggcacatggagtggagtaatgccaacttgtagagctgttacctgcccaactcctccccagatctctaatggaaggctggaaggaacaaatttcgactggggctttagtattagctacatctgttctccaggctatgagctatccttccctgctgttttgacctgtgtagggaatggtacctggagtggtgaagtaccgcagtgcttaccaaagttttgtggtgaccctggtatacctgcccaaggaaaaagagaaggcaaaagctttatataccagtcagaggtttcattcagctgcaattttcctttcatattagtgggatcaagcaccagaatatgtcaagcagatggcacttggagtggttcatcacctcactgcatagagcctacccaaacctcttgtgaaaacccaggtgtgcctcggcatggatctcagaacaatacattcggatttcaagtaggaagtgttgtacagttccattgcaaaaaaggacaccttctccaagggtctacaacacgcacctgcctccctgatcttacgtggagtgggattcagcctgaatgcataccccacagctgtaaacagccagaaactcctgctcatgcaaatgtcgtagggatggaccttccatctcatgggtatacactgatttatacctgtcagcctggcttcttcttagcaggtggaacagaacatagagtgtgtagatccgataacacctggactggaaaagttcccatttgtgaagctggttctaaaatattggtgaaagatcctagacctgcactgggaacacccagcccaaagctaagtgttcctgatgatgtatttgcccaaaattatatatggaaaggctcttacaatttcaaaggaaggaaacaacccatgaccttaacagttactagtttcaatgcttccactgggagagttaacgcaacactgagcaatagcaacatggagctgctactttcaggggtatataaaagccaggaagctcgcctaatgttacgcatatatcttattaaagtacctgctcatgcttctgtgaagaaaatgaaggaagaaaattgggcaatggatggctttgtttctgctgagcctgatggagctacttatgtatttcaaggatttattcaaggcaaagattatggacaatttggcctacaaagactgggactgaatatgtcagaaggttcaaattcttcaaatcaacctcatggtacaaatagtagttctgtagccattgctattcttgtgcctttttttgcacttatatttgcaggatttggattttatctttataaacaaaggactgcacctaaaacacagtatacaggatgttcagttcatgaaaataacaatggccaagcagcttttgaaaatcccatgtatgacaccaacgcaaagtcagtggaagggaaggcggtacgatttgatcccaacttgaacacggtttgcacaatggtataacgaggcaacctttgccttcttcagaagcttggaaatcgacacacaaaacagtgcacatttagttcactgctaaacaaattaaagcacacttttcaggacttgctgggtcaccttttcctgaggaatgatacagaagagtgttttttcataaactggaccataattcttcatgtttaccatggagagttttacagaaatttggctgcactctgagagtgcttactcacagtttatttgctttttttaaaaaggagattattctaaaatataaacttatttgcatatattggaggagcatccactatcagtatttctgtgctttataaactatattagagggactgggtttaaaaaaaaagatatagggtagaaataagagctatacttacaagagtcaatagatcactgacttctctttaactgtcctgagctacatcacgcccacaaatctgtctttcataccactctatctgccattcattcttgttaaatgaggcattgttttctttatttaagattgagttatgactttaaatgtttatgagctagtttatgcctcggaagacataaggtttcccattccaatttgaatctttctatttctttagcatcatattgctcttcttcttttagactggttgtcatagtttctgcaaagggcaagttcattgtgctaccctcccaattcccccattatggagtaaccagtattattcagtgagctatggggtagtgtttcactccttgcttcaatatggttttttcctatttatttttattattttttaatcccaaatgtgatagtagcttcagtatgtttcctcacccaaaaaccatttggctggcagaaattatctagaaaaattattattttgcagttatctgagacaccaaacttaccatcctttattttacaatatttttgatcgaccaaataaaatgtcctaataatctactctatttatatctacatttccttccagctgagtcttcaaatttagcattattttgacacttttaattttcatttaacaatggattagaaaaatattttggtctagccactaaacataatgactgaaaaaaattattattataaatcaccaatataaatttattgcctacaattgtggacttatcatatttttatatatttttaaatttctgtacctttattgttaaacaccaagtttcacatacaagaggtttctttcattgtcaaattaagatatgtatttgtaagttattggtggctcatttaaactgtatcatacagtaatgccagcatttttatttaataggtcatcgtcttccttttatagctgttttacttcattgaatacgatcatgtacccagtgttaactctttgttgttgtccctttcaaatatggataactctgtgaacagtcttgactttttgtatcatgagacagagtgcctaagagaaacccttgcacctgggagcgctgcttggctctatctctacaacatttaatgaatttcttgtaaaccactttgagatacattgttttggaaattcatacaattttctcaacatggtactctactggcaggatgcagttttaaattttatgccatcagttatttattcttgtttattcaaatgactgcaataacaatgattcattcattaatgttaaggctaatacatttaagatcttgtttaaacaatgtttcttctgcaactggctactcctcttatattaatgcatacacttttgtaaagaagtatatttttatgaaaagaaactttgtaaaagtatgatgtaaattttcagtgcaatgtaaacaaaataaaaatggataattgcttttgtaaaaaaaaaaaaaaaaaaaaaaaaaaaa

SEQ ID NO: 13626 - DNA, 13150 bp, Homo sapiens
gagactttgtgcccccgttggagagatggttgagtcctcgtcaaggttgctgtggtatcccagaaacaccattcactccgagctgtgaccgcgcaccaacaacagcaacaactccactgcgccgggctgaggagcaggaattaggagctcgcgaataatatgaaagggatccgcaaaggggaaagccgagcaaaggaatccaaaccctgggagcctggcaagcgaagatgcgctaaatgtggccgcctagacttcatcctgatgaagaaaatggggattaaaagtggatttacgttttggaacctcgtctttttattgacggtgtcttgtgtgaaaggatttatttatacatgtggtggaactttaaaaggacttaatggcactatagaaagccctggttttccatatggatatccaaatggtgcaaactgcacatgggtaataatagcagaagaacgaaatagaatacaaattgtttttcagtcatttgctctagaagaagaatacgactacttatcattatatgatggacatcctcatcctacaaactttaggacaaggttaacaggattccatctgccacctccagtgacaagtaccaaatctgtgttctcactacgtttgaccagtgattttgcagttagtgctcatggatttaaggtatattacgaagaattgcagagtagctcttgtggaaatcctggtgttccacccaaaggtgtattatatggcacaagattcgacgtcggggacaagatccgctacagctgtgtaactggatacatccttgatggccaccctcagctcacctgcatagccaattcagttaatacagcttcgtgggattttcctgttcctatctgtagagctgaagatgcttgtggaggaacaatgagaggatccagtggcatcatatccagccctagttttcctaatgagtaccataacaatgctgattgcacttggaccattgtagcagagcctggggacacaatttcactcatatttactgattttcaaatggaagagaaatatgattacttagaaatagaaggttctgagccacctaccatatggttatctggaatgaatataccaccaccaattatcagcaacaaaaactggctcagactgcattttgttacagacagcaatcatcgataccgtggatttagtgctccctatcaaggttcttctacattgacccacactacctccactggtgagttagaggagcataacaggactaccactggtgctattgctgttgctagcacacctgcagatgttactgtatccagtgttacagctgtcaccatccatagactttccgaggaacagcgagtgcaagttacgagtctcagaaattcaggtctggaccccaacacgtccaaggacgggctctctcctcatccagcagatacacaaagtaccaggagaagaccaagacatgctgaacagatagaaagaactaaagagcttgcagttgttactcatagagtgaaaaaggccatagattttaaatctagaggatttaaattgtttccagggaaagacaacagcaacaagttttctatcttaaatgagggaggtattaaaacagcttccaatttatgcccagatccaggagaaccagaaaatgggaagagaatcggatcagattttagccttggatcaactgtgcagttctcttgtgatgaagattatgtcctacagggcgcaaagagcatcacctgtcaacggatagctgaagtttttgctgcttggagtgatcacaggcctgtgtgtaaagtgaaaacgtgtggctctaatcttcaaggaccaagtggtacctttacatctcccaactttccgttccagtatgacagcaatgcacaatgtgtctgggtcatcacagcagtgaatacaaataaggttatccagataaattttgaagaatttgatctggagattggctatgataccttgacaattggcgatgggggcgaagttggagatcctaggacagtgctccaagtgctgactggaagctttgtaccagacttgatagtgagcatgagtagccaaatgtggctgcaccttcaaacggacgaaagtgttggatctgttggtttcaaggttaactacaaagaaattgagaaagaaagttgtggtgatcctggtacacccttatatggaattagagaaggcgatggattttctaatcgtgatgttttaaggtttgaatgccagtttgggtttgaattaattggagagaaatccattgtttgtcaagagaataaccaatggtctgcaaacatacccatctgtatctttccctgcctgtctaactttactgcaccaatgggaacagttctttctcctgattacccagaagggtatggaaataatttaaattgcatctggacgataatctctgatccagggagccggatacatctttctttcaatgactttgacctggaatcccagtttgatttccttgctgttaaagatggtgactctccagaatccccaattcttggaacctttactggggctgaggtgccttcccatcttactagtaatagtcacatactgcgattggaatttcaggctgaccactcaatgtcaggacgtggctttaacatcacttacaacacatttggacataatgaatgccctgatcctggaataccaatcaatgcacggcggtttggggacaactttcaattaggaagttcaatttcagttatttgtgaagaaggatttattaaaacccagggaacagaaacaattacatgtattcttatggatggaaaagtaatgtggagtggactgattccaaaatgtggagccccatgtggtggccatttttcagctcccagtggagtgattctctcaccaggatggccaggatactacaaagactctttgaattgtgagtgggtgattgaagctgaacctggacactctatcaaaattacatttgaaagatttcagactgaactgaattatgatgttctggaagttcatgatgggccaaatcttctgtcacccttgcttggatcttacaatggcacccaagtgccccagtttctatttagtagcagtaattttatataccttctatttacaacagacaacagtcgttccaataatggtttcaagattcattatgaaagtgttacagtgaacacgtattcttgtttggaccctggcatacctgtacatggccgtcgctatggtcatgatttctccattggctctactgtttcatttagttgtgattcaggatacaggttgagtcatgaagagccccttctatgcgaaaaaaaccactggtggagtcatccacttccaacctgtgatgcattatgtggaggagatgttagagggcctagtggaacaatcttatcacctggttacccggaattttatccaaattctctgaattgtacatggactgttgatgtaacccatggaaaaggtgtgcagttcaacttccacacttttcatttggaagaccatcatgactacttactgatcacagagaatggcagttttacccaaccactggcacgcctgactggttcagatcttcctccaacaatcaatgctggtctctatggaaatttcagggctcaattgcgtttcatttcagatttttcaatatcatatgaaggatttaacataacattctctgaatataaccttgaaccttgtgaagatcctggcattcctcaatatggtagtcgaatcgggttcaactttgggattggtgacactctgaccttctcatgctcttcgggttatcgactggaaggaacatcagagatcatctgtcttggtggtggccgacgagtgtggagtgcacctctgccaaggtgtgtggctgaatgtggtgcatctgcaacgaataatgaaggaattttgctgtctccaaattatccactcaactatgaaaacaaccatgaatgcatttatagtattcaggttcaagcaggaaagggaatcaatatttcagccagaacatttcatttagcacaaggagatgttcttaagatttatgatggaaaagataaaacgactcatctactaggtgcttttactggtgcatctatgcgcggactgacacttagtagtacttcaaatcaactctggctagaatttaattccgatactgaagggacagatgaaggctttcaacttgtgtataccagttttgaactctcacactgtgaagatcctggcattccacaatttggatacaagatcagtgaccaaggccactttgctggtagcaccatcatttatggatgcaatccaggctacactctccacggaagtagccttctcaagtgcatgacaggggagagaagggcatgggactatcctctgccttcctgtattgctgaatgtggaggtcgttttaaaggagaatcatcaggaagaatcttatctcctggctatccttttccatatgacaataacctgcgttgcatgtggatgattgaggtagatcctggaaatattgtcagcttgcagtttcttgcttttgatacggaagcatcacatgatatactccgagtctgggacggtccaccagaaaatgatatgcttttaaaggaaattagtggatctcttattcctgaaggaattcatagcaccctcaatatagtaaccatccagtttgacacggatttttatattagcaaatctggatttgcaattcagttttcaagttctgttgccactgcgtgtcgtgacccaggggtccccatgaatgggactcgaaatggggatggaagagaacctggggacactgttgtttttcaatgtgacccaggatatgaacttcaaggagaggaaagaataacctgcattcaggtagaaaatcggtacttctggcagcccagcccaccagtctgtatagcaccctgtggaggcaatttaacaggatcttcaggctttattctttcaccaaacttccctcatccatatccgcatagcagagactgtgactggactatcaccgtcaatgcagactatgttatctccttggcgttcatcagttttagcatagaaccaaactatgacttcctctatatctatgatggaccagacagtaatagcccactgattggaagttttcaagacagcaagttaccagagagaatagaaagcagctcaaatacaatgcatttggcttttcggagtgatggatctgttagttacactggatttcatctagaatacaaagcaaaactgcgagagtcctgctttgatccaggcaatataatgaatggcaccagacttggaatggattataaattagggtcaacagtcacctattactgtgatgctggttatgttcttcaaggttattcaacactcacctgtatcatgggagatgatggaagacctggatggaatagagccttgccaagttgtcatgcgccctgtggaagtcgttcaacaggttcagaaggcactgttctatcaccaaactatccaaaaaattacagtgtgggacataattgtgtttattctatagcagttccaaaggagtttgtggtgtttggccagtttgtatttttccagacatcactccacgatgttgttgaggtgtatgatgggccaactcagcaatcttctctgttatcttccctctcaggatcccattcaggagaatcacttccactgagttcaggtaatcagatcacaattcgatttacttcagttggaccaataacagctaagggatttcactttgtttaccaagctgttcctagaacaagttctacacaatgcagttctgtgcctgaaccaagattcggaagaagaattggcaatgaatttgcagtcggttcatcggttctttttgattgtaatccaggatatattctccatggatccatagcaattaggtgtgaaacagtgcccaattctttggcccagtggaatgattccttacctacttgtattgtgccctgtggtggaattttaactaagcgcaaagggactattttgtcacctggataccctgagccttatgacaacaatctgaattgtgtgtggaagatcacagtgccagagggagctggcattcaagtgcaagttgttagctttgctacagaacataattgggattctctggacttttatgatgggggagacaacaatgctccaagacttggaagctattcaggaacaacaataccccatcttttgaatagtacgtctaataatctgtatctaaattttcaatcagacatcagtgtttctgctgcaggatttcatcttgaatacacagcaattggtttggattcctgtcctgaaccacaaactcctagcagtggaattaaaattggagacagatatatggttggagatgtagtatcctttcagtgtgatcaaggatattctcttcagggtcactctcacattacatgtatgccaggacctgtaagaagatggaattatccaatcccaatttgtttagctcagtgtggtggtgctatgtcagacttcagtggtgtgatcctcagtcctgggtttcctggaaactatcccagcagtttagattgcacatggacaataaatctacccataggttttggtgtacatctccagtttgtaaatttttctacagaaaccatacatgattatttggaagtacgaagtggatcctcagaaactagtactgttattggccggcttagtggtcctcaaataccatcttccttattcagcaccacccatgaaaccagcttatattttcacagtgactattcacaaaacaaacaagggtttcatattgtataccaagcctatcagttgcaaagctgtcctgatccacgcccgtttcgaaatggttttgtaattggtaatgattttactgtgggtcaaaccatttcatttgaatgtttcccaggatacacattaattggaaattcagctctcacatgccttcacggagtcagtcgtaattggaatcatccacttccaaggtgtgaagctctttgtggtgggaatataactgcaatgaatggcaccatttattctcctgggtatcctgatgaatatccaaactttcaagattgtttttggcttgtaagagtaccccctgggaatggcatctacatcaattttactgtccttcaaacagaaccaatatatgatttcattactgtatgggatggaccagaccaaaattcacctcagatcggtcagttcagtggcaataccgctttggaatcagtctacagtacttcaaatcagattctaatcaaattccacagtgatttcacaacaagtggcttttttgtgctcagttatcacgcctatcaactaagggtgtgccaacctccaccacctgtgcccaatgctgaaattttgacggaagatgatgaatttgaaataggtgatattattaggtatcagtgtcttccaggatttactttagttggtaatgcaattctgacgtgcagattaggagaacgactgcagatggatggagcacctccagtttgtcaagtgctctgtcctgccaatgaattacggctagattctactggagtcatattgagccctggatatcctgacagttacccaaatcttcaaatgtgtgcatggagcatttcagtggaaaagggttataatatcaccatgtttgtagaattcttccagacagaaaaggaatttgatgttcttcaggtgtatgatggaccaaatattcaaagtccagtgcttatttccctcagtggggattattcatctgcttttaatataacaagcaatggtcatgaagtatttcttcagtggtcagcagatcatggcaataacaaaaaaggcttccggataagatatatagctttctactgtagtacaccagaatccccacctcatggatatattatcagtcagacaggtgggcagcttaacagtgtggtccgttgggcctgtgatcgaggattccgacttgttggaaaaagcagtgctgtgtgcagaaagtcttcctatgggtatcatgcatgggatgcgccagtccctgcctgtcaagcaatttcctgtgggattcctaaagctccaacaaatggaggaatactaacaacagactatttggtaggaacgcgagttacctatttttgtaatgatggatatcgattgtcatccaaagaactcactacagctgtatgccaatcagatggaacatggagcaatcataacaagacccctcgctgtgttgttgttacatgtccaagcatcaattcctttatcttggaacatggaagatggcgaattgtgaatggctcccattatgaatacaaaaccaaagtagttttcagctgtgaccctggttatcatggactaggtcctgcctccatcgaatgtcttcctaatggtacttggagttggagaaatgaaagaccatattgccaaattatttcctgtggagaactacctacacctccaaatggaaataagattggaactcaaacttcatatggctcaacagctatctttacctgcgacttgggattcatgcttgtgggctctgctgtaagggaatgcctttcctcaggtctttggagtgaatctgaaaccagatgcctagcgggtcattgtggaattccagaactgattgtgaatggtcaagtcattggagaaaattatggatatagagacacagttgtatatcaatgtaatcctggttttcgattgattggttcttcagtgaggatatgtcaacaggatcacaattggtctggtcagctcccatcctgtgtgcctgttagctgtggtcaccctggtagtccaatttatggaagaacaagtggaaatgggttcaactttaatgatgtggtaacattctcatgcaatattgggtatcttatgcaagggccaacaaaggcacagtgccaggccaacagacagtggagccatcctccacctatgtgcaaagtggtcaactgttctgatcctggaattccagccaattctaaaagagaaagtaaaatagaacatggaaattttacttacggcactgtggtattctatgactgcaatcctggatattttttatttggatcttcagttttgatatgtcaaccaaatggacaatgggacaaacctttaccagaatgtatcatgattgactgtggacaccctggcgttcctcctaatgcagtcctgtctggcgagaagtatacttttgggtctactgttcactattcctgcacaggaaagcgttcccttttaggccagtcatcaagaacctgccaattgaatggccattggagtggatcacaacctcattgttcaggtgatgctactgggacatgtggcgatccaggtactcccggccatggctctagacaggaaagcaatttcagaactaaaagtactgtacgttatgcttgtgatactggttacatccttcatggctcagaagaaagaacatgtttagctaatggcagttggaccggaaggcagccagagtgcaaagctgtgcagtgtggtaacccaggaaccacagccaatgggaaagtcttccgaattgatggcacaacattttctagttcagtcatttattcctgcatggagggatacatcctttctggaccttcagttagacagtgcacagccaatggaacatggtctggaactttacctaactgtacaataatcagttgtggagacccaggtataccagccaatggactgagatatggagatgattatgtggttggacaaaatgtttcttacatgtgccagccaggctacacgatggaattgaatggctccagaatcaggacttgtacaattaatggcacatggagtggagtaatgccaacttgtagagctgttacctgcccaactcctccccagatctctaatggaaggctggaaggaacaaatttcgactggggctttagtattagctacatctgttctccaggctatgagctatccttccctgctgttttgacctgtgtagggaatggtacctggagtggtgaagtaccgcagtgcttaccaaagttttgtggtgaccctggtatacctgcccaaggaaaaagagaaggcaaaagctttatataccagtcagaggtttcattcagctgcaattttcctttcatattagtgggatcaagcaccagaatatgtcaagcagatggcacttggagtggttcatcacctcactgcatagagcctacccaaacctcttgtgaaaacccaggtgtgcctcggcatggatctcagaacaatacattcggatttcaagtaggaagtgttgtacagttccattgcaaaaaaggacaccttctccaagggtctacaacacgcacctgcctccctgatcttacgtggagtgggattcagcctgaatgcataccccacagctgtaaacagccagaaactcctgctcatgcaaatgtcgtagggatggaccttccatctcatgggtatacactgatttatacctgtcagcctggcttcttcttagcaggtggaacagaacatagagtgtgtagatccgataacacctggactggaaaagttcccatttgtgaagctggttctaaaatattggtgaaagatcctagacctgcactgggaacacccagcccaaagctaagtgttcctgatgatgtatttgcccaaaattatatatggaaaggctcttacaatttcaaaggaaggaaacaacccatgaccttaacagttactagtttcaatgcttccactgggagagttaacgcaacactgagcaatagcaacatggagctgctactttcaggggtatataaaagccaggaagctcgcctaatgttacgcatatatcttattaaagtacctgctcatgcttctgtgaagaaaatgaaggaagaaaattgggcaatggatggctttgtttctgctgagcctgatggagctacttatgtatttcaaggatttattcaaggcaaagattatggacaatttggcctacaaagactgggactgaatatgtcagaaggttcaaattcttcaaatcaacctcatggtacaaatagtagttctgtagccattgctattcttgtgcctttttttgcacttatatttgcaggatttggattttatctttataaacaaaggactgcacctaaaacacagtatacaggatgttcagttcatgaaaataacaatggccaagcagcttttgaaaatcccatgtatgacaccaacgcaaagtcagtggaagggaaggcggtacgatttgatcccaacttgaacacggtttgcacaatggtataacgaggcaacctttgccttcttcagaagcttggaaatcgacacacaaaacagtgcacatttagttcactgctaaacaaattaaagcacacttttcaggacttgctgggtcaccttttcctgaggaatgatacagaagagtgttttttcataaactggaccataattcttcatgtttaccatggagagttttacagaaatttggctgcactctgagagtgcttactcacagtttatttgctttttttaaaaaggagattattctaaaatataaacttatttgcatatattggaggagcatccactatcagtatttctgtgctttataaactatattagagggactgggtttaaaaaaaaagatatagggtagaaataagagctatacttacaagagtcaatagatcactgacttctctttaactgtcctgagctacatcacgcccacaaatctgtctttcataccactctatctgccattcattcttgttaaatgaggcattgttttctttatttaagattgagttatgactttaaatgtttatgagctagtttatgcctcggaagacataaggtttcccattccaatttgaatctttctatttctttagcatcatattgctcttcttcttttagactggttgtcatagtttctgcaaagggcaagttcattgtgctaccctcccaattcccccattatggagtaaccagtattattcagtgagctatggggtagtgtttcactccttgcttcaatatggttttttcctatttatttttattattttttaatcccaaatgtgatagtagcttcagtatgtttcctcacccaaaaaccatttggctggcagaaattatctagaaaaattattattttgcagttatctgagacaccaaacttaccatcctttattttacaatatttttgatcgaccaaataaaatgtcctaataatctactctatttatatctacatttccttccagctgagtcttcaaatttagcattattttgacacttttaattttcatttaacaatggattagaaaaatattttggtctagccactaaacataatgactgaaaaaaattattattataaatcaccaatataaatttattgcctacaattgtggacttatcatatttttatatatttttaaatttctgtacctttattgttaaacaccaagtttcacatacaagaggtttctttcattgtcaaattaagatatgtatttgtaagttattggtggctcatttaaactgtatcatacagtaatgccagcatttttatttaataggtcatcgtcttccttttatagctgttttacttcattgaatacgatcatgtacccagtgttaactctttgttgttgtccctttcaaatatggataactctgtgaacagtcttgactttttgtatcatgagacagagtgcctaagagaaacccttgcacctgggagcgctgcttggctctatctctacaacatttaatgaatttcttgtaaaccactttgagatacattgttttggaaattcatacaattttctcaacatggtactctactggcaggatgcagttttaaattttatgccatcagttatttattcttgtttattcaaatgactgcaataacaatgattcattcattaatgttaaggctaatacatttaagatcttgtttaaacaatgtttcttctgcaactggctactcctcttatattaatgcatacacttttgtaaagaagtatatttttatgaaaagaaactttgtaaaagtatgatgtaaattttcagtgcaatgtaaacaaaataaaaatggataattgcttttgtaaaaaaaaaaaaaaaaaaaaaaaaaaaa

SEQ ID NO: 13627 - DNA, 13042 bp, Homo sapiens
tacacccctcggccctttggaggaccggagagccggacgacgccgcagcccttgggggagtccagcgccagctggcgaaaagaagcttcatcttccagatcatccgggaaaggggcagaggtggccggttgttgcgactcataaacaacctcttcagcacaacccggttgaatgtggagttggttcctttgctggaaacctgtacagcttgaccgacagacagcctcaggatttatttatacatgtggtggaactttaaaaggacttaatggcactatagaaagccctggttttccatatggatatccaaatggtgcaaactgcacatgggtaataatagcagaagaacgaaatagaatacaaattgtttttcagtcatttgctctagaagaagaatacgactacttatcattatatgatggacatcctcatcctacaaactttaggacaaggttaacaggattccatctgccacctccagtgacaagtaccaaatctgtgttctcactacgtttgaccagtgattttgcagttagtgctcatggatttaaggtatattacgaagaattgcagagtagctcttgtggaaatcctggtgttccacccaaaggtgtattatatggcacaagattcgacgtcggggacaagatccgctacagctgtgtaactggatacatccttgatggccaccctcagctcacctgcatagccaattcagttaatacagcttcgtgggattttcctgttcctatctgtagagctgaagatgcttgtggaggaacaatgagaggatccagtggcatcatatccagccctagttttcctaatgagtaccataacaatgctgattgcacttggaccattgtagcagagcctggggacacaatttcactcatatttactgattttcaaatggaagagaaatatgattacttagaaatagaaggttctgagccacctaccatatggttatctggaatgaatataccaccaccaattatcagcaacaaaaactggctcagactgcattttgttacagacagcaatcatcgataccgtggatttagtgctccctatcaaggttcttctacattgacccacactacctccactggtgagttagaggagcataacaggactaccactggtgctattgctgttgctagcacacctgcagatgttactgtatccagtgttacagctgtcaccatccatagactttccgaggaacagcgagtgcaagttacgagtctcagaaattcaggtctggaccccaacacgtccaaggacgggctctctcctcatccagcagatacacaaagtaccaggagaagaccaagacatgctgaacagatagaaagaactaaagagcttgcagttgttactcatagagtgaaaaaggccatagattttaaatctagaggatttaaattgtttccagggaaagacaacagcaacaagttttctatcttaaatgagggaggtattaaaacagcttccaatttatgcccagatccaggagaaccagaaaatgggaagagaatcggatcagattttagccttggatcaactgtgcagttctcttgtgatgaagattatgtcctacagggcgcaaagagcatcacctgtcaacggatagctgaagtttttgctgcttggagtgatcacaggcctgtgtgtaaagtgaaaacgtgtggctctaatcttcaaggaccaagtggtacctttacatctcccaactttccgttccagtatgacagcaatgcacaatgtgtctgggtcatcacagcagtgaatacaaataaggttatccagataaattttgaagaatttgatctggagattggctatgataccttgacaattggcgatgggggcgaagttggagatcctaggacagtgctccaagtgctgactggaagctttgtaccagacttgatagtgagcatgagtagccaaatgtggctgcaccttcaaacggacgaaagtgttggatctgttggtttcaaggttaactacaaagaaattgagaaagaaagttgtggtgatcctggtacacccttatatggaattagagaaggcgatggattttctaatcgtgatgttttaaggtttgaatgccagtttgggtttgaattaattggagagaaatccattgtttgtcaagagaataaccaatggtctgcaaacatacccatctgtatctttccctgcctgtctaactttactgcaccaatgggaacagttctttctcctgattacccagaagggtatggaaataatttaaattgcatctggacgataatctctgatccagggagccggatacatctttctttcaatgactttgacctggaatcccagtttgatttccttgctgttaaagatggtgactctccagaatccccaattcttggaacctttactggggctgaggtgccttcccatcttactagtaatagtcacatactgcgattggaatttcaggctgaccactcaatgtcaggacgtggctttaacatcacttacaacacatttggacataatgaatgccctgatcctggaataccaatcaatgcacggcggtttggggacaactttcaattaggaagttcaatttcagttatttgtgaagaaggatttattaaaacccagggaacagaaacaattacatgtattcttatggatggaaaagtaatgtggagtggactgattccaaaatgtggagccccatgtggtggccatttttcagctcccagtggagtgattctctcaccaggatggccaggatactacaaagactctttgaattgtgagtgggtgattgaagctgaacctggacactctatcaaaattacatttgaaagatttcagactgaactgaattatgatgttctggaagttcatgatgggccaaatcttctgtcacccttgcttggatcttacaatggcacccaagtgccccagtttctatttagtagcagtaattttatataccttctatttacaacagacaacagtcgttccaataatggtttcaagattcattatgaaagtgttacagtgaacacgtattcttgtttggaccctggcatacctgtacatggccgtcgctatggtcatgatttctccattggctctactgtttcatttagttgtgattcaggatacaggttgagtcatgaagagccccttctatgcgaaaaaaaccactggtggagtcatccacttccaacctgtgatgcattatgtggaggagatgttagagggcctagtggaacaatcttatcacctggttacccggaattttatccaaattctctgaattgtacatggactgttgatgtaacccatggaaaaggtgtgcagttcaacttccacacttttcatttggaagaccatcatgactacttactgatcacagagaatggcagttttacccaaccactggcacgcctgactggttcagatcttcctccaacaatcaatgctggtctctatggaaatttcagggctcaattgcgtttcatttcagatttttcaatatcatatgaaggatttaacataacattctctgaatataaccttgaaccttgtgaagatcctggcattcctcaatatggtagtcgaatcgggttcaactttgggattggtgacactctgaccttctcatgctcttcgggttatcgactggaaggaacatcagagatcatctgtcttggtggtggccgacgagtgtggagtgcacctctgccaaggtgtgtggctgaatgtggtgcatctgcaacgaataatgaaggaattttgctgtctccaaattatccactcaactatgaaaacaaccatgaatgcatttatagtattcaggttcaagcaggaaagggaatcaatatttcagccagaacatttcatttagcacaaggagatgttcttaagatttatgatggaaaagataaaacgactcatctactaggtgcttttactggtgcatctatgcgcggactgacacttagtagtacttcaaatcaactctggctagaatttaattccgatactgaagggacagatgaaggctttcaacttgtgtataccagttttgaactctcacactgtgaagatcctggcattccacaatttggatacaagatcagtgaccaaggccactttgctggtagcaccatcatttatggatgcaatccaggctacactctccacggaagtagccttctcaagtgcatgacaggggagagaagggcatgggactatcctctgccttcctgtattgctgaatgtggaggtcgttttaaaggagaatcatcaggaagaatcttatctcctggctatccttttccatatgacaataacctgcgttgcatgtggatgattgaggtagatcctggaaatattgtcagcttgcagtttcttgcttttgatacggaagcatcacatgatatactccgagtctgggacggtccaccagaaaatgatatgcttttaaaggaaattagtggatctcttattcctgaaggaattcatagcaccctcaatatagtaaccatccagtttgacacggatttttatattagcaaatctggatttgcaattcagttttcaagttctgttgccactgcgtgtcgtgacccaggggtccccatgaatgggactcgaaatggggatggaagagaacctggggacactgttgtttttcaatgtgacccaggatatgaacttcaaggagaggaaagaataacctgcattcaggtagaaaatcggtacttctggcagcccagcccaccagtctgtatagcaccctgtggaggcaatttaacaggatcttcaggctttattctttcaccaaacttccctcatccatatccgcatagcagagactgtgactggactatcaccgtcaatgcagactatgttatctccttggcgttcatcagttttagcatagaaccaaactatgacttcctctatatctatgatggaccagacagtaatagcccactgattggaagttttcaagacagcaagttaccagagagaatagaaagcagctcaaatacaatgcatttggcttttcggagtgatggatctgttagttacactggatttcatctagaatacaaagcaaaactgcgagagtcctgctttgatccaggcaatataatgaatggcaccagacttggaatggattataaattagggtcaacagtcacctattactgtgatgctggttatgttcttcaaggttattcaacactcacctgtatcatgggagatgatggaagacctggatggaatagagccttgccaagttgtcatgcgccctgtggaagtcgttcaacaggttcagaaggcactgttctatcaccaaactatccaaaaaattacagtgtgggacataattgtgtttattctatagcagttccaaaggagtttgtggtgtttggccagtttgtatttttccagacatcactccacgatgttgttgaggtgtatgatgggccaactcagcaatcttctctgttatcttccctctcaggatcccattcaggagaatcacttccactgagttcaggtaatcagatcacaattcgatttacttcagttggaccaataacagctaagggatttcactttgtttaccaagctgttcctagaacaagttctacacaatgcagttctgtgcctgaaccaagattcggaagaagaattggcaatgaatttgcagtcggttcatcggttctttttgattgtaatccaggatatattctccatggatccatagcaattaggtgtgaaacagtgcccaattctttggcccagtggaatgattccttacctacttgtattgtgccctgtggtggaattttaactaagcgcaaagggactattttgtcacctggataccctgagccttatgacaacaatctgaattgtgtgtggaagatcacagtgccagagggagctggcattcaagtgcaagttgttagctttgctacagaacataattgggattctctggacttttatgatgggggagacaacaatgctccaagacttggaagctattcaggaacaacaataccccatcttttgaatagtacgtctaataatctgtatctaaattttcaatcagacatcagtgtttctgctgcaggatttcatcttgaatacacagcaattggtttggattcctgtcctgaaccacaaactcctagcagtggaattaaaattggagacagatatatggttggagatgtagtatcctttcagtgtgatcaaggatattctcttcagggtcactctcacattacatgtatgccaggacctgtaagaagatggaattatccaatcccaatttgtttagctcagtgtggtggtgctatgtcagacttcagtggtgtgatcctcagtcctgggtttcctggaaactatcccagcagtttagattgcacatggacaataaatctacccataggttttggtgtacatctccagtttgtaaatttttctacagaaaccatacatgattatttggaagtacgaagtggatcctcagaaactagtactgttattggccggcttagtggtcctcaaataccatcttccttattcagcaccacccatgaaaccagcttatattttcacagtgactattcacaaaacaaacaagggtttcatattgtataccaagcctatcagttgcaaagctgtcctgatccacgcccgtttcgaaatggttttgtaattggtaatgattttactgtgggtcaaaccatttcatttgaatgtttcccaggatacacattaattggaaattcagctctcacatgccttcacggagtcagtcgtaattggaatcatccacttccaaggtgtgaagctctttgtggtgggaatataactgcaatgaatggcaccatttattctcctgggtatcctgatgaatatccaaactttcaagattgtttttggcttgtaagagtaccccctgggaatggcatctacatcaattttactgtccttcaaacagaaccaatatatgatttcattactgtatgggatggaccagaccaaaattcacctcagatcggtcagttcagtggcaataccgctttggaatcagtctacagtacttcaaatcagattctaatcaaattccacagtgatttcacaacaagtggcttttttgtgctcagttatcacgcctatcaactaagggtgtgccaacctccaccacctgtgcccaatgctgaaattttgacggaagatgatgaatttgaaataggtgatattattaggtatcagtgtcttccaggatttactttagttggtaatgcaattctgacgtgcagattaggagaacgactgcagatggatggagcacctccagtttgtcaagtgctctgtcctgccaatgaattacggctagattctactggagtcatattgagccctggatatcctgacagttacccaaatcttcaaatgtgtgcatggagcatttcagtggaaaagggttataatatcaccatgtttgtagaattcttccagacagaaaaggaatttgatgttcttcaggtgtatgatggaccaaatattcaaagtccagtgcttatttccctcagtggggattattcatctgcttttaatataacaagcaatggtcatgaagtatttcttcagtggtcagcagatcatggcaataacaaaaaaggcttccggataagatatatagctttctactgtagtacaccagaatccccacctcatggatatattatcagtcagacaggtgggcagcttaacagtgtggtccgttgggcctgtgatcgaggattccgacttgttggaaaaagcagtgctgtgtgcagaaagtcttcctatgggtatcatgcatgggatgcgccagtccctgcctgtcaagcaatttcctgtgggattcctaaagctccaacaaatggaggaatactaacaacagactatttggtaggaacgcgagttacctatttttgtaatgatggatatcgattgtcatccaaagaactcactacagctgtatgccaatcagatggaacatggagcaatcataacaagacccctcgctgtgttgttgttacatgtccaagcatcaattcctttatcttggaacatggaagatggcgaattgtgaatggctcccattatgaatacaaaaccaaagtagttttcagctgtgaccctggttatcatggactaggtcctgcctccatcgaatgtcttcctaatggtacttggagttggagaaatgaaagaccatattgccaaattatttcctgtggagaactacctacacctccaaatggaaataagattggaactcaaacttcatatggctcaacagctatctttacctgcgacttgggattcatgcttgtgggctctgctgtaagggaatgcctttcctcaggtctttggagtgaatctgaaaccagatgcctagcgggtcattgtggaattccagaactgattgtgaatggtcaagtcattggagaaaattatggatatagagacacagttgtatatcaatgtaatcctggttttcgattgattggttcttcagtgaggatatgtcaacaggatcacaattggtctggtcagctcccatcctgtgtgcctgttagctgtggtcaccctggtagtccaatttatggaagaacaagtggaaatgggttcaactttaatgatgtggtaacattctcatgcaatattgggtatcttatgcaagggccaacaaaggcacagtgccaggccaacagacagtggagccatcctccacctatgtgcaaagtggtcaactgttctgatcctggaattccagccaattctaaaagagaaagtaaaatagaacatggaaattttacttacggcactgtggtattctatgactgcaatcctggatattttttatttggatcttcagttttgatatgtcaaccaaatggacaatgggacaaacctttaccagaatgtatcatgattgactgtggacaccctggcgttcctcctaatgcagtcctgtctggcgagaagtatacttttgggtctactgttcactattcctgcacaggaaagcgttcccttttaggccagtcatcaagaacctgccaattgaatggccattggagtggatcacaacctcattgttcaggtgatgctactgggacatgtggcgatccaggtactcccggccatggctctagacaggaaagcaatttcagaactaaaagtactgtacgttatgcttgtgatactggttacatccttcatggctcagaagaaagaacatgtttagctaatggcagttggaccggaaggcagccagagtgcaaagctgtgcagtgtggtaacccaggaaccacagccaatgggaaagtcttccgaattgatggcacaacattttctagttcagtcatttattcctgcatggagggatacatcctttctggaccttcagttagacagtgcacagccaatggaacatggtctggaactttacctaactgtacaataatcagttgtggagacccaggtataccagccaatggactgagatatggagatgattatgtggttggacaaaatgtttcttacatgtgccagccaggctacacgatggaattgaatggctccagaatcaggacttgtacaattaatggcacatggagtggagtaatgccaacttgtagagctgttacctgcccaactcctccccagatctctaatggaaggctggaaggaacaaatttcgactggggctttagtattagctacatctgttctccaggctatgagctatccttccctgctgttttgacctgtgtagggaatggtacctggagtggtgaagtaccgcagtgcttaccaaagttttgtggtgaccctggtatacctgcccaaggaaaaagagaaggcaaaagctttatataccagtcagaggtttcattcagctgcaattttcctttcatattagtgggatcaagcaccagaatatgtcaagcagatggcacttggagtggttcatcacctcactgcatagagcctacccaaacctcttgtgaaaacccaggtgtgcctcggcatggatctcagaacaatacattcggatttcaagtaggaagtgttgtacagttccattgcaaaaaaggacaccttctccaagggtctacaacacgcacctgcctccctgatcttacgtggagtgggattcagcctgaatgcataccccacagctgtaaacagccagaaactcctgctcatgcaaatgtcgtagggatggaccttccatctcatgggtatacactgatttatacctgtcagcctggcttcttcttagcaggtggaacagaacatagagtgtgtagatccgataacacctggactggaaaagttcccatttgtgaagctggttctaaaatattggtgaaagatcctagacctgcactgggaacacccagcccaaagctaagtgttcctgatgatgtatttgcccaaaattatatatggaaaggctcttacaatttcaaaggaaggaaacaacccatgaccttaacagttactagtttcaatgcttccactgggagagttaacgcaacactgagcaatagcaacatggagctgctactttcaggggtatataaaagccaggaagctcgcctaatgttacgcatatatcttattaaagtacctgctcatgcttctgtgaagaaaatgaaggaagaaaattgggcaatggatggctttgtttctgctgagcctgatggagctacttatgtatttcaaggatttattcaaggcaaagattatggacaatttggcctacaaagactgggactgaatatgtcagaaggttcaaattcttcaaatcaacctcatggtacaaatagtagttctgtagccattgctattcttgtgcctttttttgcacttatatttgcaggatttggattttatctttataaacaaaggactgcacctaaaacacagtatacaggatgttcagttcatgaaaataacaatggccaagcagcttttgaaaatcccatgtatgacaccaacgcaaagtcagtggaagggaaggcggtacgatttgatcccaacttgaacacggtttgcacaatggtataacgaggcaacctttgccttcttcagaagcttggaaatcgacacacaaaacagtgcacatttagttcactgctaaacaaattaaagcacacttttcaggacttgctgggtcaccttttcctgaggaatgatacagaagagtgttttttcataaactggaccataattcttcatgtttaccatggagagttttacagaaatttggctgcactctgagagtgcttactcacagtttatttgctttttttaaaaaggagattattctaaaatataaacttatttgcatatattggaggagcatccactatcagtatttctgtgctttataaactatattagagggactgggtttaaaaaaaaagatatagggtagaaataagagctatacttacaagagtcaatagatcactgacttctctttaactgtcctgagctacatcacgcccacaaatctgtctttcataccactctatctgccattcattcttgttaaatgaggcattgttttctttatttaagattgagttatgactttaaatgtttatgagctagtttatgcctcggaagacataaggtttcccattccaatttgaatctttctatttctttagcatcatattgctcttcttcttttagactggttgtcatagtttctgcaaagggcaagttcattgtgctaccctcccaattcccccattatggagtaaccagtattattcagtgagctatggggtagtgtttcactccttgcttcaatatggttttttcctatttatttttattattttttaatcccaaatgtgatagtagcttcagtatgtttcctcacccaaaaaccatttggctggcagaaattatctagaaaaattattattttgcagttatctgagacaccaaacttaccatcctttattttacaatatttttgatcgaccaaataaaatgtcctaataatctactctatttatatctacatttccttccagctgagtcttcaaatttagcattattttgacacttttaattttcatttaacaatggattagaaaaatattttggtctagccactaaacataatgactgaaaaaaattattattataaatcaccaatataaatttattgcctacaattgtggacttatcatatttttatatatttttaaatttctgtacctttattgttaaacaccaagtttcacatacaagaggtttctttcattgtcaaattaagatatgtatttgtaagttattggtggctcatttaaactgtatcatacagtaatgccagcatttttatttaataggtcatcgtcttccttttatagctgttttacttcattgaatacgatcatgtacccagtgttaactctttgttgttgtccctttcaaatatggataactctgtgaacagtcttgactttttgtatcatgagacagagtgcctaagagaaacccttgcacctgggagcgctgcttggctctatctctacaacatttaatgaatttcttgtaaaccactttgagatacattgttttggaaattcatacaattttctcaacatggtactctactggcaggatgcagttttaaattttatgccatcagttatttattcttgtttattcaaatgactgcaataacaatgattcattcattaatgttaaggctaatacatttaagatcttgtttaaacaatgtttcttctgcaactggctactcctcttatattaatgcatacacttttgtaaagaagtatatttttatgaaaagaaactttgtaaaagtatgatgtaaattttcagtgcaatgtaaacaaaataaaaatggataattgcttttgtaaaaaaaaaaaaaaaaaaaaaaaaaaaa

SEQ ID NO: 13628 - DNA, 4627 bp, Homo sapiens
gagagctgcctgctcagacaacagacacgcgaggtcaggaagaagccgcttataaattaccgcttccttcgcgccgccgccaacgccgagccccgaggaccgcaagcccagaggacaagctgcgccaagagggagtgcggagcgttcacccagcgggtcagagagcgagcgggcaggcagcccccggccggcggaacccggcacagccgagcagagcgcgggcggcgccgcagccaccccagatccagaaccagaaccacagcccttctgaggagctcccaaacaaagcaaggagatggccaccaaggagaagctgcagtgtctgaaagatttccacaaggacatcctgaagccctcaccagggaagagcccaggcacgcggcctgaggacgaggctgagggaaaacctccgcagagggagaagtggtctagcaagatcgactttgtgctctctgtggctggcggcttcgtgggcttgggcaacgtctggcgcttcccgtacctctgctacaagaatggtggaggtgcgtttctcataccgtattttattttcctgtttgggagcggcctgcctgtgtttttcttggagatcatcataggccagtacacctctgaagggggcatcacctgctgggaaaagatctgccccttgttctctggtatcggctatgcctccgttgtaattgtgtccctcctgaatgtctactacatcgtcatcctggcctgggccacatactacctgttccagtccttccagaaggagctgccctgggcacactgcaaccacagctggaacacacctcactgcatggaggacaccatgcgcaagaacaagagtgtctggatcaccatcagctccaccaacttcacctcccctgtcatcgagttctgggagcgcaacgtgctgagcttgtcccctggaatcgaccacccaggctctctgaaatgggacctcgctctctgccttcttttagtctggctagtgtgtttcttctgcatctggaagggcgtcaggtccactgggaaggtcgtctacttcacagccacttttccattcgccatgctcctggtgctgctggtccgagggctgacgctgccgggcgcgggcgcaggcatcaagttctatctgtatcctgacatcacccgccttgaggacccacaggtgtggattgacgctgggactcagatattcttctcttatgccatctgcctgggggctatgacctcgctggggagctacaacaagtacaagtataactcgtacagggactgtatgctgctgggatgcctgaacagtggtaccagttttgtgtctggcttcgcaattttttccatcctgggcttcatggcacaagagcaaggggtggacattgctgatgtggctgagtcaggtcctggcctggccttcattgcctacccaaaagctgtgacaatgatgccgctgcccacattttggtccattcttttttttattatgcttctcttgcttggactggatagccagtttgttgaagttgaaggacagatcacatccttggttgatctttacccatccttcctaaggaagggttatcgtcgggaaatcttcatcgccttcgtgtgtagcatcagctacctgctggggctgacgatggtgacggagggtggcatgtatgtgtttcagctctttgactactatgcagctagcggtgtatgccttttgtgggttgcattctttgaatgttttgttattgcctggatatatggaggtgataacctttatgatggtattgaggacatgattggctatcggcccgggccctggatgaagtacagctgggctgtgatcactccagttctctgtgttggatgtttcatcttctcgctcgtcaagtacgtacccctgacctacaacaaaacatacgtgtaccccaactgggccattgggctgggctggagcctggccctttcctccatgctctgcgttcccttggtcatcgtcatccgcctctgccagactgaggggccgttccttgtgagagtcaagtacctgctgaccccaagggaacccaaccgctgggctgtggagcgcgagggagccacaccttacaactctcgcaccgtcatgaacggcgctctcgtgaaaccgacccacatcattgtggagaccatgatgtgagctctctcgggtcgacggggccggcggctttcctgctgtttactaacattagattctcataggaccaggtttacagagctttatatttgcactaggattttttttttttgtaattgtcacagaaaatgtaattgtgggtatgtgtgcgtgcgtgtgtgtgtgtgtgtgtatcgtgtgtgtgtgttttgttttgatttgggggatattttgtacaaaaagaaaacccacgggaagatgtccgtggagaggcagagctttcatactgaattagatgtattttatgggaatttggtaaatttttctttgtatttttttttttacatataagtatatatacacttagagattgtcatatacttttaccacttgaattgatcttcttgccagcaatagatctcattttcaaaagcaattcttcggtgctgtgtagctggcagaaagttctgtccagtaaacgcaggatggaattttcctgggactctacacccatcttaaggtggtataccttccaaatcctggttcagatggaagaaatagcaggagagaggacccattagctggcagacccagggggaagaaaggagggctgtgaggagatacctcattaaacttggcttagtgaagaagagagatgccaaaggaatgaaccaacccttcacataaaggagactggctgaagctgaatgaggaggccctatagcagaagtctgattctaagagcagtagaaacttgtaccagaagcaaaatcccacttttaattttgagatggtgagtggatagtcagtagaccgtcagaaccactggccagagagggagctgctagagatccaagaaggctggcaggaatgaggctcacaactcagcctcgcaagaggtggcagaggcacaggaggccacagtccttcctggggcattccaggcagagaaggagcagaggctctcccggcaggagctggggtctcagggctcagatgagtctgttgcatttgaatggggtcatagcaggttctggtcattccccaagcaacatctcagcatctcttaaagttgcctgcaggaatgaagcatgacatacctgttgagggactaggggagtggtggggaggtgagtggaccaaaggatataggccccaggcatgcagatgggcccggtgtcggggaggggtgctttctttcctcatctccccactccccactctcagcctgggagactcctgccaagccctcattaaagatgccaccctgggctgccctggcacctagcaaggcacaccaagaacagcttttgagtctgtatcctccactgggggaagtgctcccagttcagaacaagggcagcccgtggtgctgacctaggatataacaaagctcttcacttcaaaacccctgcaatagctgggtttacagacatttaccacctggggacccaaaagagaaggcctaggagagttttctagaaggttgggattgtcagggtcctggccccccagaactggcttgatcaagggccttatgtggagcagaggttgtctctgaaccaggagagaaggtactatacctttcaaatccccagggcagacacacccccacccagcccctatttggacctaaactgtgccatttgaacagtcacttccaagctcagtctaaatgaaaccgaaacgtgaccacgcacaaaggcagtcactgcctcgaggggtgcagaccgcagaattttcacagcaggggctcttggaactctggaaacccccttcttaaatttgggaggaggagtatgcctttggtgtccccctcccaaggggcaattctgaaccccatctttggcaggcatacatatttcactgtttccaaagctatctactctgccaaacaacacccagtcctattccaaactctcaacgattctatcttgttcctgtttttctatgtatttatggttgccgtttgtgtctgatttgattttactgttttttccctgattttatggagtagcattgtgacctgttttcctttgtcttatataactttagtaaactaaccactgtcaatgattgagggcaggtggcacgtggggaagaggggacttggcacgcagtggctacctgggcatttgtggtcatttcagtttccatctccccagcgggggctccctgggtgaaaggccacagtattttgggttggtaggcaaattgcaacattctggacatggcctgaggaaggcctcttcttataagattctcagaccaaattctagaccaaagacacaggcagaccaagtccccaggccccgcctggaaggaagtcgttcctcaactctccccaaggcacctgtctccaatcagagccctctcgcccagccagccctggctctgtgtgcagagcatagctctgcgagtacctgtgtaataatgctcaaccttcatgtctccgtataaacgaaactttccatgagaaaaaaaaaaaaaaaa

SEQ ID NO: 13629 - DNA, 5032 bp, Homo sapiens
cccgccgccgctgccgccgccaccgccgccgccgccgccgccgccgcggcttcagcaccagcgcccggacagcggtgccgcccacgggcatggacggtgacagcagcagcagcagcggcggcagcggtccggctcccggcccgggtccggaaggggagcaacggcccgagggggagcccttggccccagacggcggctccccggacagcacccagaccaaggctgtgccccctgaggcaagcccagagagaagctgctccctccacagctgccccctggaggacccttccagctcttcaggacccccaccaacaacttccaccctccagcctgtgggtccatccagccccttggcccctgcccacttcacctatccccgggcactgcaggaataccaggggggcagttccctgccaggacttggggatcgggcagctctctgctcccacggctccagcctcagcccttctccagccccctcacagcgcgatgggacctggaagccacccgctgtgcagcaccatgtggtcagcgtcaggcaggaacgagccttccagatgccaaagagctattcccagctgattgctgagtggccagtggccgtgctgatgctgtgtctggctgtcatcttcctctgcaccctggctggactgttgggggcccggctgcccgacttctccaagcctttgctgggctttgagccacgggacacagacattgggagcaagttagtggtctggagagcactacaagccctcacaggccccaggaagctgcttttcctttccccagaccttgagctgaacagctcgagctcccacaacactctgaggcctgcacccagaggcagtgcccaggagagcgctgtccggcctcggagaatggtggagcccctggaggacagaaggcaagagaacttcttctgtggcccccctgagaagagctatgcaaagctggtgttcatgtccacctcctcgggcagcctatggaacctgcatgccatccattccatgtgtcgcatggaacaggaccagatccgctcccataccagcttcggggctctgtgccagcggacagcagccaaccagtgctgccccagctggtccctgggcaactatctggctgtgctctccaaccgctcctcctgcctggacactacccaagctgacgcagcccgcacactggccctgcttcggacctgtgccctctactaccacagtggcgccttggtgccctcttgtctgggacctgggcagaacaagtccccacgctgtgcccaggttcccaccaagtgctcccagagtagtgccatctaccaactcctgcactttctgcttgacagggactttctgagtccccagaccactgactaccaggtgccttccctcaagtacagcctgctcttcctgcccaccccaaagggtgcttccctcatggacatctacctggaccggctggccaccccctgggggcttgctgacaactacacctctgtcactggcatggacctgggcctcaagcaggagctgctgaggcacttcctggtccaggacacggtgtaccccttgctggctctggttgccatcttcttcggcatggccctgtacctgcgctcactcttcctcacgctcatggtgctgctgggggtgctgggctcactgctggtggccttcttcctttaccaggtggccttccgcatggcctacttccccttcgtcaatctggcagccctcctcctgctgagcagcgtctgcgccaaccacacgctcatcttcttcgacctgtggcgccttagcaagagccagctgccgtcgggggggctggcgcagcgcgtgggccgcaccatgcaccacttcggctacctgctgctggtctccggcctcaccacgagcgcggccttctatgccagctacctgagccgcctgccggccgttcgctgcctcgccctcttcatgggcacggctgtgctggtgcacctggcgctcacgctggtctggctgcccgcctccgccgtgctccacgagcgctacctggcgcgcggctgtgcgcgccgggcgcggggccggtgggagggcagcgcgccccggcggctactgctggcgctgcaccggcggctccgcggcctgcggagggcggcggctggcacctcgcgtctgctcttccagcgcctgctgccctgcggcgtcatcaagttccgctacatctggatctgctggttcgcagcactggcggcagggggcgcctacatcgccggagtcagcccccgcctgcggctgcccacgctgccgccgcccggcggccaggtcttccggcccagccaccccttcgagcgcttcgacgcggagtatcgccagctgttcctgttcgagcagctgccgcagggcgagggcggccacatgcccgtggttttggtgtggggcgtcctgcctgtggacactggcgaccctctggaccctcgtagcaacagcagcctggtgagggaccctgccttctcggccagcggccctgaggcccagcgctggctgctggcactctgtcaccgggcccggaatcagagcttcttcgacaccctgcaggaaggctggcccacgctgtgtttcgtggagaccctccagcgctggatggagagccccagctgcgcccgcctggggcctgacctctgctgcggccactcggacttcccctgggccccccagtttttcctgcactgcctgaaaatgatggctctggagcaaggccccgatggcacccaggacctgggactccgctttgatgcccatggcagcctggccgccctggtcctacaattccagaccaacttccggaacagtccggactacaaccagacccagctcttctacaatgaggtcagccactggctggcagcggagctgggcatggcacctccaggcctccgccgtggttggttcactagccgtctagagctgtatagcctgcagcacagcctgagcactgagcctgctgtggtgctgggcctggctttggcgctggcctttgccacactgctcctgggcacctggaatgttcccctcagcctattctccgtggcagctgtggcaggcaccgtgctgctcactgtaggactcctggttctcctcgagtggcagctcaacactgccgaggccctgtttctctctgcctcagtgggcctctcagtagacttcactgtcaactactgcatctcctatcacctgtgcccacaccctgaccgcctgagccgtgtggccttctctctgcgccagaccagctgcgccacagccgtgggggctgcagccctgtttgcggcaggcgtgctcatgctgcctgccacagtgctgctctatcgcaagctgggcatcatcctcatgatggtcaaatgcgtcagttgtggctttgccagcttcttcttccaatctctctgctgtttcttcgggccagagaagaactgtgggcagatcctctggccctgtgcccacctgccatgggatgctggtactggggaccctggtggggagaaggcaggccgcccacgaccagggtcagtgggagggatgcccgggtcctgctcagagcaatatgagctacagcccctggcacggcgtcggagccccagctttgacaccagcacagccaccagcaagctgtcccaccggccctcagtactctctgaggatctgcagctccatgatggtccgtgctgttcccggcccccaccagcccctgcctccccaagggagctgctgctggaccaccaggcagtcttcagccagtgccctgccctgcagacctcctccccctataagcaggctggccccagccccaaaacccgggccaggcaggactcccaaggggaggaggctgagcccctgccagcctcaccagaagccccagcccactctcctaaggccaaggctgcagatcctcctgatggcttctgttcctcagccagcaccctggaggggctcagcgtctctgatgagacctgcctaagcacctctgagcccagtgcccgtgtaccagattccgtgggtgtgtccccagatgacctggatgacactgggcagccagtccttgagcgaggccagctcaatgggaagcgggacaccctgtggctggcgctgagggagacagtgtatgacccatcattgcccgcttcccatcacagcagcttgtcctggaagggccgaggggggccaggggatggcagccctgtggtgctgcccaatagccagccagacctgccagatgtttggctgcgcaggcccagcactcacacgtcaggctatagcagctgagggggacccggggaggctggacagggcgcggaaccctgtcatggatgacaaggcaagggcagcaataggctggagcccgaaggtatttctccagatccacagggagaggtctcaccctccagctgtggatgttaaaccctgccagatgtcccagccttgatctgtctgctcctactcctcacatctggaggattccagcaggaggggttttggaggggacctgcttgcgacctgctgagggcttgtctgctcccacagcaccatctaagacccctcctctagaagtggggaaggccagatgtgtagcttcgggtatcagaggaggctgacctggcccccatcccaagttacaagaacttcagtgagactaagggacccccatcctagggatcttgtcagggttccttactgaccagaggagcccgcagcaatctccacagcctcctgggtctcacccctttcatgggctcttcatcaggacacttccctctcttttgggagcttctctgggcagaattgggctgggacctctctccccaactgccctgctctcctcatactcaccggtttgaccagaaattctccaaatccagccatagatggctgctgggtgtgcagcaggagaaggaggatggtcagccttggagcatctctcaattacgggacagtccctctttggaagcaggctcctgtgctttcctgtgttaataaacagtaataatcctttccatctctgc

SEQ ID NO: 13630 - DNA, 3685 bp, Homo sapiens
gcttccggaagcgggcgactcgcagctccacgcgacgccgaggggctccgcgccgggaccgggcgggtgctcggagtttcggggaccgcacgggaccgagggcaggaggagacatcacagctttcccagatcgggaggaaaaatatggaatgtgttttaccgctgactgaacacaaccaaatgaactgtcctgacagtagtttgcaaaccagcagctagcagtttgtccagcctctaacattgtccagcactttccagagcaaactcactgtttacaagaactcttggccttacgaagtttataacctcaagctttgtttatttaaaatattcctgcaaaagaaaagtacccggcacccactttccaaaatggccatggatgagtatttgtggatggtcattttgggtttcatcatagctttcatcttggccttttctgttggtgcaaacgatgttgccaactcctttggtacagccgtgggctctggtgtggtgaccttgaggcaggcatgcattttagcttcaatatttgaaaccaccggctccgtgttactaggcgccaaagtaggagaaaccattcgcaaaggtatcattgacgtgaacctgtacaacgagacggtggagactctcatggctggggaagttagtgccatggttggttccgctgtgtggcagctgattgcttccttcctgaggcttccaatctcaggaacgcactgcattgtgggttctactataggattctcactggtcgcaatcggtaccaaaggtgtgcagtggatggagcttgtcaagattgttgcttcttggtttatatctccactgttgtctggtttcatgtctggcctgctgtttgtactcatcagaattttcatcttaaaaaaggaagaccctgttcccaatggcctccgggcactcccagtattctatgctgctaccatagcaatcaatgtcttttccatcatgtacacaggagcaccagtgctcggccttgttctccccatgtgggccatagccctcatttcctttggtgtcgccctcctgttcgctttttttgtgtggctcttcgtgtgtccgtggatgcggaggaaaataacaggcaaattacaaaaagaaggtgctttatcacgagtatctgacgaaagcctcagtaaggttcaggaagcagagtccccagtatttaaagagctaccaggtgccaaggctaatgatgacagcaccatcccgctcacgggagcagcaggggagacactggggacctcggaaggcacttctgcgggcagccaccctcgggctgcatacggaagagcactgtccatgacccatggctctgtgaaatcgcccatctccaacggcaccttcggcttcgacggccacaccaggagcgacggtcatgtgtaccacaccgtgcacaaagactcggggctctacaaagatctgctgcacaaaatccacatcgacaggggccccgaggagaagccagcccaggaaagcaactaccggctgctgcgccgaaacaacagttacacctgctacaccgcagccatttgtgggctgccagtgcacgccacctttcgagctgcggactcatcggccccagaggacagtgagaagctggtgggcgacaccgtgtcctactccaagaagaggctgcgctacgacagctactcgagctactgtaacgcggtggcagaggcggagatcgaggcggaggagggcggcgtggagatgaagctggcgtcggagctggccgaccctgaccagccgcgagaggaccctgcagaggaggagaaggaggagaaggacgcacccgaggttcacctcctgttccatttcctgcaggtcctcaccgcctgtttcgggtcctttgctcacggcggcaatgacgtgagtaatgccatcggtcccctggtagccttgtggctgatttacaaacaaggcggggtaacgcaagaagcagctacacccgtctggctgctgttttatggaggagttggaatctgcacaggcctctgggtctgggggagaagagtgatccagaccatggggaaggacctcactcccatcacgccgtccagcggcttcacgatcgagctggcctcagccttcacagtggtgatcgcctccaacatcgggcttccagtcagcaccacgcactgtaaggtgggctcggtggtggccgtgggctggatccgctcccgcaaggctgtggactggcgcctctttcggaacatcttcgtggcctggttcgtgaccgtccctgtggctgggctgttcagcgctgctgtcatggctcttctcatgtatgggatccttccatatgtgtgatttgtcttcttccagctgcaaacagctaaagggatggtctggtgttggcgtgtgggagacatgtgtgctcgtgccacacatacacatcctggccgtgcacggctctctcatgaccagctctctgcctcccttccaggaggctccatcccacactgttcacccaggctgcggagactcaccttcccgagctaacttaactactgtacataataatatgtattaaactggtatcgtggtgatataatgtggtgcagttacttatatattaaatatctattgtatccatagaataggcagcattatttcaaacatattcaagttgggagtggagatcattgcctagaagtcaatattcaataaatcttgtacataactatttcgatggcaaatgttaagccttctaaaaggaaagtgtagattggaaaatgattttttttccaaatgatgtttttgccttctaatatactgtaaggtaatgagcttcagaacaggcaacctgaccctgcagaggtcgcgtgctgtgggatgacagcgggacgggagctcacaagtgctttcactgaagatttgttcatatactgtgtattgattgttgtgtaatatatcatcattgcttttgtaaatacgtaaaactgtaattttttaatggtgtgcttcccttatacttttttgatcagagaattttggaaagtaccaaagaagcaggggaatcattggccagtgttacgttttcacattgtctgtctcccaccctcactgatcacgcctgccccagagcagtgtgtggcggtgacaccgtcacccagcatgcgccacgccgtggctcccaccagcagtgccaccgccaccacaccccagatcccacccaccttgcagtggcctttccttgtcatcagagtagagaatgcacaggtgttggtgagggcgtgtggctgagcactacatgtcaagtccagagtcagtttctatcccaattctccctgcagcctgaagaacggatccttgtctccaatgtcagcacaaaggaggctttttctgtgctttgacattctagcacttcagggatgagagggagggagaatcctggatgctggatggagtatttctctgaggcccacacaaagctggacacccccaggctctactccatcccattggagtctcttctttttttgatagcgggagggaggaagtacgactaatgttggagcctgaaactatggaaatgctgctaaaatttttatattgacaaacattttcttggtacttcattgtcatttttcattaatcaaccatattaaatttataataaaaaatgcccctcagaaaaaaaaaaaaaaagaaaaaaaaaaaaaaa

SEQ ID NO: 13631 - DNA, 5106 bp, Homo sapiens
cctgccacagccggggcggctggaactctctccctttctccctccatccttccacttcccctgctcggccccgccgtcaggccgggtcccccttccctgccgtcatcaggttccccttctcccttcttggcactttcctttcgaaccatccttctggacaaactttgatggagaatttcacaccacgctggaaaaatgccggttatgaaaggattactggcgccgcaaaacaccttcctggacaccatcgccacccgttttgacggaacacatagcaacttcatccttgccaatgcccaggtggctaagggtttccccatagtctactgttccgatggcttctgcgagcttgctggatttgcccgaactgaagtcatgcagaagagttgtagctgcaagttcttatttggggttgaaaccaatgagcaactgatgcttcaaatagaaaagtcactggaggagaaaacagaattcaaaggagaaattatgttctacaagaaaaacgggtctccattttggtgcctactggatattgttcccataaagaatgaaaaaggagatgtagtactttttctggcctcgttcaaagatataacagatacaaaagtgaagattactccagaagataaaaaagaagacaaagtcaaaggaagatcaagagcagggacccactttgactcagcccggagacggagtcgagcagtcctttatcacatctctgggcacctgcaaagaagagaaaagaacaaattgaaaataaataacaatgtttttgtagataaaccagcatttccggagtataaagtttctgatgcaaaaaagtccaaattcatacttctgcattttagcacttttaaagctggctgggactggcttattttgttggcaacgttttatgttgctgtgactgtaccttacaacgtttgctttattggcaatgacgacctgtccacaactcggagcacaaccgtcagtgacattgcagtggagattctttttattatagatattattttaaatttccgaacaacttatgtcagcaagtctggccaagttatctttgaagcaagatcaatttgcatccactatgtcacaacctggttcatcattgatttaatcgctgccctgccttttgatcttctgtatgctttcaacgtcacagtggtgtctctcgtgcatcttctaaagacagtgcgcctcttgcgtcttttgcgtctgctgcagaagttagaccgctattcccaacacagtactatcgtcctgactctgctcatgtccatgtttgcactccttgcacactggatggcgtgtatctggtacgtcattggaaaaatggagagggaagacaacagccttctgaagtgggaagttggttggcttcatgagttgggaaagagactggaatctccatactatggcaacaataccttggggggcccgtcgatccgaagtgcctatattgccgctctgtacttcacgctgagcagcctcaccagcgtgggttttgggaacgtctctgctaatacagatgcagaaaagatcttctccatctgcaccatgctgattggtgccttgatgcacgccttggtgtttggaaacgtgacagcaatcatacagaggatgtactccagatggtccctctatcacactagaactaaggatctgaaagatttcatccgtgtccatcacttgccccaacaactcaagcagaggatgctcgaatattttcaaacaacctggtcagtcaacaatggaatagattcaaatgagcttttgaaagactttccagatgaactgcgttctgacatcactatgcacttgaacaaggagatcttacagttgtccctttttgaatgtgccagccggggctgcctcaggtctctgtctctacacatcaaaacctctttctgtgctccgggggagtatctgctgcgtcaaggggatgctttgcaggccatctactttgtatgctcgggctccatggaagttcttaaagacagcatggtgctggctattcttgggaaaggggatttaattggagcaaatctatcaattaaggaccaagtgatcaagaccaatgcagatgtaaaggctttaacctactgtgatctccagtgtatcatcctcaaaggactctttgaagtgctagacctttacccagaatatgctcacaaattcgtggaagacattcagcatgacctcacatacaacctccgagaaggtcatgagagtgatgtgatatcaagactatcaaacaaatctatggtctcacagtcagagcccaagggaaatggcaacatcaacaagcgactcccatccattgtggaagatgaggaagaggaggaggagggggaggaagaggaggcagtctccctctctcccatctgcacaaggggatcttcttcgcgcaacaagaaggttggaagcaataaagcctacctgggcttaagcttaaagcaactggcctcgggaacggtgccctttcactcgcctatcagagtctccaggtcaaattcccccaaaaccaagcaggaaattgacccccccaaccataataaaaggaaagagaagaacttgaaattgcaactttcaactttgaataatgctggacccccagacctcagtccaaggattgttgatggaattgaagatggaaacagcagtgaagaaagtcagacttttgattttggctctgaacgaatcagatcagagcccagaatttctcctcctcttggagatccagagattggagctgctgttctcttcatcaaagcagaggagaccaagcagcagataaacaaactcaacagtgaggtaacaacattgactcaggaagtttctcagttgggtaaagacatgagaaatgtgatccagcttctggaaaacgttctgtcacctcagcagccatcacggttttgctctttgcacagcacctctgtgtgtccctccagggagagcttacagaccagaacgagctggagtgcacaccagccttgcctacacttgcaaacaggcggggctgcttatacccaagcacaactttgtagcagtaatatcacctcagacatttggagtgtggatccctcctctgtggggagcagcccccaacgaactggagctcatgagcaaaatcctgcagacagtgaactttatcattctccaagccttgattattcaccttcccactaccaggttgtccaagaaggtcatttgcaatttttaaggtgcatctctccacattcagattctacgttgacgcctctgcagtccatttcagcaactctctcatcttctgtctgctcctcttcggaaacatctttgcacctagttctcccaagcagatcagaggagggcagcttcagtcagggaactgtgagttccttcagtctggaaaacttaccaggatcttggaaccaggaaggaatggcatcagcttctacaaaacctttggagaaccttccactggaagttgtcacaagcacagcagaagtgaaagataacaaagccataaatgtatgatattagtgcccatgatgcagcagctaatttcaaacctaccactgcatgacagttttagtttgcctttttgcctctggtgggcatgaagactgagcaaagctgggaatcctgcagaaaagagtgtgaggagccagggaaaggcagaaccacctccatgctgtagcaaacaatttctagatactagaagcataatagaaacatttttctgtacaggtattaaactactggtctgtttgacagactttggtaacaatccaaagaccctgagggtctgagcagctagaagtcctagacaaagaacttgtggatgacttttgtcccatgtggcttttgtgaagtatggcaaaggtttttcatgagtgcctgattgttattcctgaacaatatccatagcactgttggcctcaggagtgcacagctcctgctgatgtatttttctttttgtgaaggcaaagggacaattatcactgcatgtcatctcctagacaatcagtcaaatagagctggtggccagtggttagctattcgcacgttatttgccatgtaaatgaaaacgtctttatttatcaaaaaaacacagaggctatttttatatccttggtatgaaatatgtatttaaactatttaaatatttataaagaaatgaatgttttcttttcattttggtaaaaaaaaagcttgctgttttaacaagaaatgcactactgttgtgtatagtagatcaaaaattatttattactaagaggatgtagtttccaaaggaatcccccattttttctgcatgcagtttgcaacaaatgtattctcatgcttctggattataaaagaaaagtgaagtcatattttgttaatgaaataaaaacatggactgagtgtcaactacatgagctttggcatggggatagagaggctccatctaggctctgccaactcatgtcaatgacatgatttaaggtcgttgtgccagcagaaatgtctctcctctaggtatcgtattttgttgctcaagaatccaaaatgggtctgtggacatagggcaatttggggctcaaagtgagggagaaaacctgggtgtgtcctttcccagtgcttttcttttacaagaggtagtagactagtggaaatccccaaatggagccaagacttctgagctataacttgtgggagtaataccagcttgcaatgggtcagcactttaccttttttctttaaggctcccaacaatgctatacagcgcagttgtttccattcctatttttaataaatctcaggggaagcctcagagattacacagttaggatgctgacacagtctagaatccataatgctccctacatctcacactaacaggcaaattcagatgctgggattggcaatgatttaagcaccttcactaaagtcttattttatgttttagaacagttacagtctaattgtcttggacattttgggaagatatattgggttcacattctggagttctctttattttccaccacaaaaaataatctgagaattgtatcattaaaagtatctaaacacacaaaaaaaaaaaaaaaaaaaaaaaaaaaaaaaaaaaaaaaaaaa

SEQ ID NO: 13632 - DNA, 3692 bp, Homo sapiens
ctgatttctcttcggctggacggaggctgcctcctcacgcggctcccaactattcccgtagctcagtgcccccctcccgccgctctactcagccaggcagacagactgacagactcgctagtcggcagcttcactcccgagggtgccgcgagcccaggcggcgaacacccggtacccctggcgcagcgaggtgggatgctgtacggacagcagcgctaagtgcccccccacccccggcgcagggtgcactcgctcctggccgcgggcccagcggcggcggcggcggcggcggcggaggggatgagcccgggacgcgcgaggcgcctgcctcaagctaccgcccggagagggacgccgagtagggctcatcgcagtaccgcgcggacccctgccccctgtggcacgcggctgcggagccttgaagccgtgtctgtgatcaggatgcactgggcgcctcgcagctggtgaggatgccctgctgcgcggccctgcgcccccagccccagtcccaggtgggcaagactgactgggcccggcttcggcccctcgtgccggtggatgaaacgtgccggagtgcttgggtgccatcagctatcaaatctgaattctaagcgccatggacgaaggcactggactgcagcccggggcgggagagcagctggaggcgccggccactgcagaagctgtccaagagaggtgcgagccggagaccctcaggtctaagagtttaccggtcctcagcagcgcctcctgccggccaagcctcagtcccactagtggagacgccaacccggcctttggctgtgtggattcttcgggccaccaggagttgaagcaaggcccgaacccgttggcccccagtccctctgccccgtccacttcggcggggctcggggactgtaaccacagggtggacctcagcaaaaccttctcggtgtcctccgccttggccatgctccaggagagaaggtgcctctacgtggtcctcacggattcccgttgcttcctggtgtgcatgtgctttctgaccttcatccaggcgttaatggtctctgggtacctgagcagcgtaattaccaccattgaaaggcgctacagtctgaagagttccgagtcggggctgctggtcagctgctttgacatcgggaacctggtggtggtggtgttcgtcagctacttcggcggccggggtcggcggcccctgtggctggccgtgggtggactcctcatcgccttcggggcagccctcttcgccttacctcacttcatctcgcccccctaccagatccaagagttgaacgcctcggcccccaacgacggcctgtgtcagggtggcaactccaccgccactttggagcctccggcctgtccgaaggactcgggaggaaataatcactgggtctacctggctttattcatttgcgcgcagattctcattggaatgggctccacacctatttataccctgggaccaacctacttagatgacaatgtcaagaaagaaaactcctccttgtacctagccatcatgtatgtcatgggagcacttggccctgcagtgggatatttattaggtggacttcttattggtttttatgttgatcccagaaatcctgttcaccttgaccagaatgaccctcgtttcattggaaactggtggagtggattcctcctttgtgccattgcaatgtttcttgtgatattcccaatgtttactttcccaaaaaagcttccacctcgacacaagaaaaagaaaaagaaaaaattttctgttgatgctgttagtgatgacgatgttctgaaggagaaatcaaacaacagtgaacaagcggacaaaaaagtttcttcgatgggatttggaaaggatgtcagagacctaccaagagcagctgtcaggatcttaagcaacatgacattcctttttgtgagtttgtcatacacagctgagagtgccattgtaactgctttcattaccttcattcccaagttcatcgagtcacagtttggtatcccagcctccaatgccagcatctacactggggttattatcgtccccagtgctggtgttggtattgtcctcggaggctacattataaaaaaattgaaacttggtgccagagaatctgcaaaactagcaatgatctgcagtggtgtgtctttactatgtttttcaaccctatttattgttggatgtgaaagcattaatctagggggcataaacatcccttatacaacaggaccttctctcaccatgccccataggaatctgacaggaagctgcaacgttaattgtggttgtaaaatacacgagtatgagccagtctgtggatcagatggaattacatactttaacccttgtctggctggctgtgttaatagtggtaatcttagcactgggatacggaattatacagaatgcacctgtgtccaaagtcgccaagtgatcactccacccaccgtgggacagcgaagtcagctccgtgtggttattgtcaagacttatctcaatgagaacggctatgctgtgtctgggaaatgtaaacggacctgcaatactcttatcccattcttagtttttcttttcatagtcaccttcatcacagcatgtgcccaaccatcagctatcatagtaacactcaggtccgtagaagatgaggagagaccttttgcactgggaatgcagtttgttttgttgcgaacacttgcatacattcctactccaatctactttggagcagtcattgacaccacctgcatgctctggcaacaggaatgtggtgtgcagggttcttgctgggagtacaacgtgacgtcgtttcgttttgtgtattttggtttggctgccggcctcaaattcgttgggtttatttttatttttctggcctggtactccataaaatacaaggaggatggactgcagaggcggaggcagagagaatttcccctgagcaccgtgagtgagagagtgggacaccccgacaatgcccggactagatcttgcccagctttcagcacccagggagaattccacgaagagactggcctgcaaaaagggatccagtgcgcagcacagacctacccggggcccttcccagaagcaataagttcctctgcggacccggggctggaagagagccccgctgccttggagccgccctcctgaagcttgaaaatggaagaatttagttttgttggttgaattgaaaatggcgacttgagaaacaactgtgccttcttttctttctttcttttttttaacctctacagacacaatcctcaaaccaacaaaactcagtatacacagccgctattcattgagggctggatacctcaacaagactgagagcctttccccgcttctctccaagaaggagacgttcagctagatttgttcccatttccgttgtgttaattcaaagctcatgctcccctacggtacaggctgaggtacacggttagcaaaaccatgggaaggggaatggcggtgcatatcattaactaacactccaaacaaaggtgagcttgcccaggacttggcatttccaaatcaaagtttttagatatgaacacctactgtgagttctgctacaaagcacaaatgaatttgtctcaactatgcaatttgattggaaaaatgtatgtgcagcatgttacatttactttcacggaataaagcagatatgtttctgaaa

SEQ ID NO: 13633 - DNA, 2012 bp, Homo sapiens
gcggctgtccagtcgtagcccggccgcccgcgcctgtccggtccggtccggccacggaggcagcgcagcggcgggactccgagcctaccccgccgagtgagctgcgccgcaccgtgccgtcccacccggcacccaccagtccgatggggccgcagcggcggctgtcccctgccggggccgccctactctggggcttcctgctccagctgacagccgctcaggaagcaatcttgcatgcgtctggaaatggcacaaccaaggactactgcatgctttataacccttattggacagctcttccaagtaccctagaaaatgcaacttccattagtttgatgaatctgacttccacaccactatgcaacctttctgatattcctcctgttggcataaagagcaaagcagttgtggttccatggggaagctgccattttcttgaaaaagccagaattgcacagaaaggaggtgctgaagcaatgttagttgtcaataacagtgtcctatttcctccctcaggtaacagatctgaatttcctgatgtgaaaatactgattgcatttataagctacaaagactttagagatatgaaccagactctaggagataacattactgtgaaaatgtattctccatcgtggcctaactttgattatactatggtggttatttttgtaattgcggtgttcactgtggcattaggtggatactggagtggactagttgaattggaaaacttgaaagcagtgacaactgaagatagagaaatgaggaaaaagaaggaagaatatttaacttttagtcctcttacagttgtaatatttgtggtcatctgctgtgttatgatggtcttactttatttcttctacaaatggttggtttatgttatgatagcaattttctgcatagcatcagcaatgagtctgtacaactgtcttgctgcactaattcataagataccatatggacaatgcacgattgcatgtcgtggcaaaaacatggaagtgagacttatttttctctctggactgtgcatagcagtagctgttgtttgggctgtgtttcgaaatgaagacaggtgggcttggattttacaggatatcttggggattgctttctgtctgaatttaattaaaacactgaagttgcccaacttcaagtcatgtgtgatacttctaggccttctcctcctctatgatgtattttttgttttcataacaccattcatcacaaagaatggtgagagtatcatggttgaactcgcagctggaccttttggaaataatgaaaagttgccagtagtcatcagagtaccaaaactgatctatttctcagtaatgagtgtgtgcctcatgcctgtttcaatattgggttttggagacattattgtaccaggcctgttgattgcatactgtagaagatttgatgttcagactggttcttcttacatatactatgtttcgtctacagttgcctatgctattggcatgatacttacatttgttgttctggtgctgatgaaaaaggggcaacctgctctcctctatttagtaccttgcacacttattactgcctcagttgttgcctggagacgtaaggaaatgaaaaagttctggaaaggtaacagctatcagatgatggaccatttggattgtgcaacaaatgaagaaaaccctgtgatatctggtgaacagattgtccagcaataatattatgtggaactgctataatgtgtcattgattttctacaaatagacttcgactttttaaattgacttttgaattgacaatctgaaagagtcttcaatgatatgcttgcaaaaatatatttttatgagctggtactgacagttacatcataaataactaaaacgctttgcttttaatgttaaagttgtgccttcacattaaataaaacatatggtctgtgtaaaaaaaaaaaaaaaaaaaaaaaaaaaaaaaaaaaaaaaaaaaaaaaaaaaaaaaaaaaaaaaaaaaaaaaaaaaaaaaaaaaa

SEQ ID NO: 13634 - DNA, 3874 bp, Homo sapiens
atggctcacctaaagcgactagtaaaattacacattaaaagacattaccataaaaagttctggaagcttggtgcagtaatttttttctttataatagttttggttttaatgcaaagagaagtaagtgttcaatattccaaagaggaatcaaggatggaaaggaacatgaaaaacaaaaacaagatgttggatttaatgctagaagctgtaaacaatattaaggatgccatgccaaaaatgcaaataggagcacctgtcaggcaaaacattgatgctggtgagagaccttgtttgcaaggatattatacagcagcagaattgaagcctgtccttgaccgtccacctcaggattcaaatgcacctggtgcttctggtaaagcattcaagacaaccaatttaagtgttgaagagcaaaaggaaaaggaacgtggggaagctaaacactgctttaatgctttcgcaagtgacaggatttctttgcaccgagatcttggaccagacactcgacctcctgaatgtattgaacaaaaatttaagcgctgccctcccctgcccaccaccagtgtcataatagtttttcataatgaagcgtggtccacgttgcttagaactgtccacagtgtgctctattcttcacctgcaatactgctgaaggaaatcattttggtggatgatgctagtgtagatgagtacttacatgataaactagatgaatatgtaaaacaattttctatagtaaaaatagtcagacaaagagaaagaaaaggtctgatcactgctcggttgctaggagcaacagtcgcaacagctgaaacgctcacatttttagatgctcactgtgagtgtttctatggttggctagaacctctgttggccagaatagctgagaactacacggctgtcgtaagtccagatattgcatccatagatctgaacacgtttgaattcaacaaaccttctccttatggaagtaaccataaccgtggaaattttgactggagtctttcatttggctgggagtcgcttcctgatcatgagaagcaaagaaggaaagatgaaacctacccaattaaaacacccacttttgcaggaggacttttttccatatcaaaagaatattttgagtatattggaagctatgatgaagaaatggaaatctggggaggtgaaaatatagaaatgtctttcagagtatggcaatgtggtgggcagttggagattatgccttgctctgttgttggacatgtttttcgcagcaaaagccctcatagctttccaaaaggcactcaggtgattgctagaaaccaagttcgccttgcagaagtctggatggatgaatacaaggaaatattttataggagaaatacagatgcagcaaaaattgttaaacaaaaagcatttggtgatctttcaaaaagatttgaaataaaacaccgtcttcggtgtaaaaattttacatggtatctgaacaacatttatccagaggtgtatgtgccagaccttaatcctgttatatctggatacattaaaagcgttggtcagcctctatgtctggatgttggagaaaacaatcaaggaggcaaaccattaattatgtatacatgtcatggacttgggggaaaccagtactttgaatactctgctcaacatgaaattcggcacaacatccagaaggaattatgtcttcatgctgctcaaggtctcgttcagctgaaggcatgtacctacaaaggtcacaagacagttgtcactggagagcagatatgggagatccagaaggatcaacttctatacaatccattcttaaaaatgtgcctttcagcaaatggagagcatccaagtttagtgtcatgcaacccatcagatccactccaaaaatggatacttagccaaaatgattaagtgttccttaaaattaagttgaaaaaggaaatattctttctcataaaactgtgactaggcatacactgtagtttttgaaaattatgcaaaagcagctaaatgtaacttattccaagtgcatttttcttatttatatctttatgtagcactactacagaaattctgcaagtttctgtttcaaagcacaataactagtaataccaaagactatttcaaaatgtccagatgtaggggaagagatgtttacagtatgatgaaaataattttccaagtaaagtgatgtttgtgtgttttgtacacttagggatatatatatatagctacattcacacactcacaatttaaaatatttcccctagttttttggggggataggaagaaagatttgttactgtatttttttaactacataaaaatagatcaataaatgtcagcattggcctctgtgtacaaaccaagagcttttacagatccagaatttattagtttaaaatgcaggtgaacttttttttgcgtttggtttacttgtctgtcaaatgtttccttaaacatgaaactgaataaggagaagagtatttttaacacttaaatttcttggcaaattttaaaacattttttagtctgtaatacactccacttgaagcacttaagtcttccttaaatgacttttcttaagtaatgatactgtgtgttttcccaaagcacttttaaaaaaatttttataaattactatctgttgaaaaggtgtccttttcctttcttctagtattttttttcttaccaaaattcactaatcttgaatgtttgtgatattaaatttcaaatgcagaatacttgactcatttaaagctaaattttgttactgattcaattataattgtaatggatttttgactttgtaatggattcttttcatcaaaaagccttattattttttatctatgtggaaaacacaataaaaaatcctcaacactattgtaatcatttggttaagtgcttattcctcttttgggtaaaatctgtaattgataataggtgggggaaaatgaattttgtatgctgaatttctaagcgcctattgtttgtaaaaccatcagatatttcttatggcacaaaaaatgaggaatagcaaaattcctgtgttcaatatttagaaaattttgtattaatttctgataaagttccttaagcatctgatagaatgatgttttaaaaaaatttgacgcttgcttaggagatttaccactttttttttttgtttttcgtcattttatatttagatctcctgtattcttgttcccgaagtaaaatacgatcggtttcatattttaaatctggcagagcctcagctgtacgaaaaagagcatatactggttattgaccctatcttctcattgtttgtttgtaagtttgaatttgtattaaaaagcctgcattctgagctggacatggtggctcagcttctaatcccagcactttggtaggcaaaggtgggaggatcatttgagctcaggagttccagaccagcctgggcaacatagcaaaatctcatctctacaaaaagtaaaaattaaaaaatgaaattaaaaataaaattacctaggtgtggtggcacgcatctgtagttccagctatacaggaaggtgaggcagaagcattgcttgagcttgggagatcgaggctacagtgagctatgattacaccactgcacttcagtctgtgtgactgagcaagactctttcaaaaaaaaaaaaaagcctacattctccagttgattatttccaactaatgtgtattatgtgcctaattttctatcagaagttgtattaagcccgttttcacactgctgttaaagacatacctgagactgggtaatttataaagaaaaataggttcaatggacccacaggtccgcgtggctggggaagcttcacaatcatggcggaaggtgaaagcatgtcttacgtggaag

SEQ ID NO: 13635 - DNA, 13108 bp, Homo sapiens
tcctgggatggggtaggaggctattgtgaatgaggctcataagcatcgcccccggccctagatggcaagttcaaagccaccacccaagatcagctggccagaactgcacgttccaactgcacggtcccaatgggacagttgagagcccagggttcccatatggctaccccaattacgccaactgcacgtggaccatcaccgcggaagagcagcacagaatccagcttgtgttccagtcctttgccctggaagaggactttgatgtcctgtcggtgtttgatggtccaccccagccagagaatctgcgtacgaggctcacaggctttcagctgccagccaccattgttagtgcagccaccaccctctctctgcgcctcatcagcgactatgcagtcagtgcccaaggcttccacgccacctatgaagttctccccagccacacatgtgggaacccagggaggctgcccaatggcatccagcagggttcaaccttcaacctcggtgacaaggtccgctacagctgcaaccttggcttcttcctggagggccacgccgtgctcacctgccacgctggctctgagaacagcgccacgtgggacttccccctgccttcctgcagagctgatgatgcctgtggtgggaccctgcggggccagagtggcatcatctccagcccccacttcccctcggagtaccataacaatgccgactgcacatggaccatcctggctgagctgggggacaccatcgccctggtgtttattgacttccagctggaggatggttacgactttctggaagtcactgggacagaaggctcctccctctggttcaccggagccagcctcccagcccccgttatcagcagcaagaactggctgcgactgcacttcacatcggatggcaaccaccggcagcgcggattcagtgcccaataccaagtcaagaagcaaattgagttgaagtctcgaggtgtgaagctgatgcccagcaaagacaacagccagaagacgtctgtgttaactcaggttggtgtgtcccaaggacataatatgtgtccagaccctggcatacccgaaaggggcaaaagactaggctcggatttcaggttaggatccagcgtccagttcacctgcaacgagggctatgacctgcaagggtccaagcggatcacctgtatgaaagtgagcgacatgtttgcggcctggagcgaccacaggccagtctgccgagcccgcatgtgtgatgcccaccttcgaggcccctcgggcatcatcacctcccccaatttccccattcagtatgacaacaatgcacactgtgtgtggatcatcacagcactcaacccctccaaggtgatcaagctcgcctttgaggagtttgatttggagaggggctatgacaccctgacggtcggtgatggtggtcaggatggggaccagaagacagttctctacatcctgacaggtacatcggtcccggatctcattgtcagcaccaatcatcaaatgtggctcctcttccagactgatggcagtggcagttccctgggattcaaggcttcttatgaagagatcgagcagggcagttgcggtgaccctggcatacctgcatatggccggagggaaggctcccggtttcaccacggtgacacactcaagtttgagtgccagcccgcctttgagctggtgggacagaaggcaatcacatgccaaaagaataaccaatggtcggctaagaagccaggctgcgtgttctcctgcttcttcaacttcaccagcccgtctggggttgtcctgtctcccaactacccagaggactatggcaaccacctccactgtgtctggctcatcctggccaggcctgagagccgcatccacctggccttcaacgacattgacgtggagcctcagtttgatttcctggtcatcaaggatggggccaccgccgaggcgcccgtcctgggcaccttctcaggaaaccagcttccctcctccatcacaagcagtggccacgtggcccgtctcgagttccagactgaccactccacagggaagaggggcttcaacatcacttttaccaccttccgacacaacgagtgcccggatcctggcgttccagtaaatggcaaacggtttggggacagcctccagctgggcagctccatctccttcctctgtgatgaaggcttccttgggactcagggctcagagaccatcacctgcgtcctgaaggagggcagcgtggtctggaacagcgctgtgctgcggtgtgaagctccctgtggtggtcacctgacttcgcccagcggcaccatcctctctccgggctggcctggcttctacaaggatgccttgagctgtgcctgggtgattgaggcccagccaggctaccccatcaaaatcaccttcgacagattcaaaaccgaggtcaactatgacaccctggaagtacgcgatgggcggacttactcagcgcccttgatcggggtttaccacgggacccaggttccccagttcctcatcagcaccagcaactacctctacctcctcttctctaccgacaagagtcactcggacatcggcttccagctccgctatgagactataacactgcagtcagaccactgtctggatccaggaatcccagtaaatggacagcgtcatgggaatgacttctacgtgggcgcgctggtgaccttcagctgtgactcgggctacacattaagtgacggggagcctctggagtgtgagcccaacttccagtggagccgggccctgcccagttgtgaagctctctgtggtggcttcattcaaggctccagtgggaccatcttgtcgccagggttccctgacttctaccccaacaacttgaactgcacctggattatcgaaacatctcatggcaagggtgtgttcttcactttccacaccttccacctggaaagtggccatgactacctcctcatcactgagaacggcagcttcacccagcccctgaggcagctaactggatctcggctgccagctcccatcagcgctgggctctatggcaacttcactgcccaggtccgcttcatctctgatttctccatgtcatatgaaggattcaacatcaccttctcagagtacgacttggagccctgtgaggagcccgaggtcccagcctacagcatccggaagggcttgcagtttggcgtgggcgacaccttgaccttctcctgcttccccgggtaccgtctggagggcaccgcccgcatcacgtgcctggggggcagacggcgcctgtggagctcgcctctgccaaggtgtgttgctgagtgtgggaattcagtcacaggcactcagggtactttgctgtcccccaactttcctgtgaactacaataacaatcatgaatgcatctactccatccagacccagccagggaagggaattcagctgaaagccagggcattcgaactctccgaaggagatgtcctcaaggtttatgatggcaacaacaactccgcccgtttgctgggagtttttagccattctgagatgatgggggtgactttgaacagcacatccagcagtctgtggcttgatttcatcactgatgctgaaaacaccagcaagggctttgaactgcacttttccagctttgaactcatcaaatgtgaggacccaggaacccccaagtttggctacaaggttcatgatgaaggtcattttgcagggagctccgtgtccttcagctgtgaccctggatacagcctgcggggtagtgaggagctgctgtgtctgagtggagagcgccggacctgggaccggcctctgcccacctgtgtcgccgagtgtggagggacagtgagaggagaggtgtcggggcaggtgctgtcacccgggtatccagctccctatgaacacaatctcaactgcatctggaccatcgaagcagaggccggctgcaccattgggctacacttcctggtgtttgacacagaggaggttcacgacgtgctgcgcatctgggatgggcctgtggagagcggggttctgctgaaggagctgagtggcccggccctgcccaaggacctgcatagcaccttcaactcggtcgtcctgcagttcagcactgacttcttcaccagcaagcagggctttgccattcaattttcagtgtccacagcaacgtcctgcaatgaccctgggatcccgcagaatgggagtcggagtggtgacagttgggaagccggcgactccacagtgttccagtgtgaccctggctacgcgctgcagggaagtgcagagatcagctgtgtgaagatcgagaacaggttcttctggcagcccagcccgccaacatgcatcgctccctgcgggggagacctgacaggaccatctggagtcatcctctcaccaaattacccagaaccctacccgccaggcaaggagtgtgactggaaagtgaccgtctcaccagactacgtcatcgccctggtatttaacatctttaacctggagcctggctatgacttcctccatatctacgacggacgggactctctcagccctctcataggaagcttctatggctcccagctcccaggccgcattgaaagcagcagcaacagcctcttcctcgccttccgcagcgatgcatctgtgagcaatgctggcttcgtcattgactatacagaaaacccgcgggagtcatgttttgatcctggttccatcaagaacggcacacgggtggggtccgacctgaagctgggctcctccgtcacctactactgccacgggggctacgaagttgagggcacctcgaccctgagctgcatcctggggcctgatgggaagcccgtgtggaacaatccccggccagtctgcacagccccctgtgggggacagtatgtgggttcggacggagtggtcttgtcccccaactacccccagaactacaccagtggacagatctgcttgtattttgttactgtgcccaaggactatgtggtgtttggccagttcgccttctttcacacggccctcaacgacgtggtggaggttcacgacggccacagccagcactcgcggctcctcagctccctctcgggctcccatacaggagaatcactgcccttggccacctccaatcaagttctcattaagttcagcgccaaaggcctcgcaccagccagaggcttccactttgtctaccaagcggttcctcgaaccagcgccacgcagtgcagctctgtgccggaaccccgctatggcaagaggctgggcagtgacttctcggtgggggccatcgtccgcttcgaatgcaactccggctatgccctgcaggggtcgccagagatcgagtgcctccctgtgcctggggccttggcccaatggaatgtctcagcgcccacgtgtgtggtgccgtgtggaggcaacctcacagagcgcaggggcaccatcctgtcccctggcttcccagagccgtacctcaacagcctcaactgtgtgtggaagatcgtggtccccgaaggcgctggcatccagatccaagttgtcagttttgtgacagagcagaactgggactcgctggaagtatttgatggtgcagataacactgtaaccatgctggggagtttctcaggaacaaccgtgcctgcccttctgaacagcacctccaaccagctctaccttcatttctactcagatatcagcgtatctgcagctggcttccacttggagtacaaaacggtgggcctgagcagttgtccggaacctgctgtgcccagtaacggggtgaagactggcgagcgctacttggtgaatgatgtggtgtctttccagtgtgagccgggatatgccctccagggccacgcccacatctcctgcatgcccggaacagtgcggcgatggaactaccctcctccactctgtattgcacagtgtgggggaacagtggaggagatggagggggtgatcctgagccccggcttcccaggcaactaccccagtaacatggactgctcctggaaaatagcactgcccgtgggctttggagctcacatccagttcctgaacttctccaccgagcccaaccacgactacatagaaatccggaatggcccctatgagaccagccgcatgatgggaagattcagtggaagcgagcttccaagctccctcctctccacgtcccacgagaccaccgtgtatttccacagcgaccactcccagaatcggccaggattcaagctggagtatcaggatttgacttactcccaccagatttcttccttcctgagaggttttgatctctcggagttggaaagaaccaactcaactcctcccgtcgccgcttcctatgtctgggatcttgatcctggttgtgaagcctatgaacttcaagagtgcccagacccagagccctttgccaatggcattgtgaggggagctggctacaacgtgggacaatcagtgaccttcgagtgcctcccggggtatcaattgactggccaccctgtcctcacgtgtcaacatggcaccaaccggaactgggaccaccccctgcccaagtgtgaagtcccttgtggcgggaacatcacttcttccaacggcactgtgtactccccggggttccctagcccgtactccagctcccaggactgtgtctggctgatcaccgtgcccattggccatggcgtccgcctcaacctcagcctgctgcagacagagccctctggagatttcatcaccatctgggatgggccacagcaaacagcaccacggctcggcgtcttcacccggagcatggccaagaaaacagtgcagagttcatccaaccaggtcctgctcaagttccaccgtgatgcagccacaggggggatcttcgccatagctttctccgcttatccactcaccaaatgccctcctcccaccatcctccccaacgccgaagtcgtcacagagaatgaagaattcaatataggtgacatcgtacgctacagatgcctccctggctttaccttagtggggaatgaaattctgacctgcaaacttggaacctacctgcagtttgaaggaccacccccgatatgtgaagtgcactgtccaacaaatgagcttctgacagactccacaggcgtgatcctgagccagagctaccctggaagctatccccagttccagacctgctcttggctggtgagagtggagcccgactataacatctccctcacagtggagtacttcctcagcgagaagcaatatgatgagtttgagatttttgatggtccatcaggacagagtcctctgctgaaagccctcagtgggaattactcagctcccctgattgtcaccagctcaagcaactctgtgtacctgcgttggtcatctgatcacgcctacaatcggaagggcttcaagatccgctattcagccccttactgcagcctgcccagggctccactccatggcttcatcctaggccagaccagcacccagcccgggggctccatccactttggctgcaacgccggctaccgcctggtgggacacagcatggccatctgtacccggcacccccagggctaccacctgtggagcgaagccatccctctctgtcaagctctttcctgtgggcttcctgaggcccccaagaatggaatggtgtttggcaaggagtacacagtgggaaccaaggccatgtacagctgcagtgaaggctaccacctccaggcaggcgctgaggccactgcagagtgtctggacacaggcctatggagcaaccgcaatgtcccaccacagtgtgtccctgtgacttgtcctgatgtcagtagcatcagcgtggagcatggccgatggaggcttatctttgagacacagtatcagttccaggcccagctgatgctcatctgtgaccctggctactactatactggccaaagggtcatccgctgtcaggccaatggcaaatggagcctcggggactctacgcccacctgccgaatcatctcctgtggagagctcccgattccccccaatggccaccgcatcggaacactgtctgtctacggggcaacagccatcttctcctgcaattccggatacacactggtgggctccagggtgcgtgagtgcatggccaatgggctctggagtggctctgaagtccgctgccttgctggacactgtgggactcctgagcccattgtcaacggacacatcaatggggagaactacagctaccggggcagtgtggtgtaccaatgcaatgctggcttccgcctgatcggcatgtctgtgcgcatctgccagcaggatcatcactggtcgggcaagacccctttctgtgtgctggtgtcctgtggccatccgggctccccgcctcactcccagatgtctggagacagttatactgtgggagcagtggtgcggtacagctgcatcggcaagcgtactctggtgggaaacagcacccgcatgtgtgggctggatggacactggactggctccctccctcactgctcaggaaccagcgtgggagtttgcggtgaccctgggatcccggctcatggcatccgtttgggggacagctttgatccaggcactgtgatgcgcttcagctgtgaagctggccacgtgctccggggatcgtcagagcgcacctgtcaagccaatggctcgtggagcggctcgcagcctgagtgtggagtgatctcttgtgggaaccctgggactccaagtaatgcccgagttgtgttcagtgatggcctggttttctccagctctatcgtctatgagtgccgggaaggatactacgccacaggcctgctcagccgtcactgctcggtcaatggtacctggacaggcagtgaccctgagtgcctcgtcataaactgtggtgaccctgggattccagccaatggccttcggctgggcaatgacttcaggtacaacaaaactgtgacatatcagtgtgtccctggctatatgatggagtcacatagagtatctgtgctgagctgcaccaaggaccggacatggaatggaaccaagcccgtctgcaaagctctcatgtgcaagccacctccgctcatccccaatgggaaggtggtggggtctgacttcatgtggggctcaagtgtgacttatgcctgcctggaggggtaccagctctccctgcccgcggtgttcacctgtgagggaaatgggtcctggaccggagagctgcctcagtgtttccctgtgttctgcggggatcctggtgtcccgtcccgtgggaggagagaggaccgaggcttctcctacaggtcatctgtctccttctcctgccatccccctctggtgctggtgggctctccacgcaggttttgccagtcagatgggacatggagtggcacccagcccagctgcatagatccgaccctgaccacgtgtgcggaccctggtgtgccacagtttgggatacagaacaattctcagggctaccaggttggaagcacagtcctcttccgttgtcaaaaaggctacctgcttcagggctccaccaccaggacctgcctcccaaacctgacctggagtggaaccccacctgactgtgtcccccaccactgcaggcagccagagacgccaacgcatgccaacgtcggggccctggatttgccctccatgggctacacgctcatctactcctgccaggagggcttctccctcaagggtggctccgagcaccgcacctgcaaggcggatggcagctggacaggcaagccgcccatctgcctggaggtccggcccagtgggagacccatcaacactgcccgggagccaccgctcacccaagccttgattcctggggatgtttttgccaagaattccctgtggaaaggggcctatgaataccaggggaagaagcagccagccatgctcagagtgactggcttccaagttgccaacagcaaggtcaatgccaccatgatcgaccacagtggcgtggagctgcacttggctggaacttacaagaaagaagattttcatctcctactccaggtgtaccagattacagggcctgtggagatctttatgaataagttcaaagatgatcactgggctttagatggccatgtctcgtcagagtcctccggagccaccttcatctaccaaggctctgtcaagggccaaggctttgggcagttcggctttcaaagactggacctcaggctgctggagtcagaccccgagtccattggccgccactttgcttccaacagcagctcagtggcagccgcgatcctggtgcctttcatcgccctcattattgcgggcttcgtgctctatctctacaagcacaggagaagacccaaagttcctttcaatggctatgctggccacgagaacaccaatgttcgggccacatttgagaacccaatgtacgaccgcaacatccagcccacagacatcatggccagcgaggcggagttcacagtcagcacagtgtgcacagcagtatagccacccggcctggccgccaccaccgccaccgagagccccgcctccagcagccgttccccagggggcaggaagtaggctcccctgagcacagtgcccagtgcccatcttcgttcgtctccttgcctgtgtctgctactgctgggactcaggccctcgccctgccgccatctatgccagttaccctggagaggactcctgccgtgtcctgaaaaggcagaaaaggaagaggggctgcagacagaggaagaaagtttatggatttaaaatagcaaagcaacttgtggatctgtgtgtgtgtgtgtgtgtatgggcctgatcacacacaaacacacacacctctccttcattcacgtcctatggaagagaccataaaggcttcaaaactagaagtgcgcatgaaggatgcttcatgccctgttccccacacagagaagagatgaagagggggaggtacggtcagctttcaaaacaatatgccccccgcccatcccatgtgtgaggacatggtgactcggtgactgtaacagtaggacacatcccatcatgcggtcagagtgcagaaacccggtcagcgtgcagaaaccagctgtctgctgatgaacggcccatctgcacagcggcagcaaggattaccccaagggcaggaaaaaagtctttggaaatagattgaaaatcagtttctttatttttttcaaacactgttttattgagttctaaacccagtggattaaaaagtcatttgggtcctgggaagcactgggaaagaagggagagccggggaggatagggcaggagtctggccaggagcccaaggtcaagtctggctgtcaactgacaaagagaagagaagacaagtctgtggcccagacaggatgccaagtctgggggcagcagcagggtccttgagagaacaggggagcaagcctgccccagtacccaaaaaacaatggctatcatgtactggggttattctctgtgcctgacactttacctgtagtatttctagtctgcacaataacaccaaaatgtaggatttgttattcccctttgacagatgagaaaacagaagcctgcaaaggtaaagacagagttaggaagtgtggagtcagaatgcaaacccagatcagtctgccccaaagtccactacaccagctgccagaaaccctgttctagaaggggcagctaagaagggaggagccgatgaatctctacagtagcactgtggccaggtctggaaagccaggcaagacacctgtgtgtcctatctgggttctgctgtctccgcgtaggcagcttcggggcaaggattcaactccccaggcctcccacggttggtgctggctccttggctcccagcagccgctgaccatagccagcaaaagacctggcaggtcctgaatcaaaacaacagagtggctgaaagtcacacctctccagctccttgcgagtgggtttgattgattttgacagctatatcatgcttgggtcgttcatgaattccatgagaattgttgggaagttcatgagtttaggaatcaaagtatagcatttagggccactttctctgtcctcgggaaggcccccacaagcttaagcccctgtatacgtgtgacatgctggcctcagagattcatgtcacatattgaaatagcaaatagaaatgtgcaggagcggagggacagcgacacctggttcttaagcaaattctagattggaacaattagaagatctgactgatgttaagagtggccagaggaaagtgagaggcgtccatttccagcagacacaatggaggctgacagaggcaggagcctacccctggccacaccacctctgggacacggcacccccctgggcctggagggagagggccaatccagacacactcacactctcatctctttccttggctggaaacaagtgcaggaagctcccctcccaatttcttatgctcccttcccccttacactcctctccttcgactgctcccttcccccttcttatgcccctctcagaccacccagcggatgcctattcccgccccccacccctcccctgcgtctccttgtaaagttccatgagatgctcgaggagcacctgctggtggggcacccagcactctgctgggcatcaccctccgcacccctgacatttctctccacctccagaggcttggaagggaacagggcagatgaggcccttcacccaccatctacgccatatacccatcaccatcccatgaggaaaaaaaaaaaagtaaaacaaagacaaaaaaaatcttttgtacagagatatatttttattatacaaagtttgtacagtaccaaaaaagaaaaaaaaaaaggtgtaaatttttttttcattattgtaggtaaacggtagtggaagccttttttgtaaatgtaataaaatgtataaatatggttttcagaaaacatcaagtgctgtaaatatgtaatctacacaccttcttggcttgtctgcagtatatacatttaatttatctgtctctgtatatgaggcttccccctggggtcctgcattatggtactttcctgaatttgaaagcaattttaaattttttgaattcaaataaaatataaatttttgcattg

SEQ ID NO: 13636 - DNA, 2731 bp, Homo sapiens
ctcccacgggctggctggcaagcggccctggtgggtctgcgggggcaggggcagccttcctggtttatctctaccggcgcgatctgctcgtccgcctcggctccagaagctggggctcagggtccggcgaggcaggaagcctgaggccacagcccagagcagcctgagtgcagtcatgtgggggcgactgctcctgtggcccctggtgctggggttcagcctgtctggcggcacccagacccccagcgtctacgacgagagcgggagcaccggaggtggtgatgacagcacgccctcaatcctgcctgccccccgcggctacccaggccaagtctgtgccaatgacagtgacaccctggagctcccggacagctcacgggcactgcttctgggctgggtgcccaccaggctggtgcccgccctctatgggctggtcctggtggtggggctgccggccaatgggctggcgctgtgggtgctggccacgcaggcacctcggctgccctccaccatgctgctgatgaacctcgcggctgctgacctcctgctggccctggcgctgcccccgcggatcgcctaccacctgcgtggccagcgctggcccttcggggaggccgcctgccgcctggccacggccgcactctatggtcacatgtatggctcagtgctgctgctggccgccgtcagcctggatcgctacctggccctggtgcacccgctgcgggcccgcgccctgcgtggccggcgcctggcccttggactctgcatggctgcttggctcatggcggccgccctggcactgcccctgacactgcagcggcagaccttccggctggcgcgctccgatcgcgtgctctgccatgacgcgctgcccctggacgcacaggcctcccactggcaaccggccttcacctgcctggcgctgttgggctgtttcctgcccctgctggccatgctgctgtgctacggggccaccctgcacacgctggcggccagcggccggcgctacggccacgcgctgaggctgaccgcagtggtgctggcctccgccgtggccttcttcgtgcccagcaacctgctgctgctgctgcattactcggacccgagccccagcgcctggggcaacctctatggtgcctacgtgcccagcctggcgctgagcaccctcaacagctgcgtggatcccttcatctactactacgtgtcggccgagttcagggacaaggtgcgggcagggctcttccaacggtcgccgggggacaccgtggcctccaaggcctctgcggaagggggcagccggggcatgggcacccactcctctttgctccagtgacacaaagtggggaaggctgtactgggtcgaacagggtcccttcccccacttcacgtccttcctgggacctcagaatgtgaccttatttggaaatagggttgttacaactgtcactagcggaggtcactttggagaagggtgggccttacatccagtgtgggtggtgtcctcataagataaggagaggccaggcctggtggctcacgcctgtaatcccagcactttaagaggccaaggcggatggatcacttgagcccaggagttcaacaccagcctgagcaacatggtaaaaccccatctctaccaaaaatacaaaaattagctgggcttggtggctggcgcctgtaatcccagctactcaggagactgaggcagaaggatcgcttgaacctgggaggcagaggttgcagtgagccgagattgcgccactggactccagcctgcgtgacagagagcctgtctctaaattaattaattaattaatttaattcaattttaaaaagacgaaaagtgacggccaggtgcagtggctcacgcctataatctcagcactctgggaggccaagatggaggattgcttgaagccaggagtttgggaccagcctgggcaacatagggggatcccatctctacacacaaaaaaattttttaatgaaccaggcattgtggcatgcgcctatagtcccagccactcaagaggcacaggcgggaggatcacttgagcctgggaggttgtggttgcagtgagctatgattgtaccactgcactccagcctgggcaacagagcaagaccttgtctcaaaaataaacaaactaaaattaaaaaaagaagacgagagatagtgggtgtggtggctcacacctgcaatcccagcactttggaaggccgaggtgggcagatcatctgaggccaggagttcaagaccagcctggctaacatggtgaaatcctatctctaccaaaaatacaaaaattagccaggcgtggtggtgggcacctgtactggggaggtgcccacccagctactggggaggctgagtcaggagaatcgcttgaacctgggaggcggaggttgcggtcagctgagatggtgccactgcactccagcctgggcgaaagagcgactctgtctccaaaaaaaagagaagaggagaggacacagagacacacagagaagaaagccatgtggcggcagaggcagagatgggagtgatgcggacggacacaaactaagggatgccacgatgccaagcacagccaacagccaccagcagccaggagacaggcctgggacgggctctccctcacagcctccagagggaaccagccctgccaccaccttgaccctggacttctggcctgcagaactgtgagacaataaactctcattgttttaa

SEQ ID NO: 13637 - DNA, 5099 bp, Homo sapiens
gagacgcggacgtcgctcttccaagatggcgggcgtccgtcgcgagcgaccgggccgaggggaggccagcgaagccgagtaaaaccgccgcccgggagaagactgaaggagcagttgccgccgttggcggcggcccgagcagttttcgctgctgctacggctgttgccatgaggcgaggctagggaggacctcacttccccggggtgtaataatgttaactgaggccagtctatccatatggggatggggaagccttggcattgtcctttttctgataacctttggaccctttgtaatattttatttgacattttatatcctctgctttgtgggtgggggtttagtggttactctcctgtttggaaaaacaaactcagagaagtacctagaacagtgtgaacactcatttcttcctccaacatcacctggggttcctaagtgcttagaagaaatgaaacgggaagccaggactattaagattgatagaagattgacgggtgccaatataattgatgaacctctccagcaagttatccagttttccttgagggattatgtccagtattggtattatacactaagcgatgatgaatcttttcttcttgaaattaggcagactcttcaaaacgcactcattcagtttgctactaggtcaaaagaaatagactggcaaccttattttactacacgcattgtagatgactttggcacacacttacgagtattcagaaaggctcaacagaaaataacagagaaagatgatcaagtgaaaggtacagcagaagatcttgtagataccttctttgaagttgaagttgaaatggagaaggaggtttgccgtgatctagtgtgcacttcccccaaagatgaagaaggattcctaagggatttgtgtgaggtcttactatatttattgctacctcctggagatttccagaacaagatcatgcgatactttgtcagggaaatccttgcacgaggaattcttcttccattaataaatcaactcagtgatcctgattatattaatcagtatgtcatatggatgatccgtgattctaactgcaactatgaggcctttatgaacattattaaattgagtgacaatattggagagctagaagcagtcagagataaggcagcagaagaattacagtatcttagatctctagatacagctggtgatgatatcaacactatcaaaaatcaaataaatagcttactattcgtaaagaaggtatgtgactcaagaatacagcgattgcagtcaggcaaagaaataaatactgtgaaacttgcagcaaactttgggaaactttgcacagtccccctggacagcattcttgtagacaatgttgcactacaattttttatggattacatgcagcaaactggaggtcaagcacatctattcttttggatgacagtggaaggataccgggttaccgcccaacagcagctagaagttttattaagtcgtcagagagatggaaaacatcaaaccaaccaaaccaaaggtcttttaagagcagctgctgttggaatttatgaacagtatttatcagaaaaggcatctccaagagttactgttgatgactatttagtagcaaaattagcagatactttgaatcatgaagatccaacccctgaaatctttgatgacattcaaagaaaggtatatgaattgatgctacgagatgaaagattttatccttccttcagacagaatgcactttatgtgcgcatgttagctgagcttgacatgttaaaagatcctagtttcagaggatccgatgatggggatggagaatcttttaatgggtctcctacaggaagcataaatttgtctttagatgacctttcaaatgtttcttctgatgactcagtacaacttcatgcctacatttcagacacaggcgtttgtaatgatcatggcaagacatatgcattatatgccatcactgtacaccggcgcaacctaaacagtgaggagatgtggaaaacctatcgtcgttatagtgacttccatgacttccacatgagaatcactgaacagtttgaaagtctctcaagcatattgaaacttcctggaaaaaagacttttaataatatggatagagattttttagaaaagagaaaaaaggatctaaatgcatatttgcagttactgttagctcctgaaatgatgaaggcatcccccgctttagctcactatgtgtatgatttccttgagaacaaagcctacagtaaaggaaaaggggattttgctcgcaagatggacacttttgtaaatccacttcgcaattcaatgaggaatgtttcaaatgcagttaaatcccttcctgatagcttggcagagggaatgactaaaatgtcagacaacatgggcaaaatgtcagaaagattaggtcaagacataaagcaatcattttttaaggtgcctcctttaattcctaagactgattcagaccctgaacatcgccgagtttcggctcaacttgacgataatgtggatgacaatattccacttagggtaatgctgcttctcatggatgaagtattcgacttaaaagaaagaaatcagtggttgcgaaggaatatcaaaaacctacttcaacagcttattagagctacatatggcgatactattaatagaaaaatagttgaccatgttgactggatgacttcacctgaacaagtagccgactcagtgaaacgtttcagagatgcattttggccaaatggcattttagcagaggctgttccatgcagagataaaagtattcgaatgagaacaagagtagcaggaaaaacgaaattacttgcaattatgccagatgagctgaagcacattattggggctgagacaacacggaaaggtattcttcgtgtttttgaaatgtttcagcacaaccaattaaataggagaatggtttatgtcttcttggaaggctttttagaaaccttatttccacagtataaattccgtgaacttttcaacaaactgcattcacggtcaaagcagatgcagaaatataaacagaaacttcaaactactcaagcgccttctttgcagaaaaggtgacactccactctatgaagctggtgttcattttgtccaggactaatggtatggacagatcttctggggcttaactcaaatactgttgtgtctgcaccagtcttttagtgtctcaaaatagattattaatacatccataagtctgtggttcttctcattctcatctataatccaccactaccaagagagatttctgtgtcttaaatgatttggtgcatattttgcaacattgagagaaaactgcccccatctcaagcaagaatggcgttggtttcttccatttcaaactaatcagcattctccagcaatgacaaagtgccagagtgtatatatgaaagctaaggaaagcacaaaacaatggttcagagataaattggctaatttgtttaacagttggagactgtgcaatgtacgacttggaggagtttgtttggcataatgattttgtaggtctgtcagcattttgatatattgtggattagccaggtgaatgatccttgaaacatctctttcaggtctggagaaagagacagaatgcccttaaagtgtgaaataaccttatacctgaattacagttttgtgatataaaataaagctgagtataaaataaaaccaatcaaacacagaatttgattggatttgttattcattggtatacaacaatttttattcttatgtgtgctttaagggctgtgttttgctcttagggtactcaattttatgtttccttttggcattctttgtgcaaaaagaagcatgtggtggctctcatttaaatttcaaaattattagttttatctttaacagattactgattatacagaagatataatttattggaagaactgccaaatacattttgtccttctaaaaatatggaaatttaaatagtagtctggaaagttaccatatgataatttttaattgtgtgatctagacatgccttaggtaactgcagaaatagcaaattaaatgattaatgagcttattagtcatagtaaacatacagattcctaattctatgacagtgtacatatatgaaaataaatgatgaaaaaagaactataatatttttaaaaatatgcttttatttatatttcacataatgtaaagttctacaaaataaagctagtaggcaagacccctcagtgtatacctttaaacccataaattaattttatatcaataaaataaaatactttctctagttttggagcttctgtatttcctatagttttctgactgtccattttatccatcttagaagtattcacatcccttctatgcaggatttctgcatagttttaaatactttcattgcctaagggtttgggtgtgtcagctttttttgttttaaaaatatttaacactaaaaccttaaaataatgaagctacttatcagaccactgagccaagatcctggtattaaaagaaagtctgggtgcttaagataaagggacagagtattggtatcccagttatttgggagctttaagattggaacaagatatcactgtcttgttttcacttagatcctacttacaaagtgagggttattaacagaataaagccttcctttaaagctttataataatcatatttattaataatgctgttgtgcatacttatagtatgcatatattcagcatatgttgcatgtcttcagaattacataaaatgaaatccctttcattgcaacttgcaagtgagaaaagatccttagtggctctggtggaagaaatagtatttcttcttctcagggtgtctccctgccttggcccctccctgagccccaggctttaaaagtgaaaatgtttgaaacatgaaacatgtctgtaggaagcatcagcatggccataagtgcagtgattttcatatatgcctctgcccatttcaaatatatttttgacatgaataaatctaacagtatacagaataattcatgtaagaccctaacgtgtacatgtgaaaaagcatttctatataatgtgaggagcactggccatcaattaggga

SEQ ID NO: 13638 - DNA, 7732 bp, Homo sapiens
gcggccgcggcgggagcggcggcgcactcggggggaagcaggccccactagacgggccgcgccgacgggctccgcgcactcgcagcccggggcgcccccacccccagcgcccgccgccgcgggcagggccggcccggagcgcggggggcggccggggagcgcgagccgggggcgcccgccgaagctcgctgctccgggtcggggtccgggcccggggccggccgcgcgccgcctttgacgcatcggagcgcggctcctgcaggatggagggctccgcgccgccagcggagttgtttgtgcgcaggcggctcgcggggctgggagcgctcaaggtctgaacttccctccggagccgcagctggaggaggcgagcgcgcgaggaggagaagccgcgcggcgcggaggccaccctcggggcgagaggcgcggaaggcgagcgagcaaagcggtcccggagccacggcggccacgcggcggggacccccgggcgttctaggtactggtgaccccggccggggcaggccccgggactcgacaacatggcttccccaccccaccagcagctgctgcatcaccacagcaccgaggtgagctgcgactccagcggggacagcaacagcgtgcgcgtcaagatcaaccccaagcagctgtcctccaacagccaccccaagcactgcaaatacagcatctcctctagctgcagcagctctggggactccgggggcgtcccccggcgagtgggcggcggaggccggctgcgcaggcagaagaagctgccccagctgttcgagagggcctccagccgctggtgggaccccaagttcgactcggtgaacctggaggaggcctgcctggagcgctgcttcccgcagacccagcgccggttccggtatgcgctcttctacatcggcttcgcctgccttctgtggagcatctattttgcggtccacatgagatccagactgatcgtcatggtcgcccccgcgctgtgcttcctcctggtgtgtgtgggcttctttctgtttaccttcaccaagctgtacgcccggcattacgcgtggacctcgctggctctcaccctgctggtgttcgccctgaccctggctgcgcagttccaggtcttgacgcctgtctcaggacgcggcgacagctccaaccttacggccacagcccggcccacagatacttgcttatctcaagtggggagcttctccatgtgcatcgaagtgctctttttgctctataccgtcatgcacttacctttgtacctgagtttgtgtctgggggtggcctactctgtccttttcgagacctttggctaccatttccgggatgaagcctgcttcccctcgcccggagccggggccctgcactgggagctgctgagcagggggctgctccacggctgcatccacgccatcggggtccacctgttcgtcatgtcccaggtgaggtccaggagcaccttcctcaaggtggggcaatccattatgcacgggaaggacctggaagtggaaaaagccctcaaagagaggatgattcattccgtgatgccaagaatcatagccgatgacttaatgaagcagggagatgaggagagtgagaattctgtcaagaggcatgccacctcgagccccaagaacaggaagaaaaagtcttccatccaaaaagctcctatagccttccgcccttttaagatgcagcagatcgaagaagtcagtattttatttgcagatatcgtgggcttcaccaagatgagtgccaacaagtctgcccacgccctggtgggtctcctgaacgatctgttcggtcgcttcgaccgcctgtgtgaggagaccaagtgtgagaaaatcagcaccctgggagactgttactactgcgtggcgggctgtcccgagccccgggccgaccatgcctactgctgcatcgagatgggcctgggcatgatcaaggccatcgagcagttctgccaggagaagaaggagatggtgaacatgagagtcggggtgcacacgggcaccgtcctttgcggcatcctgggcatgaggaggtttaaatttgacgtgtggtccaacgatgtgaacctggccaatctcatggagcagctgggagtggccggcaaagttcacatttctgaggccaccgcaaaatacttagatgaccggtacgaaatggaagatgggaaagttattgaacggctgggccagagcgtggttgctgaccagttgaaaggtttgaagacatacctgatatcgggtcagagagccaaggagtctcgctgcagctgtgcagaggccttgctttctggctttgaggtcattgacggctcacaggtgtcctcaggccctaggggacaggggacagcgtcatcagggaatgtcagtgacttggcgcagactgtcaaaacctttgataaccttaagacctgcccttcgtgcggaatcacatttgctcccaaatctgaagccggcgccgagggaggagcacctcaaaacggctgccaagacgagcataaaaacagcaccaaggcttctggaggacctaatcccaaaactcagaacgggctcctcagccctccccaagaggagaagctcaccaacagtcagacttctctgtgtgagatcttgcaggagaagggaaggtgggcaggggtgagcctggaccagtcggctctccttccgctgaggttcaagaacatccgggagaaaacggacgcccactttgtggacgttatcaaagaagacagcctgatgaaagattacttttttaagccgcccattaatcagttcagcctgaacttcctggatcaggagctggagcgatcctacaggaccagctatcaggaagaggtcataaagaactcccccgtgaagacgtttgctagtcccaccttcagctccctcctggatgtgtttctgtcgaccacagtgtttctgacgctgtccaccacctgcttcctgaagtacgaggcggccaccgtgcctcccccgcccgccgccctggcggtcttcagtgcagccctgctgctggaggtgctgtccctcgcggtgtccatcaggatggtgttcttcctggaggacgtcatggcctgcaccaagcgcctgctggagtggatcgccggctggctaccacgtcactgcatcggggccatcctggtgtcgcttcccgcactggccgtctactcccatgtcacctccgaatatgagaccaacatacacttcccagtgttcacaggctcggccgcgctgattgccgtcgtgcactactgtaacttctgccagctcagctcctggatgaggtcctccctcgccaccgtcgtgggggccgggccgctgctcctgctctacgtctccctgtgcccagacagttctgtattaacttcgccccttgacgcagtacagaatttcagttccgagaggaacccgtgcaatagttcggtgccgcgtgacctccggcggcccgccagcctcatcggccaggaggtggttctcgtcttctttctcctgctcttgttggtctggttcctgaatcgcgaatttgaagtcagctaccgcctccactaccacggagacgtggaagcggatcttcaccgcaccaagatccagagcatgcgggaccaggcagactggctgctgaggaacatcatcccctaccacgtggctgagcagctgaaggtgtcccagacctactccaagaaccatgacagcggaggggtgatcttcgccagcatcgtcaacttcagcgagttctacgaggagaactacgagggcggcaaggagtgctaccgggtcctcaacgagctcatcggggactttgacgagctcctaagcaagccggactacagcagcatcgagaagatcaagaccatcggagccacgtacatggcggcgtcagggctgaacaccgcgcaggcccaggacggcagccacccgcaggagcacctgcagatcctgttcgagttcgccaaggagatgatgcgcgtggtggacgacttcaacaacaacatgctgtggttcaacttcaagctccgcgtcggcttcaaccatgggcccctcacggccggggtcatcggcaccaccaagctgctgtacgacatctggggagacaccgtcaacatcgccagcaggatggacaccaccggcgtggagtgccgcatccaggtgagcgaagagagctaccgcgtcttgagcaagatgggctatgacttcgactacagagggaccgtgaatgtcaaggggaaaggccagatgaagacctacctgtacccaaagtgcacggatcacagggtcatcccacagcaccagctgtccatctccccagacatccgcgtccaggtggatggcagcatcggacggtctcccacagacgagattgccaacctggtgccttctgtccagtatgtggacaagacatctctgggttctgacagcagcacgcaggccaaggatgcccacctgtcccccaagagaccgtggaaggagcccgtcaaagccgaagaaaggggtcgatttggcaaagccatagagaaagacgactgtgacgaaacaggaatagaagaagccaacgaactcaccaagctcaacgtttcaaagagtgtgtgaggcggcgcccacccgctgcccgaggtgctctgtttgtcgaaacacagtaatatttgtatttggctgttgtgctttccaagcgccacagttgccctccccggacgtggtgttatgtggtcatttcagccctaacttctgtgtggatcacagttattcagggttcattttcatccattcttccctttcgctcccttccctggaaaccccgctgcctctgggtcatccgttcagcacgtggtggagaacaagtgccttcagggctggcctcggcctcgagtctcgggacagaggccgccagtggagatcatggctttgggtattatttgacttttagaacaaaagctgtggttaagatctcatttttattgctttttcccacgtcccacgagacactattttcggttctctggctaataccctgtttttgagtttattttgtttctgtctatgtcacagtgttcctctacgacccgacctctctatgtaagcacacatgcgcacacacacttgcattcatgaatctgatataaagtgccagtaatccgccaagagggggtgcgaagggggcatgtcacgacagctccgccaccccccattgcccacccgcactttcccgagcaccgcgccccgtgggctgtgggtgagccgcgctccctgcactgagcgggtttaggggctcgcccacatgcatgcaggccaagacagcaaatgccagccgggcacgacgcccgtgtgcccaggcctcgggggtctcagagccgcctctcacccccgaccctccacccaggggtctccccatcgggagtggaggtgttggtcctggaagctgactcatcggagagggaaataccaaataaacatccgaggttgcatttatttatttatttatttacccggaagcatgtgcgctcccgggaggggtgctgggtcctcagggtggggggtcatagccacaggggagggcagttcccaggaaggtaaccagatgtctcttttgtgttttggccacctggggccgcccccaacctccccaccccaagaggggtctgagtgggacctcaaagcatggccagtgcaattctgaggctaggggaataggagaagcccaccagctgcccctgccacccacgggggctcctccctgccggggtccagctcagaaccacgggggtctgtgccggcagcaccggtgccatcttggcttccacaaattccagaagtttcttggctgcctcccgctctcagatggcacagggcctatcagtggcaggatttaatctggggagcaaattccagctctgaaatggagttctcacaccgtatctagggacagaggcatctggatgcaaacgcggggtttgttaggggcggaatcccgagggtggtgtgggggagctccgtccgggcagttggctgctggtcctgtctgattatgttttgccatattgagtctgaagtttgtgtggaagtgagctcgcccgagttgtccggtcggagttgtagccagtctttcaggggaccccgggacgctgatgaggcccagggtgcactccttgtcagtcttgcccgttgtccctgtgcattttgctttccgctgtcaaatctcactgtctcgttttcacaccgcatcagtccccatcatcactactcctccccagagacatacagattgccctccccggcatgaagaagtcacaattctgacccgccacctctccaggggcggtgcctgggatggccacccatcaggacagccagagccagggtcccggcgtcctgagagtccagggcacctccccccattagctgtaaggtttcctgtcaggtgtgactgtcagtttgctggtcttccaataccgaagaaagggtggttgtgacaatacctcttgcttctaaagaatgtattataaaacaccgcagatttttttttttccttaaaaaacactacctgatgctttccttgttcgtggggattgtggtcacatgaagctctttctgcatcagtattaaggtgtatatttgaatgtcctcccctcccctttcccctccaggctgtgtagctttgaggggctgggcgtttgctcacgaccttgctgtctcgctcagaacatgctccgcaaagttctccgcacacacttcttccccatcaagcccatttccttccccaaccacaaaggtgtttgtgattcctcaccccgggaaaccaaggagctgcaaagtggagtctggttcagccccgtgcagactcacccagagcttaacgttgtctttcaaacaccctgagccttcctaaacagccagtgcagacgttctctctgggccacgaagcccctcgggtcctccccgtcccctgctccgatgcatacctcagtgcagaaccacagaatctctgcagcggaaacgccgtgcatctcttgtctgttggcagcgagcacatcgtgctggagacacgagtttctaagcagctggcacgagggctgctgacggcatgggtcgtgcttcagggtggcaatacctcttaggaacttagggcaggaagcaatacttcagcattgaatgtgtgtaaatagttgctttgagttgcaattgctattttcttctcagtcccagctcagatcgaattatatatccatatatatatatatatatatatatatatatatatatatatatatatggtaaacaagcacacacaattttatccaatgcaaacaaatgtagagcatcagttacaaaaccctcgaatagcttgagagccccacaggctctgccacacccgtgacttcatccacactgacgtcacccgcgggggctccccctgcacatttgcacacgatccggagagccgaaggccgcgtgcttcctgtcacatgggctgtaatcatttgtagtttccaaagacacgtctgcatttgaatttctagattttcgaggtaaggagttttttttaattggttgtttggaaaatcacatcatgcctagaatctgaaattgaattagcaagaaccgactgtttgcattttccatatatccttttatctgctctttttaaattgttaattctaataatttcaaaatgcattcactgaagaaatggacattaaaatattctaaaatttaaataaaaaaaa

SEQ ID NO: 13639 - DNA, 2813 bp, Homo sapiens
cggggctcgaggctgctggagtcgctcgctgactcgccctgcgccctcgccgcggacaccggagctgcggccgctccccgctgtcccccagagatggcagatcctgaggtagttgtgagtagctgcagctctcatgaagaggaaaatcgctgcaattttaaccagcaaacatctccatctgaggagcttctattagaagaccagatgaggcgaaaactcaaattttttttcatgaatccctgtgagaagttctgggctcgaggtagaaaaccatggaaacttgccatacaaattctaaaaattgcaatggtgactatccagctggtcttatttgggctaagtaaccagatggtggtagctttcaaggaagagaatactatagcattcaaacaccttttcctaaaaggatatatggaccgaatggatgacacatatgcagtgtacacacaaagtgacgtgtatgatcagttaatcttcgcagtaaaccagtacttgcagctatacaatgtctccgttgggaatcatgcttatgagaacaaaggtaccaagcaatctgctatggcaatctgtcagcacttctacaagcgaggaaacatctaccctggaaatgatacctttgacatcgatccagaaattgaaactgagtgtttctttgtggagccagatgaaccttttcacattgggacaccagcagaaaataaactgaacttaacactggacttccacagactcctaacagtggagcttcagtttaaactgaaagccattaatctgcagacagttcgtcatcaagaactccctgactgttatgactttactctgactataacatttgacaacaaggcccatagtggaagaattaaaataagtttagataatgacatttccatcagagaatgtaaagactggcatgtatctggatcaattcagaagaacactcattacatgatgatctttgatgcctttgtcattctgacttgcttggtttcattaatcctctgcattagatctgtgattagaggacttcagcttcagcaggagtttgtcaattttttcctcctccattataagaaggaagtttctgtttctgatcaaatggaatttgtcaatggatggtacattatgattattattagtgacatattgacaatcattggatcaattctaaaaatggaaatccaagctaagagtctaactagttatgatgtctgtagcatacttcttgggacttctaccatgctcgtgtggcttggagtcatccgatacctcggtttctttgcaaagtacaacctcctcattttgacccttcaggcagcgctgcccaatgtcatcaggttctgctgctgtgcagctatgatttacttaggttactgcttctgtggatggatcgtgctggggccttaccatgacaagtttcgttctctgaacatggtctctgagtgccttttctctctgataaatggagatgatatgtttgccacgtttgcaaaaatgcagcaaaaaagttacttagtctggctgtttagtagaatttacctctactcattcatcagcctctttatatatatgattttaagtcttttcattgcactgatcactgatacatacgaaacaattaagcaataccaacaagatggcttcccagagactgaacttcgtacatttatatcagaatgcaaagatctacccaactctggaaaatacagattagaagatgaccctccagtatctttattctgctgttgtaaaaagtagctatcaggtttatctgtactttagaggaaaatataatgtgtagctgagttggaacactgtggatattctgagatcagatgtagtatgtttgaagactgttattttgagctaattgagacctataattcaccaataactgtttatatttttaaaagcaatatttaatgtctttgcaactttatgctgggattgtttttaaaaaaactttaatgaggaaagctattggattattattatttcttgtttattttgccatggctttagaatgtattctgtatgcctctcttttgctctgatactgttgctcctgctattctgattgtgcagactgtgtaattagtggaaaacaatccttggtctgactgtgactttggacaactcagtaaccctggcttggaccactctcaggagtccatccttgagagagtgggtgtagttatcatttatacagtaatcattgcattttaaaatcttctcttgaaaggaagaataagagtgcaccagaataagagcgcaccagaataagagcgcaccagctaacaatgtgatacggccatatgtcacttaaggatggagatatgttctgagaaatgtgtcattaggcgattttgtcattaaacatcatagcatgtacttccacaaacctagatggtatagcctactacacacctaggctatttggtatagcctgttggtcctggggtacaaatctgtacaacatgttactgtattgaatacagtaggcaattgtaacacaatggtaagtatctaaacatagaaaagggacagtaaaaatatggttttataatcttctgggaccaccattgtatatgcggtacatcattgaccaaaacatcgttatccagcatatgactgtatttggttatgaaagccaactgttacttgattctgcttttagttcttaagaggatcaggcttttaaatactcatttacaagttttctatcctccttcagtgttaaagtagaaagtaaaaagagtatcttatacatgcatgaaattaaagcatataccaaatgcaaaaaaaaaaaaaaaaaa

SEQ ID NO: 13640 - DNA, 6181 bp, Homo sapiens
atggcccagccttttccacccaaagacctgttactgaattttgtctccatgtgtctgaagggtacttccccatcatcattttcattcatcctaagaaaggcggctccctgtgtggaggtggtggccgcgaacattttggctgaactgagcagtcaaccttctcatttttgctggaaggatttgagagaatatgggggagatggtacacgagccagtggaggattagtggggttttatgttgttgtgatgaactttatgatcaacgcccccatcgagcttgctttgcttacgcaaggcctcagcctttgcctcttccccaaacccaagctacctgaggaggaggagctgagtgagggggagggaccaacagatttgtcccctgtgcaggctgcctgcctgcttgagttacatccacaaatgcctcggaagcagccagctggctgcatctttctcctcacattcctgggtctgtctgggctggttggcacagttaccagaacgtactacattgggattgtggaagaatactggaactatgtaccccaagggaagaatgttattactgggaaaagtttcacagaagacaaacttgcaaccttatttctcgaaagagggcccaacaggataggcagtatttacaaaaaggctgtttacagacgcttcacggatggaacctactccatagagatccccaaacctccctggcttggattcctgggccccatcttgagggccgaagtgggtgatgtgattgtcattcatttaaagaactttgcttctcgaccttactctctgcatccacatggcgttttctacaacaaagattcagaaggagccctatacccagatggaacatctggaaggaacaaaaatgatgacatggttcctcctgggaaaaactacacctacgtctggccggtgagagaagaatatgcacctactccagccgatgccaactgcctgacctgggtgtaccattcgcacatcgacgccccaaaggacatctgctctgggctaattgggcccctgctggtctgcaaggaaggtatcctgaatagatattcagggacacggaatgatgtggatcgagagtttgttataatgtttactcttgtggatgagaatcaaagctggtacctcaatgaaaatatcaaacatttctgcaccaaccctgattcagttgacaagaaagatgctgttttccagaggagtaacaaaatgcatgccctcaatggatacctcttcggaaacttcccggagcctgatatgtgtgttggagaatctgtgtcctggcacctatttggaatggggaatgaaatagacatccattctatctatttctatggtaacaccttcatcagcagagggcatcggactgatgtcgtcaacctgttcccagccaccttccttacaacagaaatgatagccgagaatcctgggaagtggatgataacctgccaggtcagcgaccacctacaagctggtatgctggggcaatacaatgttgataactgcaaaagtgatattttctaccccaagatgaagggtcaacagaggcgctactttatagcagctgaaaaaattctttgggattatgctcctcaaggttcatataatggtgactctgatctctacttcacacaaggggacaacagaataggaggaaaatactggaaggttcggtatactgaatttgttgatgcaacttttactaaaagaaagagactctctgctgaagaagcccatcttggaattcttggcccagtcatcaaggcagaggtgggtgataccctgttagtgacctttgccaacaaagccgacaaggtctatagcattttaccccatggtgtgatctatgacaaggcatctgatgcagccccaaacctagatggatttgtgaaaccaggggcgcatgttaaaccaggtgaaaccttcacatacaagtggacagtgcctgagagcgtaagcccaactgctggtgatcctccctgtctgacctatctttacttctcagcagttgatccaattaaggacaccagctctggcctggtagggcctttgctagtctgtaaaaagggcgtcctcaatgctgatgggacacagaaaggaatagacaaggagttttacctactgttcacagtctttgatgagaatctgagcagatattttgatgaaaacattcagaagtttatctggcatcccttcagcattgacaaagaagataaagagtttgtgaaatccaaccgaatgcatgctgttaacggctacatgtatggcaaccagccaggcttaaacatgtgtaaaagggatagagtttcctggcatctgattggattgggcactgacactgacatgcatggaattgtttttcaagggaacaccatccacctacgagggactcaccgagactccctggccctgtttccccacatggccacaacagcattcatgcagccagaccatgcaggtatttttagggtgttttgtgccaccatgccccacctctcgagaggcatgggtcagatctatgaggtcagcagctgtgacaacagggacccttctgagcagcggtacgggatgataagaactttttacatcgccgctgaagaagtagaatgggattatgcccctaacaaaaactgggagttcgaaaagcagcacgtggacgcaagaggggaaagacatggagatatatttatgaaccgcactgaaaattggattggctctcagtacaagaaggtggtttacagggaatatacggatggagaatttgtggagatcaaagcccgaccaccacgagaggagcacttagaactcctgggcccaatgattcatgctgaggtgggcaacaccgtcctgatcatatttaagaacaaagccagtaggccctactccatctcagcccagggtgtggaggagatggatagtggaaagcaattccaagtgcccatgacaaaaccaggagaagtaaaaacttatagatggaatatccctaaaagatccggtccagggccttctgatcccaattgtattccatgggtttactattcaacagtaaactttgtgaaggatacgtatagtggtttgatgggtcctctgattacatgccgaaaaggagtcttgaatgaaaagggaagaagaagtgacgttgattatgaatttgctctcttgtttttggtatttaatgagaatgaatcctggtatctggatgacaatattaagaagtatctcaacaaagatccacgagattttaagcgcactgatgattttgaggaaagcaacagaatgcatgccattaatggaaagatttttgggaatctccatggcctcataatgaacgaagatacaatgacaaactggtatttgttagggataggaagtgaagtggacatacataccatccattatcatgctgagagctttcttttcaaaatagataaatcttaccgagaagatgtgtatgatctctttcctgggacattccaaaccattgaactgtttgcagatcacccagggacatggctgctacactgtcatgtgtctgaccacatccatgctggcatggagacaacctacacggtccttcgtaacatagacaacaggattccttactccaccacatctcctggagtggcatctcacccagccacggtgccatctaacgaacgacctggcaaagagcagctctatttctttggcaagaatctgggtccaacaggagccaaggcagccttggtcatccttttcatcattggactcctccttctaatcaccacggtgattctctccctcagactctgctctgcaatgaagcagacagattaccagcaagtccagtcctgtgctctccccacggatgctctgtgaaccatctggtctccctcaacaggaaagggtgatgtcccacagctggccagatggcagccaacagggaaactggaccaaggcatcactcaccaaggaaggttgacactgtatcctggatcagccttctgatcctctcaaacatcatccaaagcaatttgcttttatttatttatttttaaatgggctgcgaataatcctcaggtataaaacacagaaaaaggagaatgggcatggctgagaatgtcaactcttagtctattctttggttggattcactgaataggagacactctgaaagatatctttatattccatcttttataattcttgaacagtgctttcttagctaaccaccaaagtttctaggtgaacagcttctagaaaaagttagagtgcctcagacatttaactggaagggcactactttttcaacattgttgcataacatgcatcccttggttctgtggaaaatatctttcttaggagttcttggcaatgtctaagtcagtgtctgctgatagaattagaccaaataaattttttggaggctttaaccagctctcctggccttttcctctttgatataaatagcctgtgcagtgcttgttttaaaaagcaaagttatacgttttttaaaaaattgctgctgtttttattcaaacctgtagaaatacttgaatgtttacaactcacttcatgttacatgtttttacaatatgtttctgtggcaatgtttgtactttcaaaaatcaagtagagaaattgtatttctactgcagactgtgggagggctgaaatctgtaaaagaacatgttaggctctccctttatgaatcagggactccctgagagtttagagcaagctttctatcagggagggaagctttgcaggaggcaagtctgggcttgaatttggagtctgatttttcattcagttagagggaatctttacaagtcctcatcttctatgaaattataacattctcattgtatgagaaacatcaggaggaatttatcaatgtaggtgactagataggagaagggacctctaaatatcctagattctatggcttttaaagacatacctcttcatggaaggagaaaaaaggaaaaggaaaggtgagaaaaagataatcttggtggcagattctcttaaaccattaaaccagctttgaaaattaataaataatttccaaggttcaaatgcaaaaaaattattgaacaactaaactcaacccattatgaggcaatctacactgtccatacctatgcttagacagtaggtgtaagattgataaaagtaacattgtttattacaagactgagaaattgcttttagctctgggcgagatgccctgagattccaatgccaatgctagatgagtgatactggtatgcctgccttagcagtgggtaatttgaatgtcaaagtgagtgacaaggacctaagaaatattctggtggagggacctttcacactgtctcatcttcatcttcatgaggggaaatgggtaattggatagaagctatagtcttaacataaaaggggatgcaaatgctaatagttctgttcatagtttgcttgaatgtcatatcaaacagcatacacaaaagattttgaatttcaatctgctaaccattgacaatgtgatttcatagtacatgttctacagttttcatacatgtgtaggctgcataatttcataattatggtaaatgccttatttattacccaccttagtaagacaagttgttcagttgtttttttttcttttcagtttatttttttaatgaaaacaaaaccacaaagtagtttgattgcatcatttatcattttaataaagtgtcacataaggtggctatttgcatggttattttcacttaaaattatctatcactgaactaggggaggtggttaaagtggaattaatttttagatatttaggggctatgactatgccaatgacacttgttagaggaaatgaaacaaaatagtgtatctccacaaataatatgacttctcaaacattgtttcctcaaacataactacactccttgttctcagcctcactcttgagaaaatcaactctgccttcacttacacacatatttcttcctattacaatacacgtgtccctgctcctagcaggacagtctcttcatttgactttgggtctcattgcttcttgctttctcaagacttcattcccttgggtatccatttttcctcctgcatctttctatgaaaccatcagcaatgtccgccattaaaaacagaaagcaatgtgctgtcttatttaactctataaccccct

SEQ ID NO: 13641 - DNA, 5565 bp, Homo sapiens
gcccctcgctgttctgccctttgtcttccacgcctgccccttcaactcctcttgccctgcaaaccctgggtcgccacctccacatcccttccacttctacctgcctgccttggcctgcattttattttcaaccaaggttgaaatggtagccccacgcaaaatccgatggtgtgtggaggaactgcccagtcattgcagtctgcacgccttcttaagtgccagatgcgagcaaggccgaccaggaactgccgatgggcttcacctgtcagactggactgccacctgccacacattcattgaactttcaataagcactgccgctgtgcttggcgttttgctgggctccagaaataaaaaattcagagaggccaaagttcttcagggatgcagacaggtgatagaaccatcatttattgagcacttgctaagtgctaaatactcttacctgcgttatcttgtgtaatcctcacaaccacactcaacgacggcctattgaatgctctctaggtgtctggcagtgttccaaacagtttatgtgtattactttgtttgatcttcccaaccaccaatgagcggatattcaactcctttgtttacactgagaaaatctcaaatggagaaagtgaagtacagcagctagccaaaaaaatccgagagaagttcaaccgttacttggatgtggtcaatcggaacaagcaagttgtagaagcatcctatacggctcacctaacctctcccctaactgcaattcaagactgctgtactatcccaccttccatgatggaattcgatgggaactttaataccaatgtgtctagaacaattagttgtgatcgactttctactactgttaatagccgggccttcaatccaggacgagacttaaattcagttcttgcagacaacctgaaatccaaccctggaattaagtggcaatatttcagttcagaagaaggaattttcactgttttcccagcacacaagttccggtgtaagggcagctacgaacaccgcagtagatttctgtgttaactgtggcagataccgtccggacttgctcactagaccagtgctataagaccttcttgtctccagccaccagtgagacaaaaaggaaaatgtccacctttgttagcagcgtgaagtcttcagacagtcctacccagcacgcagtgggattccaaaaggcatttcagctgattcgaagtacaaacaataacacaaagttccaagcaaatacagacatggtcatcatttacctgtcagctggcattacatcaaaggactcttcggaagaagataaaaaagcgactctccaagtcatcaatgaagaaaatagctttctaaacaactctgtaatgattctcacctatgccctcatgaacgatggggtgactggtttgaaagagctggcttttctgagggatctagctgaacagaattcagggaagtacggtgtgccagaccggacggccttgcctgtgattaagggcagcatgatggtgctgaatcagttgagcaacctggagaccacagtgggcaggttctacacaaaccttcccaaccggatgattgatgaagccgtcttcagcctgcccttctctgatgagatgggagatggtttgataatgactgtgagtaaaccctgttattttggaaacctacttctgggaattgtaggtgtggacgtgaatctggcttacattcttgaagacgtgacgtattaccaagactctttggcttcctatacttttctcatagacgacaaaggatatacacttatgcacccatctcttaccaggccatatttattgtcagagcccccacttcatactgacatcatacattatgaaaatattccaaaatttgaattagttcggcaaaatatcctaagcctccctctgggcagccagattatcgcagtccctgtgaactcatccctgtcttggcacataaacaagctgagagaaactggaaaggaagcctacaatgttagctatgcctggaagatggtacaagacacttcctttattctgtgtattgtggtgatacaaccagaaatacctgtgaaacaactgaagaacctcaacactgttcccagcagcaagctgctgtaccaccggctggatctccttggccagcccagtgcttgcctccacttcaaacagctggcaaccctagaaagtcccaccatcatgctgtctgctggcagcttttcctccccctatgagcacctcagccagccagagacaaagcgcatggtagagcactacaccgcctatctcagcgacaacacccgcctcattgctaacccgggcctcaaattctctgtcagaaatgaagtaatggctaccagccacgtcacagatgaatggatgacacaaatggaaatgagtagcctgaacacttacattgtccgccgttacatagcaacacccaatggcgtcctcagaatttatcctggttccctcatggacaaagcatttgatcccactaggagacaatggtatctccatgcagtagctaatccagggttgatttctttgactggtccttacttagatgttggaggagccggttatgttgtgacaatcagtcacacaattcattcatccagtacacagctgtcttctgggcacactgtggctgtgatgggcattgacttcacactcagatacttctacaaagttctgatggacctattacctgtctgtaaccaagatggtggcaacaaaataaggtgcttcataatggaggacaggggttatctggtggcgcacccgactctcatcgaccccaaaggacatgcacctgtggagcagcagcacatcacccacaaggagcccctggtagcaaatgatatcctcaaccaccccaactttgtaaagaaaaacctgtgcaacagcttcagtgacagaacggtccagaggttttataaattcaacaccagccttgcgggggatttgacgaaccttgtgcatggcagccactgttccaaatacagattagcaaggatcccaggaaccaacgcgtttgttggcattgtcaacgaaacctgcgactctcttgccttctgtgcctgcagcatggtggaccgactctgtctcaactgtcaccgaatggaacaaaatgaatgtgaatgtccttgtgagtgccctctagaggtcaatgagtgcactggcaacctcaccaatgcagagaaccgaaaccccagctgcgaggtccacctggagccggtgacatacacagctattgaccctggcctgcaagatgctcttcaccagtgtgtcaacagcaggtgcagtcagaggctggaaagtggggactgttttggggtgctggattgtgaatggtgcatggtggacagtgatggaaagactcacctggacaaaccctactgtgccccccagaaagaatgcttcggggggattgtgggagccaaaagtccctacgttgatgacatgggagcaataggtgatgaggtgatcacattaaacatgattaaaagcgcccctgtgggtcctgtggctggagggatcatgggatgcatcatggtcttggtcctggcggtgtatgcctaccgccaccagattcatcgccggagccatcagcatatgtctcctcttgctgcccaagaaatgtcagtgcgtatgtccaacctggagaatgacagagatgaaagggacgacgacagccacgaagacagaggcatcatcagcaacactcggtttatagctgcggtcatcgaacgacatgcacacagtccagaaagaaggcgccgctactggggtcgatcaggaacagaaagtgatcatggttacagcaccatgagcccacaggaggacagtgaaaatcctccatgcaacaatgaccccttgtcagccggggtcgatgtgggaaaccatgatgaggacttagacctggataccccccctcagactgctgccctactaagtcacaagttccaccactaccggtcacaccaccctacacttcatcatagccaccacttacaggcggccgtcacggtacacactgtcgatgcagaatgctaacaatctcctcacctccacgccaagatgagatctgggagccacagaatgttctggaaagaaaaagaaccggcttaaaacccacagcaagagacctcccttgtgtttgtgctttgtgcagagttgtttgagtcatttcctgcctgtcgacatggttaaaaacgagagaaacaacaacacagtcacatttgtgaagatgtgaggctggttctgaaatggaggggaaataagcctgatgaacagacctgccataacactaatggaaggtaacagaaggcgaacctccaaacacagagacggaacctgcaagtgaagctgagccagaggaatgttccaaagagccagaagcattcagctctccttaactggaagagagaaaaatctgctcacccagagactggaatgtggcacatgcagatacaaatgtgtgcattgaagatttcgctttgtttcttagcggtacctggataccacagttgctgtatggaactcatgttatgctctaaacgatgcatctcagaatttctaagtaaaggattatttttctactatttattgaactttcaaacattctcaaactttggggaaaaggaaaggaaacacaggagaagttttcagcagttgccccgagctgttttgtgtgtaatgaagtggttctttgattaaggagctctatttcttatttaactgatatcccactgccccactccacaaaataggaaaatgaagaaatctttctctctgacttgtttacatcatttcacggaaacacatctttgtttgtaatgcagtattctttctctgtgtttgacagagatggggaggggcagaggaatttaagaggttttaaaagaaatgttatgtttcttatgacttgtttccactcctcgtacaatgctattcttaggtttctacgaaacctaatgttagaaccgcatcctttcagctaagggagggttggatttattttccttgttttagagactacaaatttttaaatatcccattttgactgagaatattgacatataagggaagaagttttctaaattgtgaaagtctggttcttaattaaagaattttttttttaatatcacggttaaaagctgctgccagttagccaagacattatccaccaaattgctttgtgatttatacagggattaatcaaatctggctactataacatggggcattgtaactttaaagtagtgttttaattacagtgatgtattttagactcacattttgtgattcaaatatgttataaaggcattcttgcaccatggtaaagaatgtgtgtggtaaatctccgtttatatgtagttggaaaaaattcactgaataatgttttaatgatagggtattatgatacaatgtaaaaaacaattggttcttcagcagtacagaaagtaaactatatatgtgctatcaggaaaccccttcatactgtgtataaaattgcaatctagtgaaataaactgtatgcaatggaaaaaaaaaaaaaaaaaca

SEQ ID NO: 13642 - DNA, 5218 bp, Homo sapiens
ggataacaacttacagaggccaaatgacataggatgaaggctgttcgtaacctgctgatttatatattttccacctatctcctggttatgtttggatttaatgctgcccaagacttctggtgttcaactttggtgaagggagtcatttatggatcgtattctgtaagtgaaatgtttcctaaaaactttacaaactgcacttggacgctggaaaatccagatccaaccaaatatagcatttacctgaaattttccaaaaaggaccttagctgctctaacttttcactcctggcttatcagtttgatcatttttcccatgaaaaaataaaggatcttttaagaaagaatcattctataatgcaactctgcaattccaagaatgctttcgtttttctacagtatgataaaaattttattcaaatacgtcgagtatttccaactaatttcccaggattacagaaaaaaggggaagaagatcagaaatctttttttgagtttttggtattgaacaaggtcagcccaagccagtttggttgccatgtattatgtacttggttggagagctgcttaaaatcagaaaatgggagaacagaatcatgtgggatcatgtatacaaaatgcacctgccctcagcatttgggagagtgggggatcgacgaccagtcgctgattttgttaaataacgtggtgttacccctgaatgagcagacagagggctgcctgacccaggagctgcaaaccacccaagtctgcaatcttaccagggaggccaagcgaccacccaaagaagaatttggaatgatgggagatcatacaattaaaagtcagcgacctcgatctgttcatgaaaaaagggtccctcaggaacaagctgatgctgctaaatttatggcacaaactggtgaatctggtgtggaagagtggtcccagtggagcacatgttcggttacttgtggtcaagggtcgcaggtgcgaaccagaacttgtgtatcaccttacgggacacactgcagcggcccattaagagaatcaagggtttgcaataacactgccctctgtccagtacacggagtatgggaggaatggtcaccatggagtttatgttcatttacatgtggtcgaggccaaagaacaagaacaaggtcatgcacacctcctcagtatggaggaaggccgtgtgaaggacctgaaacacatcataagccttgtaatattgctctttgcccagttgatggacagtggcaagagtggagttcgtggagccagtgctcagtaacgtgctcgaatgggactcagcagagaagccggcagtgcactgcagctgcccatggaggctccgaatgcagagggccatgggcagaaagcagagagtgctataaccctgaatgtacagccaatggtcaatggaatcagtggggtcattggagtggttgttccaagtcctgtgatggcggctgggaaaggcgaataaggacctgtcagggtgcagtgataacagggcagcaatgtgaaggaacgggcgaagaagtgagaagatgcagtgagcagcgatgccctgcaccttatgaaatatgccctgaggattatctgatgtcgatggtgtggaaaagaactccagcaggcgacttggcattcaatcaatgtcccctgaatgccacaggcaccactagcagacgctgctctctcagtcttcatggagtggccttctgggaacagccgagctttgcaagatgcatatcaaatgagtacagacacttgcagcattcaattaaagagcaccttgctaaggggcagcgaatgctggcaggtgatggaatgtcccaggtgaccaagacactgttggatttaactcagagaaaaaatttctatgcaggcgatcttctgatgtctgtggagatcctgagaaatgtgacagacacatttaaaagggcaagttacatccctgcatctgatggtgtccagaacttctttcaaatagttagcaaccttctagatgaagaaaacaaggaaaaatgggaagatgcacaacagatttatccagggtcaatagagttaatgcaggtgattgaagattttatacacattgttggaatggggatgatggactttcagaattcatacttaatgactggaaatgtagtggctagtattcagaagcttcctgcagcctctgttctaacagacatcaactttccaatgaaaggacggaagggaatggttgactgggcaagaaactcagaagatagggtagtaattccaaaaagcattttcactccggtgtcatcaaaagaattagatgaatcatctgtatttgttcttggcgcagtcctatacaaaaacttagatctaattttgcccactttgagaaattatactgtcattaattccaaaatcatcgtggtcacaataaggcctgaacccaaaacaaccgattcgtttctggagatagaactagctcatttggctaatggtactttgaatccctattgtgtattgtgggatgactccaaaacgaacgagtctttgggaacgtggtccacccagggatgtaaaactgtgcttaccgatgcatcccatacgaaatgcttatgtgatcgtctctctaccttcgccattttggctcagcaacctagagaaataatcatggaatcctctggcacaccttcagttaccctaatagtaggcagtggtctttcttgcttggccttgattaccctagcagttgtctatgcagcattatggaggtacatacgctctgagagatccataatactaattaacttctgcctgtctatcatctcatccaatatcctcatactggttggacagactcagacacataataagagtatctgcacaaccaccactgcatttttgcactttttcttcctggcttcattctgttgggttttgactgaggcgtggcaatcatatatggctgtaactggaaaaattaggacacggcttataagaaaacgctttttgtgccttggatggggtttaccagcattagtagtggccacatcagtaggcttcaccagaacaaaaggatatggcactgatcactactgctggctctctcttgaaggaggactactctatgcttttgtgggacctgcagccgctgttgtcctggtcaacatggtgattggcattttggtatttaataaacttgtttccagagatggaatcctagataaaaagctcaaacacagagccggtcagatgagtgagcctcatagcggtttgacgctcaaatgtgccaagtgtggagtagtttcaacaacagctttgtcagccaccaccgccagtaacgccatggcgtctctttggagctcctgtgtggtgttgccccttctggctttgacgtggatgtctgcggttctggccatgacagataaacgctccatattgtttcaaatactttttgctgtgtttgattcattgcaaggctttgttatagtcatggtccactgcattcttcggagagaggttcaggatgcatttagatgccgattgagaaactgtcaggatcccatcaatgcagattcttcgagttcgtttcctaatgggcatgctcaaatcatgacagactttgaaaaggatgtagacattgcctgtcgatcagttcttcataaggatattggtccttgccgagcagccacaataacaggaacactttctaggatttctctaaatgatgatgaagaagaaaagggaacaaaccctgaagggctaagctattcaacattgcctggaaatgtcatttccaaagtcatcatccagcaacccacaggtttgcacatgcccatgagtatgaatgagcttagcaatccatgtttgaaaaaagaaaatagtgaattgcggagaactgtgtacttatgtacggatgataatttgagaggggctgacatggacatagtccatcctcaagaaagaatgatggaaagtgactatattgtgatgcccagaagttctgtaaataaccagccttcaatgaaagaagaaagcaaaatgaatattggcatggaaaccttgccacatgaaaggctattgcactacaaagtaaaccctgaattcaatatgaatccccctgtaatggaccagttcaatatgaacttagagcaacatctcgcaccccaggaacatatgcagaatttgccctttgaacctcgcacagctgtgaagaatttcatggcctctgagttggatgataatgcaggactatcaagaagtgaaactggatcaacgatatcaatgagttctttagagagaagaaaatcacgatattcagaccttgactttgagaaggtcatgcatacaaggaagaggcatatggaactatttcaagaactaaatcagaaatttcaaactttggacagatttcgggatataccaaatacaagcagtatggaaaaccccgcaccaaacaagaatccatgggacactttcaaaaaccccagtgaatacccgcattacaccacaatcaatgtcttagacacagaggcaaaggatgctttggaactgaggccagcagagtgggagaagtgtctgaatttgcctctggatgtgcaagagggtgactttcaaacagaagtttaaaaaaatcaaaatggactaaggtagagacaaaactttattgcactgacacttaagacttgggaagcctgacatttctatctggacagtgtgactatcttatgtcaggaccttcatgtgccaaacgtcagtggtgttttcatatggtaacttctcactagtcaggctagtggagagatgaccaggtgtacagttctgaccatcctgtgttgtaagtacccgtggaatggatttgtaaggtaatctttatagataaacctcaagcaacgattcatgttgtaaccgcttcatatggtttagttttcaaaaaacttcaccatgaagcacaatgtatatatttatgcagtttttaaagtttataacagtctgtttggccattactacactttttactttataatataaaagcaaagtttttgtcattaaatgaatgtttgttgagctacattcttcattgctttaaatgcaataaagtaataatctcacttttatatgaataatatatttcacatctttattattgcagttttctctagaaagctctgagaagctttctctgctgcagctgtgtataaaatatttaaaatgttgtatggtgtaaataaacttttgtctacat

SEQ ID NO: 13643 - DNA, 2582 bp, Homo sapiens
gttgctgggtgtcccagggcctgaggcaggacggtactccgctgacaccttccctttcggccttgaggttcccagcctggtggccccaggacgttccggtcgcatggcagagtgctacggacgacgcctatgaagcccttagtccttctagttgcgcttttgctatggccttcgtctgtgccggcttatccgaggtctcaatccattgcgcccaggctggtatgcagtcatgttgtatctggaattggtgggttcttggtctcactgacttcaagaatgaagccgcagaccctcgtgcaccatgagtgccgaggaggatgccaggtggctccggtgggtgactcagcagtttaagaccattgcaggagaagatggggagatcagcctgcaagaattcaaagcagctctgcatgtgaaagagtccttctttgcagagcgattctttgccctatttgactccgatagaagtggcaccatcaccctccaggagctgcaggaggcactgaccctgctcatccatggcagccccatggacaaactcaaattcctcttccaggtgtatgacatcgatgtgtgtgcacggcagggggcgtctgcaggtacagagtggggtgctggggcaggcccgcactgggcttcatccccactcgggacaggcagtggctccattgacccggatgagctgcgcactgtgctgcagtcgtgtctgcgcgagagcgccatctcgctgcctgacgagaagctggaccagctgacgctggcgctcttcgaatcggccgacgcggacggcaacggggccatcaccttcgaggagctccgggacgagctgcagcgcttccccggagtcatggagaacctgaccatcagcgctgcccactggctgacggcccccgccccccgcccacgcccgcgccggccgcgccagctgacccgcgcctactggcacaaccaccgcagccagctgttctgcctggccacctatgcaggcctccacgtgctgctcttcgggctggcggccagcgcgcaccgggacctcggcgccagcgtcatggtggccaagggctgtggccagtgcctcaacttcgactgcagcttcatcgcggtgctgatgctcagacgctgcctcacctggctgcgggccacgtggctggctcaagtcctaccactggaccagaacatccagttccaccagcttatgggctacgtggtagtggggctgtccctcgtgcacactgtggctcacactgtgaactttgtactccaggctcaggcggaggccagccctttccagttctgggagctgctgctcaccacgaggcctggcattggctgggtacacggttcggcctccccgacaggtgtcgctctgctgctgctgctcctcctcatgttcatctgctccagttcctgcatccgcaggagtggccactttgaggtgttctattggactcacctgtcctacctcctcgtgtggcttctgctcatctttcatgggcccaacttctggaagtggctgctggtgcctggaatcttgtttttcctggagaaggccatcggactggcagtgtcccgcatggcagccgtgtgcatcatggaagtcaacctcctcccctccaaggtcactcatctcctcatcaagcggccccctttttttcactatagacctggtgactacttgtatctgaacatccccaccattgctcgctatgagtggcaccccttcaccatcagcagtgctcctgagcagaaagacactatctggctgcacattcggtcccaaggccagtggacaaacaggctgtatgagtccttcaaggcatcagacccactgggccgtggttctaagaggctgtcgaggagtgtgacaatgagaaagagtcaaaggtcgtccaagggctctgagatacttttggagaaacacaaattctgtaacatcaagtgctacatcgatgggccttatgggacccccacccgcaggatctttgcctctgagcatgccgtgctcatcggggcaggcatcggcatcaccccctttgcttccattctgcagagtatcatgtacaggcaccagaaaagaaagcatacttgccccagctgccagcactcctggatcgaaggtgtccaagacaacatgaagctccataaggtggactttatctggatcaacagagaccagcggtctttcgagtggtttgtgagcctgctgactaaactggagatggaccaggccgaggaggctcaatacggccgcttcctggagctgcatatgtacatgacatctgcactgggcaagaatgacatgaaggccattggcctgcagatggcccttgacctcctggccaacaaggagaagaaagactccatcacggggctgcagacgcgcacccagcctgggcggcctgactggagcaaggtgttccagaaagtggctgctgagaagaagggcaaggtgcaggtcttcttctgtggctccccagctctggccaaggtgctgaagggccattgtgagaagttcggcttcagatttttccaagagaatttctagcctcacctctccaagctctgccccaagtccacaccat

SEQ ID NO: 13644 - DNA, 5311 bp, Homo sapiens
agcataaccttcggtggcaggacaaatcaggccagcacgcagtctgccaagtcctgctcgctccctgtcaagaaaaacagctggatccatttctaatcaacacttcccaacgcaacacttctgagtctctgaaggagaccagagcttgaaactttccagacttccaacagacatcgagtgcaaaaggatatttaggttgtctttgcacaaatctggttgatttgagagataaagggggggggaaccagtgtgactttcacctaagaagtcacatgaacatatttcacatttgaactacataatgaatgatggttattgaaatagcccaaacctctaccacagagcgagggatatagctcaaggggcaaccaggcagtcgcagaaccaaggaatggatgactacaagtatcaggacaattatgggggctatgctcccagtgatggctattaccgcggcaatgagtccaacccagaagaagatgcacagagtgatgtcaccgaaggccatgatgaggaagacgagatctatgagggcgagtaccagggtatccctcacccagatgatgtcaaggccaagcaggccaagatggcgccctccagaatggacagccttcggggccagacagacctgatggctgagaggctggaagatgaggagcagttggcccaccagtacgagaccatcatggatgagtgtggccatggccgcttccagtggatcctctttttcgtcttgggtttggccctgatggccgatggggtggaagtgttcgtggtgagttttgccctgcccagtgcagagaaggacatgtgtctgtccagttccaaaaaaggaatgctagggatgatagtctacttgggaatgatggcgggcgccttcatcctgggaggcctggctgataagctgggaaggaagcgagtcctcagcatgtctctggccgtcaatgcctccttcgcctccctctcttccttcgtgcagggatatggagccttcctcttctgccgactcatctcaggcatcggtattgggggtgctctaccgattgtttttgcctatttttctgaattcttgtctcgggagaagcgaggagaacacctcagttggctgggcatcttctggatgactgggggcctgtacgcatctgccatggcctggagcatcatcccacactatggctggggcttcagcatggggaccaattaccacttccatagctggagagtgtttgtcatcgtctgtgctctgccctgcaccgtgtccatggtggccctgaagttcatgccagagagcccaaggtttctgctagagatgggcaaacatgatgaagcctggatgattctcaagcaagtccatgacaccaacatgagagctaaggggaccccagagaaagtgttcacggtttccaacatcaaaactcccaagcaaatggatgaattcattgagatccaaagttcaacaggaacctggtaccagcgctggctggtcagattcaagaccattttcaagcaggtctgggataatgccctgtactgtgtgatggggccctacagaatgaatacactgattctggccgtggtttggtttgccatggcattcagttactatggactgacagtttggtttcctgatatgatccgctattttcaagatgaagaatacaagtctaaaatgaaggtgttttttggtgagcatgtgtacggcgccacaatcaacttcacgatggaaaatcagatccaccaacatgggaaacttgtgaatgataagttcacaagaatgtactttaaacatgtactctttgaggacacattctttgacgagtgctattttgaagacgtaacatcaacagatacctacttcaaaaattgtaccattgaatcaaccatcttttacaacacagacctctacgagcacaagttcatcaactgtcggtttatcaactccaccttcctggagcagaaggagggctgccacatggacttggagcaagataatgacttcctgatttacctcgtcagcttcctgggcagcctgtctgtcttacccgggaacatcatttctgccctgctcatggatagaattggaaggctcaagatgattggtggctccatgctaatctctgcagtctgctgcttcttcctgttttttggcaacagtgagtctgcaatgatcggctggcagtgcctgttctgtgggacaagcattgcagcctggaatgctctggatgtgatcacagtggagctgtatcccaccaaccagagagcaacagccttcggcattctcaatggattatgcaaatttggcgccatcctgggaaacaccatctttgcttcttttgttgggataaccaaagtggtccccatccttctggctgctgcttctctggttgggggtggcctgattgcccttcgactgccagagactcgagaacaggtcctgatgtgaacaacctatgggaaaaggaaaggtcgagagaatcttgtccaggacactgaaatgcatccacacttcctgcctatcacggtccggaggacaccttggatagcacgggaggagaagttgactttgtgacccctagtttaggacccacttcagctgtcaatatgtttgtaactcaggtgactgatttgggggtgccctgagccacccttagaatcacagagctgcgtgtttaacttcaagtcttcccagtccaaggcagggagaggattctccagtgagtgcacacactatgcgaggagcaagcatttctctaagtcaagtgcaaggacttaacttgcgtttgaaaaggaattagagggtcagaaacacccaggttcctccagaaagctccttggagcccaacaacttaacaaatcaacttggctggaagttagagtcattatatgaagattgggcttgaagtatatatttttgcatttaaaagtatcacctatcatattttccactcgaaaattgacatagtagcattgaggatactctgatctagaaagccaagtatttgagcaacatctatagagatctacttttctcctatgtctcctaggctttccatgataattaggtaatacatttaagaaggatatttatttctgttttgctctattcaaagaaacggaatgggatagttattctgtaaactaagtttgtatataactttatttgggtttaatttccacaactggtatctgcaaatattgccagcattttagccatattttgggagaacttggtgtttgaggtcccaggaaatgaggtctgatcaaatgaaatgcaagcacaatttcttacagccatttaactttctgttgggaggatgaattaacaaactcacattgtgcagtctgcttaatccaggcacttttctttgtgcaggtgtagtgagtagttacttctctcccttacacagatgacttgtgaaactcaagctcaccatcttcagtgctggcattttactttgccactacccaaaaacaatgtgagatgtgttcagtggcctctggtactctttgcaggcaagaatcaaacaacatggggactgagggaaggatggggaagtgtagccacagttcttccaaatgtaaatactttttgtttgttctagtggtaaaatgcaaatgcaatccatatttgttaggatggtcaggtctcatgagaaatctatgctatgtgtccagagcttttgaaacagagtccattggagtgggagttagggagtgtagtggatgccaaatatgtttttcttcagtgcttaagagaactgtttcctgaagtccagctttgaacataaacaggggtgtgggttgggggaggagcttaggacaaacctctctgatgaaggtcagcaatagactgaagtcttgactgcatggaagaggaaaaacatcagaactgtctgacaatggaggggacagtgagctacgcacaactgccagcggaggtgaacttgcacctgcccaggccggatgaacatcagcctgcaagaactagttgtttgagttgatttgcagtgctctcaatgggcaagtgccacattttccctggcagagatctccaaaaatttaaaacagaataataatggctatatcgagtgttttctcagtattggagaaatgcttaggtcctatgatagcttcgggacatctttctgtaattttcctcaattaacgggttggtaggggtaaatcttatgacacctttccaccgtcgatttgagatcagttttaatggttaaaatgtttactctccttctgtcaaccctcacctttttatttacacccctccctttttttctgtacagggagagaagacatattgactctgactggacaccctgattcctccaaatatatataccactgtgtattaatctttctctcagtgttttataggagtactaacatttattgctctgtcaataatgaaaggctcgatgtaatatagctgtaatttactttccatatgaatacagtggctaggttcataaaagagaattgtgtgagtctgggattaccacatctaaaacattattctttaatgggataatacaattcattgagcagctaccacttaaaaaacttgcaggacagttagagcctgcatttctagttaagatggatcttgtaaatttaaaattggattaacattggagtgctggggtggctgcaataatttgggggctaactccatttggtttccaagatctcacttctgcattatctttatggctctttaaaccagccacctagccaatcaagggcaattcccatctcatccatcactcaggtctttgtaaagggtgcagccaagctctgcagacttttgcaggattgtctagcctgagtaccgggctacttcttaaatgccgtcactcctgctgagataaatgcgtctttaaaaatagtctctgtggcaggtcactgggggacaatgtacagcattctggccatccacttctttttcacttcatgttctaccccaagagactcccgatgtcggctgtggagggttaaagggatgaggctttcctttgtttagcaaatctgttcacagttcttgatgatgtattttatgatgcccagcttggaaatagttgctttccatagtctcaactgtattgtgtcatctcctgatgctgatttttgatcttttgttttattaaaaataattagtgaaagaggtgtgcctatctgtgaagtttgtagtacatcatcctgaggtcatgtaacaagtaaaccccaacccagcgttccctcctacgttgtgttagttcattaaaactaaataataaaaataactgtaagaaaaccttaa

SEQ ID NO: 13645 - DNA, 9281 bp, Homo sapiens
cggagctggcacagaggatcctcggccgcggcgacatcaccgcctgggcacgcgggcgctgctctggatacggcgccaccgagagaacccgccgcccgcgggtctctgtcctgcggtccgtggttgcccccacaagcgtccggcgtttcctgagggcgggcgtgtccgggccgtgcgggtcgcggggaccgagcgcggctgaggagaccgagctggggcagcgcctgccgtagcgcgggagacgacgcgggggtcttgcggagccccgcgggagcctggcccgccgtgcagagcagttttctggaactctccacctccgtctcccttggggcccagtgcggcgccgagcccccgtcgggatctgcctgagaaaagtgtcatgaaaaaagagcagaagagagacctcactgttgctgaaaggggaattttctttccccgttggcggttacttcatgatcggacgagaagtatctaggtgactgaagatattccatttttatgtttgtacacatgaagctgataaaagaagatgtgaacatgatttctctttgtcataataggctgatgagtaagtaagcctgaaaaatatttgaaatgaaggcaagaattttgaatttttaaaaaccaactaagactttgatcacttgttgaggatgtttctctctcataaatgaaagaaaaacgtattcacaagacaagaagtataaaaagttgagaggaatgacaactgagtccactcactcgaagaatgtcagtacttcatcatcttctttgggcaaacatacacaaatgcatcatacatgtgtggtgagcttatcaccagtgatggttttctgtgctagaaatgactcttaatttgaattttggagtgctttttctctttttttacaatgtgtgttccaactctttgtgttaaatagatttaagtaaaggaggtaaatgctaaattcatagtgttttttacctgtatcacttccctgtgtattatggaaaaattagagattttaacgttattcaaagttttactggaagcaaaactgtgccagggacagagatatacaatttaagttttctctttttggcaactgcacttgcttaaaatgtactgaatgtcagctggatttcacagcatatcagatttacagtctttgtcttatcaaggcctttactgtatgttttatactaaccagatgggaaacacattgagcatcatatctgacatgtatgcctaagggaggagctcccccatggatcatggcgttaatgtttacaggacatttactattcttagcattattgatgtttgctttctctacttttgaggaatctgtgagcaattattccgaatgggcagttttcacagatgatatagatcagtttaaaacacagaaagtgcaagatttcagacccaaccaaaagctgaagaaaagtatgcttcatccaagtttatattttgatgctggagaaatccaagcaatgagacaaaagtctcgtgcaagccatttgcatctttttagagctatcagaagtgcagtgacagttatgctgtccaacccaacatactacctacctccaccaaagcatgctgattttgctgccaagtggaatgaaatttatggtaacaatctgcctcctttagcattgtactgtttgttatgcccagaagacaaagttgcctttgaatttgtcttggaatatatggacaggatggttggctacaaagactggctagtagagaatgcaccaggagatgaggttccaattggccattccttaacaggttttgccactgcctttgactttttatataacttattagataatcatcgaagacaaaaatacctggaaaaaatatgggttattactgaggaaatgtacgagtattccaaggtccgctcatggggcaaacagcttctccataaccaccaagccactaatatgatagcattactcacaggggccttggtgactggagtagataaaggatctaaagcaaatatatggaaacaggctgtagtggatgtcatggaaaagacaatgtttctattgaatcatattgttgatggttctttggatgaaggtgtggcctatggaagctacacagctaaatccgtcacacagtatgtttttctggcccagcgccattttaatatcaacaacttggataataactggttaaagatgcacttttggttctattatgccacccttttacctggcttccaaagaactgtgggtatagcagattccaattataattggttttatggtccagaaagccagctagttttcttggataagttcatcttaaagaatggagctggaaattggttagctcagcaaattagaaagcaccgacctaaagatggaccgatggttccttcaactgcccaaaggtggagtactcttcacactgaatacatctggtatgatccccagctcacaccacagccacctgctgattatggtactgcaaaaatacacacattccctaactggggtgtggttacttatggggctgggttgccaaacacacagaccaacacctttgtgtcttttaaatctgggaagctggggggacgagctgtgtatgacatagttcattttcagccatattcctggattgatgggtggagaagttttaacccaggacatgagcatccagatcagaactcatttacttttgcccccaatggacaagtatttgtttctgaagctctctatggacccaagttgagccaccttaacaatgtattggtgtttgctccatcaccctcaagccagtgtaataagccctgggaaggtcaactgggagaatgtgcgcagtggcttaagtggactggcgaggaggttggtgatgcagctggggaaataatcactgcctctcaacatggggaaatggtatttgtgagtggggaagccgtgtctgcttattcttcagcaatgagactgaaaagtgtatatcgtgctttgcttctcttaaattcccaaactctgctagttgttgatcatattgagaggcaagaagattccccaataaattctgtcagtgccttctttcataatttggatattgattttaaatatatcccatataagtttatgaataggtataatggtgccatgatggatgtgtgggatgcacattacaaaatgttttggtttgatcatcatggcaatagtcccatggccagtatacaggaagcagagcaagctgctgaatttaaaaaacgatggactcaatttgttaatgttacttttcagatggaacccacaatcacaagaattgcatatgtcttttatgggccatatatcaatgtctccagctgcagatttattgatagttccaatcctggacttcagatttctctcaatgtcaataatactgaacatgttgtttctattgtaactgattaccataacctgaagacaagattcaattatctgggattcggtggctttgccagtgtggctgatcaaggccaaataacccgatttggtttgggcactcaagcaatagtaaagcctgtaagacatgataggattattttcccctttggatttaaatttaatatagcagttggattaattttgtgcattagcttggtgattttaactttccaatggcgtttttacctttcttttagaaaactaatgcgatggatattaatacttgttattgccttgtggtttattgagcttttggatgtgtggagcacttgtagtcagcccatttgtgcaaaatggacaaggacagaggctgagggaagcaagaagtctttgtcttctgaagggcaccacatggatcttcctgatgttgtcattacctcacttcctggttcaggagctgaaattctcaaacaactttttttcaacagtagtgattttctctacatcagggttcctacagcctacattgatattcctgaaactgagttggaaatcgactcatttgtagatgcttgtgaatggaaggtgtcagatatccgcagtgggcattttcgtttactccgaggctggttgcagtctttagtccaggacacaaaattacatttgcaaaacatccatctgcatgaacccaataggggtaaactggcccaatattttgcaatgaataaggacaaaaaaagaaaatttaaaaggagagagtctttgccagaacaaagaagtcaaatgaaaggcgcctttgatagagatgctgaatatattagggctttgaggagacacctggtttactatccaagtgcacgtcctgtgctcagtttaagcagtggaagctggacgttaaagcttcatttttttcaggaagttttaggagcttcgatgagggcattgtacatagtaagagaccctcgggcatggatttattcaatgttgtacaatagtaaaccaagtctttattctttgaagaatgtaccagagcatttagcaaaattgtttaaaatagagggaggtaaaggcaaatgtaacttaaattcgggttatgctttcgagtatgaaccattgaggaaagaattatcaaaatccaaatcaaatgcagtgtccctcttgtctcacttgtggctagcaaatacagcagcagccttgagaataaatacagatttgctgcctactagctaccagctggtcaagtttgaagatattgtgcattttcctcagaaaactactgaaaggatttttgcctttcttggaattcctttgtctcctgctagtttaaaccaaatattgtttgccacctctacaaaccttttttaccttccctatgaaggggaaatatcaccaactaatactaatgtttggaaacagaacttgcctagagatgaaattaaactaattgaaaacatctgctggactctgatggatcgcctaggatatccaaagtttatggactaaatgctgcaggtcagcagaaatttgcactaataatacttaccaacccactttgtggatatgaatcagaagagtttgtttattctttagtgtgtgtgtgtgtgtgcacgcgtgtatgtgttcagtgttgtttgcacagagagattgttttaaaaaatggcaccatatttggcctagcaggatttatttttatgtcatcacctcccttgcctttgtttctgaaaattttgtctgctaaaaagtttctgctacagagtggtagatgaagttatatcatggggtcaggggagatgggaaaattttaagtttttgtctaactccccttcatctgtaactgtgctaatctatctagagacctcaaacactgctaaaggccttgcaattgctgctttacccacgcatctcttgctttcaagatggactacaaaagttccttatccttttgaaaaggtcttctgacacacttatcttgcacaaagaaaaagaaaatttcttttactgtgtttaatgttcagtgatatcactgaggaaatggtgaaagctcctatcagaactataggatttcttctgggaaatacagatggaaatacagaatgaatatgtttttttgaggtcggaaactgactttaaaagcctccttgaagttttttacttagaaatataaggaataagtctttgaacaatctgggtggcaagggctggtagattattttagacatgattgtctgtttaaaactctcctttcactttttatcctccctggagctacagctgttcgccatcacatcactcccatcctatcctttctgtcactgtcaagcaaaacaatcagtagttactaatcgctgaactctcaatattgtggggcattttccccccagttgattaattttgcgttaaagactgacacagacttagaatcaaatttatttttctggaattaacactctgtgactcaaagtagtgccactgcagtgtctttttaaactggaaacagaattggaaaactgcctgacttatcttgcatccctttgaatgagtttacagactgccagtgtctgcaaaagttgaaagcaaatgggagatgatgtcagaggcatctgtttcctttaccatctgcatcttattataaatgtagtcgtcataaagtgtggtttattttattttggtaggctctgaaatcaaaatgctacgccattataagccagtggagtaattacaatgtattggatgaaaacataaggcagtgtggagacttgatgaaaatctctgtacagattgcagtcttcttcctgatgtttcaaactgtggttcccccaagctctctaacacttggaagtctgtcattctgacctagataaaagtggttctttctcagtagttattattatgtcaaaatgtgcctccagagtgataaagctctgtatatgttagattccagctaaacctaacttggctgtcatttttcttccattatagtgtgagtggagactgccccccctccccaacatattccttcccatatctctcatgattgtccctctgtaatttcaaaatgaatgaaattcatgtgaatgtaggttgagagggcactgaagacctgaatctacactagtaatctcaagaaagattattcattctatctcagagttaccggcaagcatataaaatgctacttggataatatctacatgaatattgcatgctacatggttgataacactatttccattattgggcagaatctcagtgtttactttcaattcctaggatatgtgatcgtgaatcagatcacatataaaaagtctggattgtcagtagtattagatctgatcaaggtaggaattacaattgcatgcaggtagcaagcaagaaagcagaaactactgttccctttattttaacattgtacagacaatacagaaatgtacctgttggcggccgggtgcagtggctcacgcctgtaatcccagcacttcgggaggccgaggcgggtggatcacgaggtcaggagatcaagaccatcctggctaacacggtgaaaccccgtctctactaaaaaaaaaagtacaaaaaattagccgggcgtggtggcgggcacctgtagtcccagctacacgggaggctgaggcaggagaatggcatgaacctgggaggcagagcttgcagtgagtggagatgcgccactgcactccagcctgggcgacagagcgagactccgcctcaaaaaaaaaaaaaaaagaaaaaaagaaatgtacctgttggcaggagaaggccagatggagtatgtggagtaatagggaaagaagagttacagaaaatgaaaaagaaaatgagttacactgagaatgaatatgggaacacgtcattgatagcaaaagaaaggtacaggcttacgaaaatgatctttacaatgtatcccagctttcacccccacatggcaatgcagagttgtatttacttgtttctgtactcacctactcccaccccaagggaaaattttagacatgaaccctactatttagttattctaaaatagaaagtttgctggagaaagcgtccactcacagattgttctgtaaggaatgttatgtatgggtgagcgggtgacacatccattgggtatgtatgcatgtgatggtgcctgagacccctgccttagaaacagaattcctaaggggattgactctcccagcatgttcccaggtcctgcacccttagggtgatctaggaaaattttaaatagcttctactcttatttttgttctttgaaataattaaaagagggattatcactatctgatacttctgaaagaaacacttacaaaatttcttatctgtaaaatccgtctttttctacattaacttccccaaacataggcctaattgagataattgcttttattataataataggattgaaattttaaaattttgaaaggacttattaattttgctgacaaaagtgaagtaacaaatataatgataattggctttttaaattttcaaacaacatagatttactcaagatgaaataaaaaggccatattcagagttgaatttaatgaaaactcagaggaaataggaaaatctgctcaggagaaagaagctaaatctgcatagatttagtttgtagaatttaatttaaaatttaaattttaacaaagtgatgacacaacaatatgtacgtttaggtgtggacaccaaaatattagacatttgattgtccttttacatagagaataactaataaatgcctgacaagaatgggacaatccttccttgtatcaaaattcccaggtcttgctacattgccctctgcaaatgtattcaaagaagaacctcctccaccacttacttttggttggcataattgttcagcaacgatttctgtacatcaccaagtatctttggcattcttggtatacaaagtatatcacaattttaagtgagtaaatattaatgataatttttgaattgctttgtttggcttgattaactttgatcagaaatagaaacgttttcatttgttgatttaggaaaaagcataaatagaatgcagtataacaccacttccaaaggtaaggatacctaacattcttttttttttttttttttttttttttgggatggagtctcactttgttgcccaggctggagtgcagtggtctgatctcggctcactgcaacctccgcctaccgggttcaagtgattctcctacgtcagcctcctgaatagctgggattacaggtgcacgccaccatgcttggctcatttttgtatttttagtagtgacagcgtttcaccacattggtcaggctggtctcaatctcttgacctggtgatctgcccacctgggcctcccaaaatgctgggattacaggcatgagccaccacacctggcaagggtacctgacattctaagatatcaagacacttaatatgtgggctattagctgcttatttaaatgttgaccaaattgtctgatatatctgattaatcatgatttcacttcatttcggaagaaaaattatccatatcatttttaaagacgcaaatgactttggatttttgcatagagtacaatagacacttcaaacaatagattctaacattctctgaaacacttgagatgtttgagctaccatttatatgggttatttatatttagtctaagtaacacatacatgtttaattgattctgttttcatggatagattcaactaagtcttccaagcaattaattttttgttcgtcgtcgtttttccttcatacgttatctagttatgcagcactggaaacagactgaagatcataaaccagttttatcagacctatgtgtaataagactcctgttaatacaaaaataaaaagctaaaagcaacttgt

SEQ ID NO: 13646 - DNA, 4204 bp, Homo sapiens
ggggttcggcgacgcggagggagggagagtctgggccgcgcgggagccgcagggcgccctagccttcgcagaaacgatggcggacgaagaaggaccacctgtagagctgcgccaaagaaaaaagccaaagtcttcagaaaataaggaatctgccaaagaagagaaaatcagtgacattccaattcctgaaagagctccaaaacatgtattatttcaacgctttgcaaagattttcattggctgtcttgcagcggttactagtggtatgatgtatgctctctacttatcagcataccatgaacggaaattctggttttccaacaggcaggagcttgaacgggaaatcacgtttcagggtgacagtgccatttattactcctattataaagatatgttaaaggcaccttcatttgaaagaggtgtttacgaactgacacacaataacaaaactgtatctctgaagactataaatgcagtgcagcaaatgtctctgtatccggaacttattgctagcattttatatcaagccactggtagcaatgagattattgagccagtgtatttctatattggcattgtttttggattgcaaggaatatatgttactgctttatttgttacaagttggcttatgagtggaacatggctagcaggaatgcttactgttgcgtggttcgttattaacagggtagatacaacaagaattgaatactccattcctttaagagaaaactgggcactaccatattttgcatgccaaattgctgcacttacaggctatttaaaaagcaacttaaatacttatggagagaggttttgctacttgttgatgagtgcttcaacttacacatttatgatgatgtgggagtatagccactatctcctgtttcttcaagcaatatctctattcctgctagataccttttcagtggagcaaagtgacaaggtttatgaagtttataaaatctacatattttccctctttctgggatatttactacagtttgagaatccagctttgttggtatctcctttattaagtttagtagcagccttaatgcttgctaagtgccttcagctgaatgtgaagaaaggaagttttgtagctaaaataataaaagtgattaatttttacttggtgtgtactctgacaataacattgaatattataatgaagatgtttgtcccacacaaagaaaatgggcacatgctgaaattccttgaagtaaaatttggactaaatatgaccaagaattttacaatgaattggctcctctgtcaagaatccctgcaggcaccatctcaagatttttttctgcgattgacacagtcttctttattacctttctacattctagtgttaattatttgttttctttctatgttgcaagttatttttaggaggattaatggtaagtccctgaaggaaactgttactcttgaagatggacgaattggagaaagaccagaaataatttatcatgtaattcacactattttattgggttctcttgcaatggttatagaaggcttgaagtacatctggattccttatgtgtgcatgttagcagcatttggtgtatgttctcccgaactttggatgacacttttcaagtggcttcgattaagaactgtacacccaatattgttggctcttattctgagcatggccgtgcctactataataggtctcagcttatggaaagagttttttcccagattaatgacagaattaatggaactacaggaattctatgacccagatacagtggaacttatgacctggataaaaaggcaagctccagttgcagctgtgtttgcagggagtccacagttaatgggtgcgattaaattatgcactggatggatggtgacaagtttgcctctttacaatgatgatgatcttctcaagagaaatgaaaatatctaccaaatctattcaaagcgatctgctgaggatatttataaaatactgacatcttacaaagctaattacctaattgtagaggatgctatctgcaatgaggtgggacccatgagaggctgtagggttaaagatttattagacattgcaaatggccacatggtttgtgaagaaggtgacaagctaacctactcaaaatatgggcgattttgtcatgaggtcaaaattaactattctccatatgtgaattatttcactagagtatactggaacagatcctactttgtatataaaatcaacactgtgatatccttccagtcttgaaaaataacagagccttcatttcaaagactacctgaagtaaaatgcagttttcttctacctactcggtgtcttttgcagatcagagtatggacatttgaaatattgctgcttctttcccccttctgctgttaactggatccagagttctgtgggaaatagaagatcaagcattactgtcctttgattaaatgtgatatctaccactctgcaatattccagacaggtgtcttccttaccgttacatggtctttaacacttttactgattgcaatattttccccataaaatcttcattctattataatattgatcttgaatttgaatatgtgcaaggtcagatacatttctcaaacataacatttaataaataatgtgatataattatttaatagaaagaataattccgaccttcaagcaagtttctgaaggtattttatgatgtataacaactgaagttttacaataaaaactaatttaaatgttagctgaagatatgtggcatttaaattaaaatggaaattatataaaggaaagtgatttttaaggatatacataaagatatatttagaattttcatgatactgttctcctcatctactgcttatgttaagtgagaactttcttagtaatacataatgcatgatgttactgcattttctaaatgactagtaagtgattagttttttcacttatgcctattaatttgataccaatttaatcatgataaaacaataaccgttaacatatattttgttaaatggacatttaaaagaatgttgttcaggttttttttttttaaatactgatatggggcatacaatctattcacatgttttctactgaagtactaagtaaaaaaattaaatcattatcagaataaaaatatgtgttctaaaattagcaacaatttctggggatacatgcagatgttgttaaacgtacctctgcatacagatatattataaaacacaagcaatgttatttatgaaactgtgatgcagtcttcaacatcaagaaaaaatgacaactataataaaatttacaacacagtttcacagtctaaatgctatgttcctttaagtattttcatatttttaatcatttattaagagaaaattgtgaaaagttaatttggccttatagagagattcaggatagatgtagcctatagatgtgtcattttaataagttgggatacgtgtttagtttttccttatattcctgttcagtgaacagattttcataattctcacttgttaaagtgctgcaaaaattgcattttcagtactctaaattactacattagaagagagcatttctccattgtctttattttctgttatatatgtgttgtaaaagtacactacattagaagggagcttttccgttgtctttattttctgttatacatgtgttgttaaagtacatgcattcttagactaactctcagatgctttgctcttttggagctgaagaattgtttgatggtgatgtcatatatctgatagattagtttcagtggttctcatttcacttttatacgtaatttcttaactatattaagatagttgcaggcagtgtacctcaggttgactctgtacatctgaatagtgagtcactagtattttgcttcaagccttctgaaaatataaccatagttacctaagcacacagtgaatagtcacatggtagtacttgtgattagagcatgtaaaacaatgtaattgaaaagtcagcttccatattttgtaggggaaatagaacaccctactttttatctagtgtgaaatatttaatcgaatttttgttgatttatattatgttacctgtgctgaattaggtttggtacttgtgttttgtttgacatattagtaagttgcttttgcttctttctgtcaacttattttttaaataaaattgatctggaaaaattaaaaaaaaaagaaaaaaaaaaaa

SEQ ID NO: 13647 - DNA, 3148 bp, Homo sapiens
agagcgagcgaataagagagagagtaagagggagagagaagaagaggaagaagaggaggcggcggcagcggaggaggaggaggactagtgtggggtggaaaggaagagtgagcgagagcaagttaaggggagggggtgtaagagccagcgaattctttttctttttctattattattttgacgactcctgagttgcgcccatgctcttgtcagcttcgttttaggcgtagcatggccaggcagaagaaaatggggcaaagcgtgctccgggcggtcttctttttagtcctggggcttttgggtcattctcacggaggattccccaacaccatcagcataggtggacttttcatgagaaacacagtgcaggagcacagcgctttccgctttgccgtgcagttatacaacaccaaccagaacaccaccgagaagcccttccatttgaattaccacgtagatcacttggattcctccaatagtttttccgtgacaaatgctttctgctcccagttctcgagaggggtgtatgccatctttggattctatgaccagatgtcaatgaacaccctgacctccttctgtggggccctgcacacatcctttgttacgcctagcttccccactgacgcagatgtgcagtttgtcatccagatgcgcccagccttgaagggcgctattctgagtcttctgggtcattacaagtgggagaagtttgtgtacctctatgacacagaacgaggattttccatcctccaagcgattatggaagcagcagtgcaaaacaactggcaagtaacagcaaggtctgtgggaaacataaaggacgtccaagaattcaggcgcatcattgaagaaatggacaggaggcaggaaaagcgatacttgattgactgcgaagtcgaaaggattaacacaattttggaacaggttgtgatcctagggaaacactcaagaggttatcactacatgctcgctaacctgggttttactgatattttactggaaagagtcatgcatgggggagccaacattacaggtttccagattgtcaacaatgaaaaccctatggttcagcagttcatacagcgctgggtgaggctggatgaaagggaattccctgaagccaagaatgcaccactaaagtatacatctgcattgacacacgacgcaatactggtcatagcagaagctttccgctacctgaggaggcagcgagtagatgtgtcccggagaggaagtgctggagactgcttagcaaatcctgctgtgccctggagtcaaggaattgatattgagagagctctgaaaatggtgcaagtacaaggaatgactggaaatattcaatttgacacttatggacgtaggacaaattataccatcgatgtgtatgaaatgaaagtcagtggctctcgaaaagctggctactggaacgagtatgaaaggtttgtgcctttctcagatcagcaaatcagcaatgacagtgcatcctcagagaatcggaccatagtagtgactaccattctggaatcaccatatgtaatgtacaagaagaaccatgagcaactggaaggaaatgaacgatatgaaggctattgtgtagacctagcctatgaaatagccaaacatgtaaggatcaaatacaaattgtccatcgttggtgacgggaaatatggtgcaagggatccagagactaaaatatggaacggcatggttggggaacttgtctatgggagagctgatatagctgttgctccactcactataacattggtccgtgaagaagtcatagatttttcaaagccattcatgagcctgggcatctccatcatgataaagaagcctcagaaatcaaaaccaggcgtattctcatttctggatcccctggcttatgaaatctggatgtgcattgtctttgcttacattggagtcagcgtagttcttttcctagtcagcaggttcagtccttatgaatggcacttggaagacaacaatgaagaacctcgtgacccacaaagtcctcctgatcctccaaatgaatttggaatatttaacagtctttggttttccttgggtgcctttatgcagcaaggatgtgatatttctccaagatcactctccgggcgcattgttggaggggtttggtggttcttcaccctgatcataatttcttcctatactgccaatctcgctgctttcctgactgtggagaggatggtttctcccatagagagtgctgaagacttagctaaacagactgaaattgcatatgggaccctggactccggttcaacaaaagaatttttcagaagatccaaaattgctgtgtacgagaaaatgtggtcttacatgaaatcagcggagccatctgtgtttaccaaaacaacagcagacggagtggcccgagtgcgaaagtccaagggaaagttcgccttcctgctggagtcaaccatgaatgagtacattgagcagagaaaaccatgtgatacgatgaaagttggtggaaatctggattccaaaggctatggtgtggcaacccctaaaggctcagcattaggaacgcctgtaaaccttgcagtattgaaactcagtgaacaaggcatcttagacaagctgaaaaacaaatggtggtacgataagggggaatgtggagccaaggactccgggagtaaggacaagaccagcgctctgagcctgagcaatgtggcaggcgttttctatatacttgtcggaggtctggggctggccatgatggtggctttgatagaattctgttacaaatcacgggcagagtccaaacgcatgaaactcacaaagaacacccaaaactttaagcctgctcctgccaccaacactcagaattatgctacatacagagaaggctacaacgtgtatggaacagagagtgttaagatctagggatcccttcccactggaggcatgtgatgagaggaaatcaccgaaaacgtggctgcttcaaggatcctgagccagatttcactctccttggtgtcgggcatgacacgaatattgctgatggtgcaatgacctttcaataggaaaaactgatttttttttccttcagtgccttatggaacactctgagactcgcgacaatgcaaaccatcattgaaatctttttgctttgctt

SEQ ID NO: 13648 - DNA, 1005 bp, Homo sapiens
agagcgagcgaataagagagagagtaagagggagagagaagaagaggaagaagaggaggcggcggcagcggaggaggaggaggactagtgtggggtggaaaggaagagtgagcgagagcaagttaaggggagggggtgtaagagccagcgaattctttttctttttctattattattttgacgactcctgagttgcgcccatgctcttgtcagcttcgttttaggcgtagcatggccaggcagaagaaaatggggcaaagcgtgctccgggcggtcttctttttagtcctggggcttttgggtcattctcacggaggattccccaacaccatcagcataggtggacttttcatgagaaacacagtgcaggagcacagcgctttccgctttgccgtgcagttatacaacaccaaccagaacaccaccgagaagcccttccatttgaattaccacgtagatcacttggattcctccaatagtttttccgtgacaaatgcttgtcctgctgaaagggactacctgccttggccaggaagcatcagggaaaacaattggacagctctgccgtgctgcaaagatcatgggctgctgcacctaaaatgttcaccaggtggggcccgccaaaactgggcctattgtatctggggcgttacaggtgaactgtaagatgagaacaagatcacaagtcagcactacctcctcccttcttgagttctcaactgagtgagcatcatggagggagaagaaagaaagaagttcagcctgggtgtgtgaagctgtaaagttgcaggttgaacccaaacccattttagagacagaagaaactaccctctggagataaaataaaaagatgaagctgagatgggacaggatcaaagttgatgaaatatcaagagaggttaataaaggaacattaatttattcctcaaaaaaaaaaaaaaaaaaaaaaaaaaaaaaaaaaaaaaaaaaaaaaaaaaaaaaaaaaaaaaaaaaaaaaaaaaaaaa

SEQ ID NO: 13649 - DNA, 3148 bp, Homo sapiens
agagcgagcgaataagagagagagtaagagggagagagaagaagaggaagaagaggaggcggcggcagcggaggaggaggaggactagtgtggggtggaaaggaagagtgagcgagagcaagttaaggggagggggtgtaagagccagcgaattctttttctttttctattattattttgacgactcctgagttgcgcccatgctcttgtcagcttcgttttaggcgtagcatggccaggcagaagaaaatggggcaaagcgtgctccgggcggtcttctttttagtcctggggcttttgggtcattctcacggaggattccccaacaccatcagcataggtggacttttcatgagaaacacagtgcaggagcacagcgctttccgctttgccgtgcagttatacaacaccaaccagaacaccaccgagaagcccttccatttgaattaccacgtagatcacttggattcctccaatagtttttccgtgacaaatgctttctgctcccagttctcgagaggggtgtatgccatctttggattctatgaccagatgtcaatgaacaccctgacctccttctgtggggccctgcacacatcctttgttacgcctagcttccccactgacgcagatgtgcagtttgtcatccagatgcgcccagccttgaagggcgctattctgagtcttctgggtcattacaagtgggagaagtttgtgtacctctatgacacagaacgaggattttccatcctccaagcgattatggaagcagcagtgcaaaacaactggcaagtaacagcaaggtctgtgggaaacataaaggacgtccaagaattcaggcgcatcattgaagaaatggacaggaggcaggaaaagcgatacttgattgactgcgaagtcgaaaggattaacacaattttggaacaggttgtgatcctagggaaacactcaagaggttatcactacatgctcgctaacctgggttttactgatattttactggaaagagtcatgcatgggggagccaacattacaggtttccagattgtcaacaatgaaaaccctatggttcagcagttcatacagcgctgggtgaggctggatgaaagggaattccctgaagccaagaatgcaccactaaagtatacatctgcattgacacacgacgcaatactggtcatagcagaagctttccgctacctgaggaggcagcgagtagatgtgtcccggagaggaagtgctggagactgcttagcaaatcctgctgtgccctggagtcaaggaattgatattgagagagctctgaaaatggtgcaagtacaaggaatgactggaaatattcaatttgacacttatggacgtaggacaaattataccatcgatgtgtatgaaatgaaagtcagtggctctcgaaaagctggctactggaacgagtatgaaaggtttgtgcctttctcagatcagcaaatcagcaatgacagtgcatcctcagagaatcggaccatagtagtgactaccattctggaatcaccatatgtaatgtacaagaagaaccatgagcaactggaaggaaatgaacgatatgaaggctattgtgtagacctagcctatgaaatagccaaacatgtaaggatcaaatacaaattgtccatcgttggtgacgggaaatatggtgcaagggatccagagactaaaatatggaacggcatggttggggaacttgtctatgggagagctgatatagctgttgctccactcactataacattggtccgtgaagaagtcatagatttttcaaagccattcatgagcctgggcatctccatcatgataaagaagcctcagaaatcaaaaccaggcgtattctcatttctggatcccctggcttatgaaatctggatgtgcattgtctttgcttacattggagtcagcgtagttcttttcctagtcagcaggttcagtccttatgaatggcacttggaagacaacaatgaagaacctcgtgacccacaaagtcctcctgatcctccaaatgaatttggaatatttaacagtctttggttttccttgggtgcctttatgcagcaaggatgtgatatttctccaagatcactctccgggcgcattgttggaggggtttggtggttcttcaccctgatcataatttcttcctatactgccaatctcgctgctttcctgactgtggagaggatggtttctcccatagagagtgctgaagacttagctaaacagactgaaattgcatatgggaccctggactccggttcaacaaaagaatttttcagaagatccaaaattgctgtgtacgagaaaatgtggtcttacatgaaatcagcggagccatctgtgtttaccaaaacaacagcagacggagtggcccgagtgcgaaagtccaagggaaagttcgccttcctgctggagtcaaccatgaatgagtacattgagcagagaaaaccatgtgatacgatgaaagttggtggaaatctggattccaaaggctatggtgtggcaacccctaaaggctcagcattaggaaatgctgttaacctggcagtattaaaactgaatgagcaaggcctcttggacaaattgaaaaacaaatggtggtacgacaaaggagagtgcggcagcgggggcggtgactccaaggacaagaccagcgctctgagcctgagcaatgtggcaggcgttttctatatacttgtcggaggtctggggctggccatgatggtggctttgatagaattctgttacaaatcacgggcagagtccaaacgcatgaaactcacaaagaacacccaaaactttaagcctgctcctgccaccaacactcagaattatgctacatacagagaaggctacaacgtgtatggaacagagagtgttaagatctagggatcccttcccactggaggcatgtgatgagaggaaatcaccgaaaacgtggctgcttcaaggatcctgagccagatttcactctccttggtgtcgggcatgacacgaatattgctgatggtgcaatgacctttcaataggaaaaactgatttttttttccttcagtgccttatggaacactctgagactcgcgacaatgcaaaccatcattgaaatctttttgctttgctt

SEQ ID NO: 13650 - DNA, 5655 bp, Homo sapiens
atgcccgcgagtgtccaggaggctggtgacctgccaaggctgggcgggctggctggagaggagcgggagcgcgggcccgggagagacttgggtatcaggaaactcggaggcggggctggggggtggtgcctggcccggaccgtctgcaggggcggggaccgacccccaggggtcgctgcgccttgcgcttcccccgcccgcgggcgccagggccgggctgaaccaccgcgcggatcggcagggggagcggcggcgaagacagcgccagacagcgggtcccagagaccgcagcgcgcggcgtggcgcagggtctcgccggccactgattcaaggcgcggcggcgcggagcccgagaggcgccagggattgggcggcagcgcggctccggagcctggctcggacacccccgcgacccgtgcggagggggagccccagcctcctgcggctccgagaagcttccccctgcgacttccgcgaggagacgagtctgcgcagcgtggtggccgccgccccccgaccctctgcgcactctctcccgcgccggcggctcagcctagccccgttcggccggccgagactatggacacggaggatgaccccttgctgcaggatgtgtggctagaggaggagcaggaggaggaagaagcaacgggtgaaacctttttaggggcccagaagccagggccccaacctggggcagggggacagtgttgctggcggcactggcccctggcttcccgacccccagcttcgggcttctggagtaccctgggctgggccttcaccaatccgtgctgtgctgggctggtgctcttcctgggctgcagcatccccatggccctgtcagccttcatgttcctttactacccaccgctggacattgacatctcctacaacgcctttgagatccgcaaccacgaggcctcacagcgtttcgacgctctcactctggcgcttaagtcccagtttggatcctgggggcggaaccggcgcgatttggccgacttcacctccgagacgcttcagcgccttatctcagagcagctgcagcagctgcatctcggcaaccgctcgcggcaagcctcccgagccccccgcgtcatccccgcggcctcactcggtggcccaggcccttaccgggacacttccgcggctcaaaagcccacagccaatcggagcgggcgacttcggcgtgagaccccgcccctggaggatctggcagccaaccagagtgaagacccgcgaaaccagcggctgagcaagaatgggcggtaccagcccagcatcccgccccacgcggcagtcgcggccaatcagagccgtgcccgccgaggcgcctcgcgctgggactactcgcgcgcctatgtgagtgccaacactcagacgcacgcgcactggcgcatcgagctcatcttcctggcgcgcggcgacgcggagcgcaacattttcaccagtgagcgcctggtcacgatccatgagatcgagcgcaagatcatggaccacccaggcttccgggagttctgctggaagccccacgaggtgctcaaggatctgccgctgggctcctactcctactgctcgccccccagctcgctcatgacctacttttttcccaccgagaggggcggcaagatctactatgacggcatgggccaggacctggcggacatccggggctccctggagctggccatgactcaccctgagttctactggtatgtggatgagggcctctctgcagacaatctgaagagctccctcctgcgcagtgagatcctgtttggagcacccctgcccaactactactcagtagatgaccgctgggaggaacaacgggctaagtttcagagcttcgtggtcacctacgtggccatgctggccaagcagtctaccagcaaagtccaggttctctatggggggacagacctgtttgactatgaagtgcgcaggacgttcaacaatgacatgctcctggccttcatcagcagcagctgcattgctgccctggtctacatcctcacctcctgctcagtgttcctgtccttctttgggattgccagcattggtctcagctgcctggtggccctcttcctgtaccacgtggtctttggtatccagtacttgggcatcctgaatggggtggccgccttcgtgatcgtgggcattggtgtggacgatgtctttgtgttcatcaacacctaccgccaggccacccacctggaagacccacagctgcgcatgatccacaccgtccaaactgcaggcaaggccaccttcttcacctccctgaccacagccgccgcctacgcagctaacgtcttctcccagatcccagccgtccacgactttggcctgttcatgtctctcatcgtgtcctgttgctggctggccgtgcttgtcaccatgcctgcagctctgggcctctggagcctctacctggcaccactggagagctcctgccagaccagctgccaccagaattgcagccggaagacctccctgcacttccccggagacgtgtttgccgctcccgagcaggttggaggcagccctgcccagggccccataccctacctggatgatgacatccccttgctggaggtcgaggaagagccagtgtcactggagctgggagacgtgtccctggtgtctgtgtcccccgagggtctgcagccagcctccaacacgggcagccgcggccatctcatcgtgcagctgcaggagctgctgcaccactgggtcctgtggtcagccgtcaagagccgctgggtgattgtggggctgttcgtctccatcctcatcttgtccctggtgttcgccagccggctccgccccgccagccgggccccgctactcttccggcctgataccaacatccaggtgctgctggacctcaagtacaacctgagcgccgagggcatctcctgcatcacctgttcaggtctgttccaggagaagccccacagcctgcagaacaacatccggacgtccctggagaagaagaggcgaggctcaggggtcccctgggctagccggcctgaggccaccctgcaggatttcccaggcaccgtgtacatctctaaagtgaagagtcaaggccaccccgctgtctacaggctctccctcaatgccagcctgcctgctccttggcaggctgtgtcgcctggggatggagaggtgccctccttccaggtgtatagagcgccttttggtaacttcaccaagaagctgaccgcttgtatgtctacagtagggctgctccaggcggcgagcccctcccgcaagtggatgctgacgaccttggcctgtgatgccaagcggggctggaagtttgacttcagcttctacgtggccaccaaggagcagcagcacacccggaagctgtacttcgcccagtcccacaagccccccttccacgggcgcgtatgcatggcaccccctggctgcctgcttagctccagccccgatgggcctaccaaaggcttcttcttcgtgcctagtgagaaagtgcccaaggcccgtctctcagccaccttcggcttcaacccctgcgtgaacacgggctgcgggaagccggcggtgcggccactagtggataccggggccatggtctttgtggtcttcggcattattggcgtcaaccgcactcggcaggtggacaaccacgtcattggagacccgggtagtgttgtctacgacagcagctttgacctcttcaaggaaattgggcacctgtgtcacctctgcaaggccatcgcagccaactccgagctggtgaagccgggtggggcccagtgcctgccttcaggctacagcatctcctccttcctgcagatgttgcaccctgagtgcaaggagctgcccgagcccaacctgctcccggggcagctgtcccacggggcagtgggcgtcagggagggccgcgtgcagtggatctccatggctttcgagtcgaccacgtacaagggcaaatcctccttccagacctactcggactacctgcgctgggagagcttcctccagcagcagctgcaggccttgcccgagggctcagtcctgcgccggggcttccagacctgcgagcactggaagcagatattcatggaaatcgtaggggtgcagagcgccctgtgcggcctggtgctatccctgctcatctgcgtggccgcggtggccgtgttcaccacccacatcctgctcctgctgcccgtgctcctcagcatcttgggcatcgtgtgcctggtggtgaccatcatgtactggagcggctgggagatgggggctgtggaagccatctccctgtccatcctcgttggctcctccgtggattactgcgtccacctggtcgagggctacctgctggctggagagaacctgcccccccaccaggccgaggacgcccgaacgcagcgccagtggcgtacgctggaggccgtgcggcacgtgggcgtggccatcgtctccagtgccctcaccacggtcatcgccacagtgcccctcttcttctgcatcatcgccccatttgccaagttcggcaagattgtggcactcaacacgggcgtgtccatcctctacacgctgaccgtcagcaccgccctgctgggcatcatggcgcccagctctttcactcggacccggacttccttcctcaaggccctgggtgccgtgctgctggcaggggccctggggctgggtgcctgcctcgtgctcctgcagagcggctataagattcccctgcccgcaggggcctccctatagcccgggacgggctctggacacttgcacctttggtcccatgggtgggggacaggagctgcttcccagctcgacttcagctagctgtgtccccaggcctgggcccagggcgccctgcgggccagcgtggaggctgacacccacacagatggtgtggaccatgctgccttgtggagctgggagttggagacagccgccaccccacaggccgggctactggcagccacactcggctttttgcccagtggcagaagagaccagccctcctcccatgcccggtcaccatgggggtcaggttatttttgtagggggtctccctctcacactgcctcagtgctcacaaccttccagtgtggatgttacagggtggcccccattctaccgatgtgaaaactgaggcgccaggacacagtggctgccctgtcgctggatcagtagcagagccagagctgcctccgagcgccatgccgccctcgggaatcatacaggaagagcacagtggatccagggtgggggcctctcaccccctaaccccgcccccccgcaaccctccccttcagctttacggcggccagtgctgaatggccctgtggccctccctgggccttttggtcttggccagagaagacagaaggacccggcttgggcttctgcatgtcctacccctgaccccagcctcaaggggcccctcaaaggccctctctgggggctctggggctcagcacagctttcctcatggatctaagcccctgtctttcccacctgactctgagtggatgttttgggggatggcccctgtggggaggagctgccatgccggccgcctgctcacggcagaaggttgctattaaaatgacataggattgcagactgctgctgttaatacgagcattttaagca

SEQ ID NO: 13651 - DNA, 3155 bp, Homo sapiens
gtttcattttgcagttactgggagggggcttgctgtggccctgtcaggaagagtagagctctggtccagctccgcgcagggagggaggctgtcaccatgccggcctgctgcagctgcagtgatgttttccagtatgagacgaacaaagtcactcggatccagagcatgaattatggcaccattaagtggttcttccacgtgatcatcttttcctacgtttgctttgctctggtgagtgacaagctgtaccagcggaaagagcctgtcatcagttctgtgcacaccaaggtgaaggggatagcagaggtgaaagaggagatcgtggagaatggagtgaagaagttggtgcacagtgtctttgacaccgcagactacaccttccctttgcaggggaactctttcttcgtgatgacaaactttctcaaaacagaaggccaagagcagcggttgtgtcccgagtatcccacccgcaggacgctctgttcctctgaccgaggttgtaaaaagggatggatggacccgcagagcaaaggaattcagaccggaaggtgtgtagtgtatgaagggaaccagaagacctgtgaagtctctgcctggtgccccatcgaggcagtggaagaggccccccggcctgctctcttgaacagtgccgaaaacttcactgtgctcatcaagaacaatatcgacttccccggccacaactacaccacgagaaacatcctgccaggtttaaacatcacttgtaccttccacaagactcagaatccacagtgtcccattttccgactaggagacatcttccgagaaacaggcgataatttttcagatgtggcaattcagggcggaataatgggcattgagatctactgggactgcaacctagaccgttggttccatcactgccgtcccaaatacagtttccgtcgccttgacgacaagaccaccaacgtgtccttgtaccctggctacaacttcagatacgccaagtactacaaggaaaacaatgttgagaaacggactctgataaaagtcttcgggatccgttttgacatcctggtttttggcaccggaggaaaatttgacattatccagctggttgtgtacatcggctcaaccctctcctacttcggtctggccgctgtgttcatcgacttcctcatcgacacttactccagtaactgctgtcgctcccatatttatccctggtgcaagtgctgtcagccctgtgtggtcaacgaatactactacaggaagaagtgcgagtccattgtggagccaaagccgacattaaagtatgtgtcctttgtggatgaatcccacattaggatggtgaaccagcagctactagggagaagtctgcaagatgtcaagggccaagaagtcccaagacctgcgatggacttcacagatttgtccaggctgcccctggccctccatgacacacccccgattcctggacaaccagaggagatacagctgcttagaaaggaggcgactcctagatccagggatagccccgtctggtgccagtgtggaagctgcctcccatctcaactccctgagagccacaggtgcctggaggagctgtgctgccggaaaaagccgggggcctgcatcaccacctcagagctgttcaggaagctggtcctgtccagacacgtcctgcagttcctcctgctctaccaggagcccttgctggcgctggatgtggattccaccaacagccggctgcggcactgtgcctacaggtgctacgccacctggcgcttcggctcccaggacatggctgactttgccaacctgcccagctgctgccgctggaggatccggaaagagtttccgaagagtgaagggcagtacagtggcttcaagagtccttactgaagccaggcaccgtggctcacgtctgtaatcccagcgctttgggaggccgaggcaggcagatcacctgaggtcgggagttggagacccgcctggctaacaaggcgaaatcctgtctgtactaaaaatacaaaaatcagccagacatggtggcatgcacctgcaatcccagctactcgggaggctgaggcacaagaatcacttgaacccgggaggcagaggttgtagtgagcccagattgtgccactgctctccagcctgggaggcacagcaaactgtcccccaaaaaaaaaaaagagtccttaccaatagcaggggctgcagtagccatgttaacatgacatttaccagcaacttgaacttcacctgcaaagctctgtggccacattttcagccaaagggaaatatgctttcatcttctgttgctctctgtgtctgagagcaaagtgacctggttaaacaaaccagaatccctctacatggactcagagaaaagagattgagatgtaagtctcaactctgtccccaggaagttgtgtgaccctaggcctctcacctctgtgcctctgtctccttgttgcccaactactatctcagagatattgtgaggacaaattgagacagtgcacatgaactgtcttttaatgtgtaaagatctacatgaatgcaaaacatttcattatgaggtcagactaggataatgtccaactaaaaacaaacccttttcatcctggctggagaatgtggagaactaaaggtggccacaaattctttgacactcaagtcccccaagacctaagggttttatctcctccccttgaatatgggtggctctgattgctttatccaaaagtggaagtgacattgtgtcagtttcagatcctgatcttaagaggctgacagcttctacttgctgtcccttggaactcttgctatcggggaagccagacgccatttaaaagtctgcctatcctggccaggtgtggtggctcacacctgtaatcccagcactttgggagaccaaggcgggcggatcacttaaagtcaggagtccaagaccagactcgccaacatggtgaaaccgtatctctaataaaaatacaaaaattagctgggcatggtgcgggcacctgtagtcctagctatcaagaggctgagacaggagaaacacttgaacctgggaggtggaggttgcattgagctgagatcgtgccactgcactccaggctgggtgacagagcgagactccatctcaaaaaaaaaaaaaagaaaaa

SEQ ID NO: 13652 - DNA, 2925 bp, Homo sapiens
gtctcaagatggcggccaatgtgggatcgatgtttcaatattggaagcgctttgatttacagcagctgcagagagaactcgatgccaccgcaacggtattggcgaaccggcaggatgaaagtgagcagtccagaaagcggcttatcgaacagagccgggagttcaagaagaacactccagaggatttgcgcaagcaggtagcgccgctgctgaagagtttccaaggagagattgatgcactgagtaaaagaagcaaggaagctgaagcagctttcttgaatgtctacaaaagattgattgacgtcccagatcccgtaccagctttggatctcggacagcaactccagctcaaagtgcagcgcctgcacgatattgaaacagagaaccagaaacttagggaaactctggaagaatacaacaaggaatttgctgaagtgaaaaatcaagaggttacgataaaagcacttaaagagaaaatccgagaatatgaacagacactgaagaaccaagccgaaaccatagctcttgagaaggaacagaagttacagaatgactttgcagaaaaggagagaaagctgcaggagacacagatgtccaccacctcaaagctggaggaagctgagcataaggttcagagcctacaaacagccctggaaaaaactcgaacagaattatttgacctgaaaaccaaatacgatgaagaaactactgcaaaggccgacgagattgaaatgatcatgacggaccttgaaagggcaaaccagagggcagaggtggctcagagagaggcggagaccttaagggaacagctctcatcggccaatcactccctccagctggcctcacagatccagaaggcaccagacgtggccatagaggtgctgacccgctccagcctagaagttgagttggccgccaaggagcgggagatcgcacagctggtggaggacgtgcagagactccaggccagcctcaccaagctgcgggagaattcggccagccagatctcacagcttgagcagcagctgagcgccaaaaacagcacactcaaacaactggaagaaaaactcaaaggccaggctgactatgaagaggtgaagaaagagctgaacattctgaagtccatggagtttgcaccgtccgagggcgctgggacacaggatgcggccaagcccctggaggtgctgttgctggagaagaaccgctcgctgcagtccgagaacgccgcgctgcgcatctccaacagcgacctgagcggacgctgtgcagagctgcaagtccgtatcactgaggctgtggccacagccactgagcagagagagctgatcgcccgcctggagcaggacctgagcatcattcagtccatccagcggcccgatgccgagggtgccgctgagcaccgcctggagaagatcccagagcccatcaaagaggccactgccctattctacggacctgcagcaccagccagcggtgccctcccagagggccaggtggattcactgctttccatcatctccagccagagggagcgcttccgtgcccggaaccaggagcttgaggccgagaaccgcctggcccagcacaccctccaggccctgcagagtgagctggacagcctgcgcgccgacaacatcaagctctttgagaagatcaagttcctgcagagctaccctggccggggcagcggcagtgatgacacggagctgcggtactcgtcccagtacgaggagcgcctggaccccttctcctccttcagcaagcgggagcggcagaggaagtacctgagcttgagtccctgggacaaggccaccctcagcatggggcgtctggttctctccaacaagatggcgcgcaccatcggcttcttctacacactgttcctgcactgcctggtcttcctggtgctctacaagctggcatggagcgagagcatggagagggactgtgccaccttctgcgccaagaagttcgctgaccacctgcacaagttccacgagaatgacaacggggctgcggctggtgacttgtggcagtgataccccggggcctcccccgtgacagtgacggctgcgcctccaccccgactgctcagtgcatctaatcacttagactcccctgaagaatcccccatggaaactgcccttatccgctgtccagcagctgccagaggccccaggtcacctcgggtccccttgaaagaatgtctcggtcacatcaggcccgctaggtccagagagcgagcccccaatgcccggccaggctaagccgcagagaccctctcagcccccacctcaggttagggctctgcccgcagcctgacctctagccctggtggcagaggtccctcagctgcgaggctaattgggtgaccaccgattccagctgcggttaatccagcttgggcctgtctgcactgcgatcctcttgggctctcctaggatccccccatgccccgtaagaggtggaagacgcttccttccaggacagcaggctttgagtccagcacccccagcctgcctttgccaccagccccaccctgcagagtatatgaggcttgacagagtctgccccctcccccactgcaccccaagagagagagccccagccagcggaacagtttctattaccccctccctgcccccagacccatgtgatttctgctttcttctttagcaagatattctggtttctagataaggaagagtctctaatgagcccccgagccccagtctcttcagactcatggattggtctgaggggtctgaacgtctcctagccaatcagaactggctgtggaccaccctagcacggccacctctcagggccactggcaggccttcctgagttagatttgtagttgcatatttagctttgcacatttgaaataaaccacggttgcagccaaaaaaaaaaaaaaaaaaa

SEQ ID NO: 13653 - DNA, 2942 bp, Homo sapiens
cgtctcaatatgtctcaagatggcggccaatgtgggatcgatgtttcaatattggaagcgctttgatttacagcagctgcagagagaactcgatgccaccgcaacggtattggcgaaccggcaggatgaaagtgagcagtccagaaagcggcttatcgaacagagccgggagttcaagaagaacactccagaggatttgcgcaagcaggtagcgccgctgctgaagagtttccaaggagagattgatgcactgagtaaaagaagcaaggaagctgaagcagctttcttgaatgtctacaaaagattgattgacgtcccagatcccgtaccagctttggatctcggacagcaactccagctcaaagtgcagcgcctgcacgatattgaaacagagaaccagaaacttagggaaactctggaagaatacaacaaggaatttgctgaagtgaaaaatcaagaggttacgataaaagcacttaaagagaaaatccgagaatatgaacagacactgaagaaccaagccgaaaccatagctcttgagaaggaacagaagttacagaatgactttgcagaaaaggagagaaagctgcaggagacacagatgtccaccacctcaaagctggaggaagctgagcataaggttcagagcctacaaacagccctggaaaaaactcgaacagaattatttgacctgaaaaccaaatacgatgaagaaactactgcaaaggccgacgagattgaaatgatcatgacggaccttgaaagggcaaaccagagggcagaggtggctcagagagaggcggagaccttaagggaacagctctcatcggccaatcactccctccagctggcctcacagatccagaaggcaccagacgtggagcaggccatagaggtgctgacccgctccagcctagaagttgagttggccgccaaggagcgggagatcgcacagctggtggaggacgtgcagagactccaggccagcctcaccaagctgcgggagaattcggccagccagatctcacagcttgagcagcagctgagcgccaaaaacagcacactcaaacaactggaagaaaaactcaaaggccaggctgactatgaagaggtgaagaaagagctgaacattctgaagtccatggagtttgcaccgtccgagggcgctgggacacaggatgcggccaagcccctggaggtgctgttgctggagaagaaccgctcgctgcagtccgagaacgccgcgctgcgcatctccaacagcgacctgagcggacgctgtgcagagctgcaagtccgtatcactgaggctgtggccacagccactgagcagagagagctgatcgcccgcctggagcaggacctgagcatcattcagtccatccagcggcccgatgccgagggtgccgctgagcaccgcctggagaagatcccagagcccatcaaagaggccactgccctattctacggacctgcagcaccagccagcggtgccctcccagagggccaggtggattcactgctttccatcatctccagccagagggagcgcttccgtgcccggaaccaggagcttgaggccgagaaccgcctggcccagcacaccctccaggccctgcagagtgagctggacagcctgcgcgccgacaacatcaagctctttgagaagatcaagttcctgcagagctaccctggccggggcagcggcagtgatgacacggagctgcggtactcgtcccagtacgaggagcgcctggaccccttctcctccttcagcaagcgggagcggcagaggaagtacctgagcttgagtccctgggacaaggccaccctcagcatggggcgtctggttctctccaacaagatggcgcgcaccatcggcttcttctacacactgttcctgcactgcctggtcttcctggtgctctacaagctggcatggagcgagagcatggagagggactgtgccaccttctgcgccaagaagttcgctgaccacctgcacaagttccacgagaatgacaacggggctgcggctggtgacttgtggcagtgataccccggggcctcccccgtgacagtgacggctgcgcctccaccccgactgctcagtgcatctaatcacttagactcccctgaagaatcccccatggaaactgcccttatccgctgtccagcagctgccagaggccccaggtcacctcgggtccccttgaaagaatgtctcggtcacatcaggcccgctaggtccagagagcgagcccccaatgcccggccaggctaagccgcagagaccctctcagcccccacctcaggttagggctctgcccgcagcctgacctctagccctggtggcagaggtccctcagctgcgaggctaattgggtgaccaccgattccagctgcggttaatccagcttgggcctgtctgcactgcgatcctcttgggctctcctaggatccccccatgccccgtaagaggtggaagacgcttccttccaggacagcaggctttgagtccagcacccccagcctgcctttgccaccagccccaccctgcagagtatatgaggcttgacagagtctgccccctcccccactgcaccccaagagagagagccccagccagcggaacagtttctattaccccctccctgcccccagacccatgtgatttctgctttcttctttagcaagatattctggtttctagataaggaagagtctctaatgagcccccgagccccagtctcttcagactcatggattggtctgaggggtctgaacgtctcctagccaatcagaactggctgtggaccaccctagcacggccacctctcagggccactggcaggccttcctgagttagatttgtagttgcatatttagctttgcacatttgaaataaaccacggttgcagccaaaaaaaaaaaaaaaaaaa

SEQ ID NO: 13654 - DNA, 5379 bp, Homo sapiens
gaattccgcggcgccgggacagccccgggactctgccaggtggatgttgtgcgtacgcggagccaggttgaagagagaactcgatgccaccgcaacggtattggcgaaccggcaggatgaaagtgagcagtccagaaagcggcttatcgaacagagccgggagttcaagaagaacactccagaggatttgcgcaagcaggtagcgccgctgctgaagagtttccaaggagagattgatgcactgagtaaaagaagcaaggaagctgaagcagctttcttgaatgtctacaaaagattgattgacgtcccagatcccgtaccagctttggatctcggacagcaactccagctcaaagtgcagcgcctgcacgatattgaaacagagaaccagaaacttagggaaactctggaagaatacaacaaggaatttgctgaagtgaaaaatcaagaggttacgataaaagcacttaaagagaaaatccgagaatatgaacagacactgaagaaccaagccgaaaccatagctcttgagaaggaacagaagttacagaatgactttgcagaaaaggagagaaagctgcaggagacacagatgtccaccacctcaaagctggaggaagctgagcataaggttcagagcctacaaacagccctggaaaaaactcgaacagaattatttgacctgaaaaccaaatacgatgaagaaactactgcaaaggccgacgagattgaaatgatcatgacggaccttgaaagggcaaaccagagggcagaggtggctcagagagaggcggagaccttaagggaacagctctcatcggccaatcactccctccagctggcctcacagatccagaaggcaccagacgtggagcaggccatagaggtgctgacccgctccagcctagaagttgagttggccgccaaggagcgggagatcgcacagctggtggaggacgtgcagagactccaggccagcctcaccaagctgcgggagaattcggccagccagatctcacagcttgagcagcagctgagcgccaaaaacagcacactcaaacaactggaagaaaaactcaaaggccaggctgactatgaagaggtgaagaaagagctgaacattctgaagtccatggagtttgcaccgtccgagggcgctgggacacaggatgcggccaagcccctggaggtgctgttgctggagaagaaccgctcgctgcagtccgagaacgccgcgctgcgcatctccaacagcgacctgagcgggtcagccaggaggaaagggaaagaccagcctgaaagtcggcgcccgggatctttgccggccccccctccttctcagttgccccgcaacccgggggagcaggcttccaatactaatggtacacaccagttctcaccagcggggttaagtcaagactttttcagctcatccctggcaagccccagcctacccctggcttctacaggaaaatttgcactaaactctcttctccagcggcagctaatgcagtccttctactccaaggctatgcaggaagccggaagcacaagcatgattttttcaacaggtccatacagcacaaactccatatcttcccaaagtccattacaacaaagcccagatgtcaatggcatggccccatcccccagccagtcagaaagtgctgggagcgtctccgagggcgaggagatggacactgcagaaatcgcccggcaggtcaaagagcagctgattaagcacaatatcggacaacgtattttcggacattatgtgttgggactgtctcaagggtccgtgagcgagattctggcccggcccaagccatggaataaactgactgttcgtggcaaggagccatttcacaagatgaaacagttcctctccgatgagcagaacatcctggccctccgtagcatccaaggcagacaaagagagaatccaggccagagcctgaacagactatttcaggaagtaccgaaacgaagaaatgggtctgaaggtaacatcaccacccggatccgagcctcggagactggctctgatgaagccatcaagtccatcctagagcaagccaagagggagctccaagtgcagaaaactgcagagccggcccagccttcctccgcatccggcagcgggaactctgatgagcccatccgctccatcctgcagcaagcccgccgggagatggaggcccagcaggctgccctcgaccctgccttaaagcaggcaccactgtcccagagtgacatcaccatcctcacccccaagcttctgtccacctcgcccatgcccaccgtgtccagctacccacctctcgccatctccctgaagaagccctccgcagctcctgaggccggtgcctctgctctgccgaaccccccggccctcaaaaaggaggcccaggacgcccccgggctggacccccagggagcagccgattgtgcacaaggggtcctgagacaggtgaaaaatgaggtgggccgcagcggtgcctggaaggaccactggtggagcgcggtgcagccggagagaagaaatgccgcctcctccgaggaggccaaggccgaagaaacgggcggcgggaaagagaagggcagcggtggcagcggaggtggcagccagcctcgggccgagcgcagtcagctccagggaccctcgtcgtcagagtactggaaggagtggcccagcgctgagtccccatactcccagagctcagagctgagtctgaccggggccagccgcagcgagacaccacagaacagccccctgccatcctccccgatcgtgcccatgtccaagcccaccaagccctcggtccccccgctgacccccgagcagtacgaggtctacatgtaccaggaggtggacaccatcgagctcacccggcaggttaaggaaaagctggccaagaacggcatctgccagagaatcttcggggagaaggtgctgggcctgtcccagggcagcgtcagcgacatgctgtcccgaccgaagccatggagcaagctgacgcagaaaggccgagaacccttcatccggatgcagctctggctgaacggcgagctaggccagggtgttctacccgtccagggccagcagcaagggccagtcctccactccgtgacatcgctccaggacccgctgcagcagggctgtgtgagctcagaaagcactccaaagacctccgccagctgcagccctgcccctgagtccccgatgagttccagtgagtcggtgaagagcctgaccgagctggtccagcagccctgtccccccatcgaggcgagcaaggacagcaagccaccagagcccagtgacccgccagcatccgactcccagcccacaaccccgctgcctctctccggacactcggccctcagcatccaagaattagtagccatgtccccggagctggacacctacggcataaccaagcgggtgaaggaggtgctgacggacaacaacctcggccagcgcttatttggggagaccatcttagggctcacccaaggctctgtctctgacctccttgcccgccccaaaccctggcataagctcagtctgaaaggacgagagcccttcgtccggatgcagctgtggctgaacgaccccaacaatgtggagaagctgatggacatgaaacggatggagaagaaagcctacatgaagcggcggcacagctcagtcagtgacagccagccctgcgaaccgccctctgtcggcaccgagtacagccagggcgccagcccccagccccagcaccagctgaagaaaccccgggtggtgctggctccggaggagaaggaggcgctgaaacgagcgtatcagcaaaagccatacccgtcaccaaaaaccatcgaagacctcgccacccagctcaacctgaaaaccagcaccgtcatcaactggttccacaactacaggtctcggatccgcagagaactgttcattgaggaaattcaggccgggagtcagggccaggcgggcgccagcgactcaccctcggcccgcagcggccgggcggcgcccagctcggagggcgacagctgcgacggcgtggaggccactgagggcccaggcagcgccgacaccgaggagcccaagtctcagggagaggccgagcgggaggaggtgccgcggccggcggagcagacggagccgccgccctcggggaccccgggcccggacgacgcccgcgacgacgaccacgagggaggccccgtggaaggcccggggcccctgcccagccccgcctccgcgaccgccaccgccgcgcccgcggcccccgaggacgccgctacctcagccgccgccgcgccgggggagggccccgcggccccgagctccgcgccgccgcccagcaacagcagcagcagcagcgccccccgcaggcccagctcgctgcagagccttttcggcctccccgaggccgcgggcgcccgggactcgcgcgacaaccccctgcgcaagaagaaggccgcgaacttgaacagcatcatccaccgcctggagaaggccgccagccgggaggaacctatcgaatgggagttctgaggggccgcggccctggggcgggcagccaggctgggccgcaagggcctggacggggtcggacggggcaggcgctgcggacaccgtggcctgggcttggcccgcggcctgcaccgaccccgggccggacctgagcccgcagcccagaccccctccacggtccgcggcctgcaccgacccgaggcccagatccaaggccgcggcccagacccactctgcggcccgggccgaccctgcggcctccaccaaccccgcggcccagacccagcccgcggcctggacccctggaccgctttgcgcacttaccgccctgcgggccacagggcaaaatcgccataggccaaggtgcatatagaaaacaaaggagcattaagcccaatctatgtcgtgttttcaaggaagaaaacggaaatgtgtggtcgagcttttttgtaccctgaagtgttttttttattgccctaagtgatttccacaggttctggaataactcttacagctttgccttgtgtcctcttgttccgtgtgggctttaaaagaaaaaaaatcaaacccacatattaaaagggggctttttatctgccatctaatggcttcagagcgataatacactattatcttcttaaaccaggaaaaaataaaagggggggtgggatttttcagaaaaattaaaaaagaaagtttttgtagctgttcagttgccactaagagattgcacagtcaaaacgactctaaacacactagtttggattcctaaatattttcaagaaaagaatcttctcgtttgaaactttgaattaaaataaaacacatttactccacat

SEQ ID NO: 13655 - DNA, 2256 bp, Homo sapiens
cacgcggcaggcggtggcgggattctgccgcgtgcgctttcccgccccgcctcgcctagcctcgtcctgcgctcgccacgcctcgggctgtccgttgggccacgcagaccgcgctgcgctcgctccgtcgcggctccgcgtgccccaccttctggctagttttttctagagcccaggctccgcccgtttcccgcttccagggcccggttcgttcccgcccgcacccgtccctctcctctgcacccctgctgcttctgctttgaaggcggaggctccatgttgtcccctcagcgagtggcagcagctgcctcaagaggagcagatgatgccatggagagcagcaagcctggtccagtgcaggttgttttggttcagaaagatcaacattcctttgagctagatgagaaagccttggccagcatcctcttgcaggaccacatccgagatcttgatgtggtggtggtttcagtggctggtgccttccgaaagggcaagtccttcattctggattttatgctacgatacttatattctcagaaggaaagtggccattcaaattggttgggtgacccagaagaaccgttaacaggattttcctggagagggggatctgatccagaaaccactgggattcaaatctggagtgaagttttcactgtggagaagccaggtgggaagaaggttgcagttgttctgatggatacccagggggcatttgacagccagtcaactgtgaaagactgtgctaccatctttgctctaagcactatgactagttctgttcagatttataatttatctcagaacattcaagaagatgatcttcaacagctgcagctcttcacagaatacggtcgtctggcaatggatgaaattttccaaaagcctttccagacactgatgtttttggttagagattggagtttcccttatgaatatagctatggactccaaggaggaatggcatttttggataagcgtttacaggtgaaggaacatcaacatgaagaaattcagaatgttcgaaatcacattcactcatgtttctccgatgtcacctgctttctcttaccacatccaggactccaggtggccacaagccctgactttgatgggaaattaaaagatattgctggtgaattcaaagagcagttacaggcactgataccgtatgtattaaacccatctaagttaatggaaaaggagatcaatggctcaaaggtcacctgtcggggactactggagtattttaaggcatatattaaaatttatcaaggagaagatctgcctcaccccaagtccatgcttcaggccactgctgaagccaacaacttagcagctgcagcctctgccaaggacatttattataacaacatggaagaggtttgtgggggagagaaaccttatttgtctccagacattctagaggagaagcactgtgaattcaaacaacttgctctggaccattttaagaagaccaagaagatgggtgggaaggatttcagctttcgttaccagcaggagctggaggaggaaatcaaggaattatatgagaacttctgcaagcacaatggtagcaagaacgtcttcagcaccttccgaacccctgcagtgctgttcacgggcattgtagctttgtacatagcctcaggcctcactggcttcataggtcttgaggttgtagcccagttgttcaactgtatggttggactactgttaatagcactcctcacctggggctacatcaggtattctggtcaatatcgtgagctgggcggagctattgattttggtgccgcatatgtgttggagcaggcttcttctcatatcggtaattccactcaggccactgtgagggatgcagttgttggaagaccatccatggataaaaaagctcaatagcatcttaacgtgaagatcaaacaagaacacaacaagcccctactgatttctgggtttctgccacggccacaggttcatatccagaggaatggcagatctgagacgatccaggaagagctaaaacatggccctgtaataaatgagcagacctctcctgtggtttcaaattattaaacacacttccatttctcttggaagcatttcttttccttgctgttatagatgcaagcctgtgtctattttcatattactctgctttgtgcactttatggaggaggaagctagaggaaaaatggaaatgcagcttttaagttctttatgtgccacttagtgccttttaagattgattccatg

SEQ ID NO: 13656 - DNA, 3053 bp, Homo sapiens
ctcggcgcgggcgccctcccggccagcggcggcagcccctcctccccggcgccctcaggaccccccagagacccccggcggcggcagcctgccttgctctgccaggaaccatgagtgaggcccgcagggacagcacgagcagcctgcagcgcaagaagccaccctggctaaagctggacattccctctgcggtgcccctgacggcagaagagcccagcttcctgcagcccctgaggcgacaggctttcctgaggagtgtgagtatgccagccgagacagcccacatctcttcaccccaccatgagctccggcggccggtgctgcaacgccagacgtccatcacacagaccatccgcagggggaccgccgactggtttggagtgagcaaggacagtgacagcacccagaaatggcagcgcaagagcatccgtcactgcagccagcgctacgggaagctgaagccccaggtcctccgggagctggacctgcccagccaggacaacgtgtcgctgaccagcaccgagacgccacccccactctacgtggggccatgccagctgggcatgcagaagatcatagaccccctggcccgtggccgtgccttccgtgtggcagatgacactgcggaaggcctgagtgccccacacactcccgtcacgccgggtgctgcctccctctgctccttctccagctcccgctcaggtttccaccggctcccgcggcggcgcaagcgagagtcggtggccaagatgagcttccgggcggccgcagcgctgatgaaaggccgctccgttagggatggcacctttcgccgggcacggcgtcgaagcttcactccagctagctttctggaggaggacacaactgatttccccgatgagctggacacatccttctttgcccgggaaggtatcctccatgaagagctgtccacatacccggatgaagttttcgagtccccatcggaggcagcgctaaaggactgggagaaggcaccggagcaggcggacctcaccggcggggccctggaccgcagcgagcttgagcgcagccacctgatgctgcccttggagcgaggctggcggaagcagaaggagggcgccgcagccccgcagcccaaggtgcggctccgacaggaggtggtgagcaccgcggggccgcgacggggccagcgtatcgcggtgccggtgcgcaagctcttcgcccgggagaagcggccgtatgggctgggcatggtgggacggctcaccaaccgcacctaccgcaagcgcatcgacagcttcgtcaagcgccagatcgaggacatggacgaccacaggcccttcttcacctactggcttaccttcgtgcactcgctcgtcaccatcctagccgtgtgcatctatggcatcgcgcccgtgggcttctcgcagcatgagacggtggactcggtgctgcggaaccgcggggtctacgagaacgtcaagtacgtgcagcaggagaacttctggatcgggcccagctcggaggccctcatccacctgggcgccaagttttcgccctgcatgcgccaggacccgcaggtgcacagcttcattcgctcggcgcgcgagcgcgagaagcactccgcctgctgcgtgcgcaacgacaggtcgggctgcgtgcagacctcggaggaggagtgctcgtccacgctggcagtgtgggtgaagtggcccatccatcccagcgccccagagcttgcgggccacaagagacagtttggctctgtctgccaccaggatcccagggtgtgtgatgagccctcctccgaagaccctcatgagtggccagaagacatcaccaagtggccgatctgcaccaaaaacagcgctgggaaccacaccaaccatccccacatggactgtgtcatcacaggacggccctgctgcattggcaccaagggcaggtgtgagatcacctcccgggagtactgtgacttcatgaggggctacttccatgaggaggccacgctctgctctcaggtgcactgcatggatgatgtgtgtgggctcctgccttttctcaaccccgaggtgcctgaccagttctaccgcctgtggctatccctcttcctgcacgccgggatcttgcactgcctggtgtccatctgcttccagatgactgtcctgcgggacctggagaagctggcaggctggcaccgcatagccatcatctacctgctgagtggtgtcaccggcaacctggccagtgccatcttcctgccataccgagcagaggtgggtcctgctggctcccagttcggcatcctggcctgcctcttcgtggagctcttccagagctggcagatcctggcgcggccctggcgtgccttcttcaagctgctggctgtggtgctcttcctcttcacctttgggctgctgccgtggattgacaactttgcccacatctcggggttcatcagtggcctcttcctctccttcgccttcttgccctacatcagctttggcaagttcgacctgtaccggaaacgctgccagatcatcatctttcaggtggtcttcctgggcctcctggctggcctggtggtcctcttctacgtctatcctgtccgctgtgagtggtgtgagttcctcacctgcatccccttcactgacaagttctgtgagaagtacgaactggacgctcagctccactgagctggctgcgggctccagcggccgtgtgctccagcaggccagagccagacacgacctccctgagcctcacaggcttacaggagtcacctgctccatgtggggactggcctgtttcctgaacacagacctctttcttgtgccttgttcacttctgttgaacccctcgtactgccgggcatttattatactacttcctgtcataaccttctaacttgtttcttgacgaccacctcatgtggccaataaatggactgggagcgttttagctgccattaacttgaaaaaaaaaaaaaaaaaaaaaaaaaaaaaaaaaaaaaaaaaaaaaaaaaaaaaaaaaaaaaaaaaaaaaaaaaaaaaaaaaaaaaaaaaaaaaaa

SEQ ID NO: 13657 - DNA, 3779 bp, Homo sapiens
agttgctgttattgtgacttgtcgggccacggccccggatgttgtggctgccgcggggagatggctgaggccgaaggggttcccacgaccccaggcccggcttcggggtcgactttcaggggccgccgagatgtgtcaggctcctgggagcgggaccagcaggttgaggcggcgcagcgggccctggtggaggtgctggggccttacgagcctctgctgagtcgggtgcaggcagccctggtgtgggagcggccagctaggagcgctctgtggtgcctggggctgaacgcggctttctggttttttgccctgacatctcttcgtcttgtgtttttacttgcatttggcttgatgatcattgtgtgtattgatcaatggaagaacaaaatctggcctgaaataaaagtgccaagacccgacgcattagacaatgagagctggggctttgtgcaccctcggttgctcagcgtgcccgagctctgccaccatgtagctgaagtctgggttagtgggaccattttcataaggaatgttttgcttttcaaaaagcaaaacccaggcaagttctgcttgctgagctgtgggatactgacctttttggctgtcttgggccgctacgtccctgggcttctgctgtcctacttgatgcttgtcactgtcatgatgtggccccttgctgtgtaccaccgactgtgggatcgagcatatgtgcggctgaagccagctctgcagcggctagacttcagtgtccgtggctacatgatgtccaagcagagagagagacaattacgccgcagagctctccacccagaacgagccatggacaaccacagtgacagcgaagaggagcttgctgccttctgtcctcagctggacgattctactgttgccagggaattggccatcacagactctgagcactcagacgctgaagtctcctgtacagacaatggcacattcaatctttcaaggggccaaacacctctaacggaaggctctgaagacctagatggtcacagtgatccagaggaatcctttgccagagaccttccagacttcccttccattaatatggatcctgctggcctggatgatgaggacgacactagcattggcatgcccagcttgatgtaccgttctccgccaggggctgaggagccccaggccccacctgccagccgggacgaggctgcgctgccggagctcctgcttggtgctcttcctgtaggatccaacctcaccagcaaccttgccagcctggtctcccagggtatgattcagctggccttgtcaggggcctcccaaccaggcccttctggagcacctgcccagagagcaacgagaggcttcctccggtcccccagttcagacctggacactgatgctgagggggatgactttgaacttctggaccagtcggagctgagtcagctggaccctgccagttctaggagccactgaggcagagactcctttttggagtcactgtggtttaggtttttttctccccatcccacttaaggtgatggggcaagggaagaactcagctcccctcccctgaattatatttgtatgctgggtggcctggctgatgctcagaggcctccttagagaggacactcactcccctcccaccagctggatgcccatttctgagctcagtcactgaagtgagagtgtgctcccccaagggaggcttctctccatcaggatggtactttgggggaacaaaatagtcagggatattggttcccctttgaggaggtgctgctgtttgcttttaggtatgagtgctcaggggccctcactgaaagagcccatgcctgccttcctcctttcatcgcctctctagagcccccaaagtcaggcagcagctggagtagttacattgtcatcatctttttttttgagacagtttcgctctgttgcccaggctggagtgcagtggtgtgatcttggctttctgcaacgtctgccttccaggttgaagaggttctcctgcctcagcctccttagtagtgggattacaggtgcccgctactatgcccggctaatttttcttttggtatttttagtagaaatggggtttcaccatgttggccaggctggtctcaaactcctgacctcaagtgagctgactgccttggcctcccagagtgctgggattagtcgtcatcttttgttaaaccaggatttgatttttttcttttcttttcttttcttttctttttttttttttttgagacagagtctctctctgttgcccaggctggagtgcagtggcacaatctcggctcactgcagcctccgcctgccgggtcaagcgattctcctacctcagcctcctcagtagctgagattacaggcatgcaccaccatgcccggctaatttttttgtgtttttagtagagatggggtttcaccgtgctggccaggctggtctagaactcctgactgcaaatgatcagcccgcctcagccacccaaagtgttgggattacaggtgtgagccactgtgcccagcgtgatttttttttttttttaaagcaaacttgtcctttggttttgcagaacaggcctgctccctctcatctagcccaccatttcttggggcctgaaccccagtggtccaaagtattgcttgtgaaatttaaaaaatgtgaatatgatgtggggatgggcctcttctacattaccttggcccagggggatcagctggctgggaggattagtgagcacctctgtattttgaggtctgagtcttctggagctgtgtagttaatcttcggtttctgataacccctgggtccatctggccatcagcctcagcagtgagcaaagcaataccatactcatttctatgttcctgttccttcctctgctcctcctttggagaagcaataattcatgggggatgatacagtagcactttacaaatggctccatgtcattcatcccaggggccataatctcttgcaccacctattcttacttcctgttcagctcctttacagcttttattttcaactgcttcccaacttggtggggcctcctttaaggatgagccaatagtaagaatgtggctgtaatcagcagagacccctctgaggggtatctgttctgcagcccctagtgaaatcatgtgatgtgagacagaaacctaaacatggtacttgattctaaacctgtgccagtctatagcctctgcctccccaagcagagctcaagccaaacgcttctgtcctctttccttctgcattaaccctttgctgatcctcaggggccactcccccaacacccctgtacttgggtgagggatgttggacagagcctgttttcatgtactgcaggtgggggtgtgctgacatgtttgctcttggttgatggagaaggtacagaggccagggagtgaaaatggttgacagaagagggaagagttaggtgtctcatagtcactcatagtggggtggtcaggggtaatggcatctccccactttaggcttctcaaacagacttttgacacctctcaagttcagagctctgatgtggaaagacaggaggtgtggggaaggagggggatttcgtgtgtttgcatgagtgtgcgcttcaggccttgggagttggcaagagggagggaaggaaggagagcaaaatcttcggaatgtgtttcttgtacctgagggatcctgccctgaatctccatagtctccactgtgaactgaggaggggaggggtgtgctggggaataaatcttgtatgagaacaaaaaaaaaaaaaaaa

SEQ ID NO: 13658 - DNA, 4608 bp, Homo sapiens
atggagaatagtcttagatgtgtttgggtacccaagctggcttttgtactcttcggagcttccttgctcagcgcgcatcttcaagtaaccggttttcaaattaaagctttcacagcactgcgcttcctctcagaaccttctgatgccgtcacaatgcggggaggaaatgtcctcctcgactgctccgcggagtccgaccgaggagttccagtgatcaagtggaagaaagatggcattcatctggccttgggaatggatgaaaggaagcagcaactttcaaatgggtctctgctgatacaaaacatacttcattccagacaccacaagccagatgagggactttaccaatgtgaggcatctttaggagattctggctcaattattagtcggacagcaaaagttgcagtagcaggaccactgaggttcctttcacagacagaatctgtcacagccttcatgggagacacagtgctactcaagtgtgaagtcattggggagcccatgccaacaatccactggcagaagaaccaacaagacctgactccaatcccaggtgactcccgagtggtggtcttgccctctggagcattgcagatcagccgactccaaccgggggacattggaatttaccgatgctcagctcgaaatccagccagctcaagaacaggaaatgaagcagaagtcagaattttatcagatccaggactgcatagacagctgtattttctgcaaagaccatccaatgtagtagccattgaaggaaaagatgctgtcctggaatgttgtgtttctggctatcctccaccaagttttacctggttacgaggcgaggaagtcatccaactcaggtctaaaaagtattctttattgggtggaagcaacttgcttatctccaatgtgacagatgatgacagtggaatgtatacctgtgttgtcacatataaaaatgagaatattagtgcctctgcagagctcacagtcttggttccgccatggtttttaaatcatccttccaacctgtatgcctatgaaagcatggatattgagtttgaatgtacagtctctggaaagcctgtgcccactgtgaattggatgaagaatggagatgtggtcattcctagtgattattttcagatagtgggaggaagcaacttacggatacttggggtggtgaagtcagatgaaggcttttatcaatgtgtggctgaaaatgaggctggaaatgcccagaccagtgcacagctcattgtccctaagcctgcaatcccaagctccagtgtcctcccttcggctcccagagatgtggtccctgtcttggtttccagccgatttgtccgtctcagctggcgcccacctgcagaagcgaaagggaacattcaaactttcacggtctttttctccagagaaggtgacaacagggaacgagcattgaatacaacacagcctgggtcccttcagctcactgtgggaaacctgaagccagaagccatgtacacctttcgagttgtggcttacaatgaatggggaccgggagagagttctcaacccatcaaggtggccacacagcctgagttgcaagttccagggccagtagaaaacctgcaagctgtatctacctcacctacctcaattcttattacctgggaaccccctgcctatgcaaacggtccagtccaaggttacagattgttctgcactgaggtgtccacaggaaaagaacagaatatagaggttgatggactatcttataaactggaaggcctgaaaaaattcaccgaatatagtcttcgattcttagcttataatcgctatggtccgggcgtctctactgatgatataacagtggttacactttctgacgtgccaagtgccccgcctcagaacgtctccctggaagtggtcaattcaagaagtatcaaagttagctggctgcctcctccatcaggaacacaaaatggatttattaccggctataaaattcgacacagaaagacgacccgcaggggtgagatggaaacactggagccaaacaacctctggtacctattcacaggactggagaaaggaagtcagtacagtttccaggtgtcagccatgacagtcaatggtactggaccaccttccaactggtatactgcagagactccagagaatgatctagatgaatctcaagttcctgatcaaccaagctctcttcatgtgaggccccagactaactgcatcatcatgagttggactcctcccttgaacccaaacatcgtggtgcgaggttatattatcggttatggcgttgggagcccttacgctgagacagtgcgtgtggacagcaagcagcgatattattccattgagaggttagagtcaagttcccattatgtaatctccctaaaagcttttaacaatgccggagaaggagttcctctttatgaaagtgccaccaccaggtctataaccgatcccactgacccagttgattattatcctttgcttgatgatttccccacctcggtcccagatctctccacccccatgctcccaccagtaggtgtacaggctgtggctcttacccatgatgctgtgagggtcagctgggcagacaactctgtccctaagaaccaaaagacgtctgaggtgcgactttacaccgtccggtggagaaccagcttttctgcaagtgcaaaatacaagtcagaagacacaacatctctaagttacacagcaacaggcctcaaaccaaacacaatgtatgaattctcggtcatggtaacaaaaaacagaaggtccagtacttggagcatgactgcacatgccaccacgtatgaagcagcccccacctctgctcccaaggactttacagtcattactagggaagggaagcctcgtgccgtcattgtgagttggcagcctcccttggaagccaatgggaaaattactgcttacatcttattttataccttggacaagaacatcccaattgatgactggattatggaaacaatcagtggtgataggcttactcatcaaatcatggatctcaaccttgatactatgtattactttcgaattcaagcacgaaattcaaaaggagtggggccactctctgatcccatcctcttcaggactctgaaagtggaacaccctgacaaaatggctaatgaccaaggtcgtcatggagatggaggttattggccagttgatactaatttgattgatagaagcaccctaaatgagccgccaattggacaaatgcaccccccgcatggcagtgtcactcctcagaagaacagcaacctgcttgtgatcattgtggtcaccgttggtgtcatcacagtgctggtagtggtcatcgtggctgtgatttgcacccgacgctcttcagcccagcagagaaagaaacgggccacccacagtgctggcaaaaggaagggcagccagaaggacctccgaccccctgatctttggatccatcatgaagaaatggagatgaaaaatattgaaaagccatctggcactgaccctgcaggaagggactctcccatccaaagttgccaagacctcacaccagtcagccacagccagtcagaaacccaactgggaagcaaaagcacctctcattcaggtcaagacactgaggaagcagggagctctatgtccactctggagaggtcgctggctgcacgccgagccccccgggccaagctcatgattcccatggatgcccagtccaacaatcctgctgtcgtgagcgccatcccggtgccaacgctagaaagtgcccagtacccaggaatcctcccgtctcccacctgtggatatccccacccgcagttcactctccggcctgtgccattcccaacactctcagtggaccgaggtttcggagcaggaagaagtcagtcagtgagtgaaggaccaactacccaacaaccacctatgctgcccccatctcagcctgagcattctagcagcgaggaggcaccaagcagaaccatccccacagcttgtgttcgaccaactcacccactccgcagctttgctaatcctttgctacctccaccaatgagtgcaatagaaccgaaagtcccttacacaccacttttgtctcagccagggcccactcttcctaagacccatgtgaaaacagcctcccttgggttggctggaaaagcaagatcccctttgcttcctgtgtctgtgccaacagcccctgaagtgtctgaggagagccacaaaccaacagaggattcagccaatgtgtatgaacaggatgatctgagtgaacaaatggcaagtttggaaggactcatgaagcagcttaatgccatcacaggctcagccttttaacatgtatttctgaatggatgaggtgaattttccgggaactttgcagcataccaattacccataaacagcacacctgtgtccaagaactctaaccagtgtacaggtcacccatcaggaccactcagttaaggaagatcctgaagcagttcagaaggaataagcattccttctttcacaggcatcaggaattgtcaaatgatgattatgagttccctaaacaaaagcaaagatgcattttcactgcaatgtcaaagtttagctgct

SEQ ID NO: 13659 - DNA, 4400 bp, Homo sapiens
acgcggggctcgggtggccgcggcagcagcagcagcaacccccgccgctcgcggtcggcccccgggccgcagccatggtcccgagtggcggcgtcccccagggcctcggcggccgctctgcctgcgcgctgctcctgctctgctacctgaatgttgtaccatctttgggtaggcagactttccctgacgacatcagtgatacccaaagctgagcagagcgtggcttacaaagactttatttattttactgtctttgaaggaaacgttcgcaacgtttctgaagtctcggttgagtatttatgctctcagccttgtgttgtcaatttggaagcagttgtttcatctgagttcagaagtagcattcccgtgtacaaaaaaaggtggaagaatgagaaacatcttcacaccagcaggacacaaatagtacatgtgaaatttccaggcattatggtttacagagatgattatttcatcagacattccatctctgtatctgcagtgatagtacgcgcctggattactcacaaatacagtggcagagactggaatgttaaatgggaggaaaacttgctccatgctgtagcaaagaattataccctcctgcagaccatcccgccttttgaacgccctttcaaagatcatcaagtgtgccttgagtggaacatgggttatatttggaaccttcgggcaaacaggattccacagtgtcctctggaaaatgatgtggttgccctgcttggctttccttatgcctccagtggagaaaacacaggcattgtcaagaagttcccgaggtttcggaaccgagagctggaggccactcgacgccagaggatggattacccagtgtttactgtttcattgtggctttatttactccattattgcaaggccaacctctgtgggattctgtactttgttgactctaatgagatgtacggcacaccttctgtatttcttacggaagagggctatttgcatattcagatgcatcttgtcaaaggggaagaccttgctgtaaaaactaaattcatcatacctttgaaggagtggtttcgactggatatctcttttaacggaggccagatagtagtaaccactagcattggacaggatttgaaaagctaccacaatcagaccattagcttccgggaggatttccattataatgacacagctgggtacttcattattggagggagcaggtatgtggctggcattgaagggttttttggacccctgaagtactatcgccttcgcagtctgcaccccgcccagatttttaatcccctccttgagaagcaacttgctgaacaaatcaagttatattatgaaaggtgtgctgaggttcaagaaatagtatctgtgtatgcatctgcagcaaagcacgggggcgagagacaagaagcatgccacctccacaactcctacctggacctccagcgcaggtatgggagaccctcgatgtgcagagccttcccctgggagaaggagctgaaagacaaacaccccagcttgttccaggcattgctggagatggatctgctgaccgtgccaaggaaccaaaatgaatctgtatcagaaatcggtgggaagatatttgagaaggctgtaaagagactctctagcattgatggtcttcaccaaattagctctatcgtcccctttctgacggattccagctgctgtggataccataaagcatcctactaccttgcagtcttttatgagactggattaaatgttcctcgggatcagctgcagggcatgttgtatagtttggttggaggccaggggagtgagaggctgtcttcaatgaatcttgggtataaacactaccagggtattgacaactaccccctggactgggaactgtcgtatgcctactacagcaacattgccaccaagacaccccttgaccagcacacactgcaaggagatcaggcatatgttgaaacaattagactaaaagatgatgaaatactcaaggtacaaaccaaagaagatggagatgtctttatgtggttgaagcatgaagctacccgaggcaatgcagcagctcagcaacgattggcccagatgctgttctgggggcagcaaggtgtggccaagaatcccgaagcagcaattgagtggtacgccaagggcgccctggagacggaggatcctgcgttaatctatgactatgccattgtgctattcaagggtcaaggagtaaaaaagaacagacggcttgccttagagctgatgaagaaagcagcttccaagggattgcatcaggcagtcaatggcctgggatggtattaccacaaattcaagaaaaattacgccaaagcagcaaagtactggttaaaagcagaagaaatggggaacccagatgcgtcatacaatcttggagtcctgcatttggatggcatcttccctggagttcctggaaggaatcaaactttagctggtgaaattttccataaggctgcgcaaggtggacacatggaagggaccttgtggtgttctctctactatatcacaggcaacctggagacattccctagagatcctgagaaagctgttgtatgggcaaaacatgtagctgagaaaaatggctacttgggccatgtcatccgcaaaggcctcaatgcctacctggaaggttcatggcatgaagctttgctgtattatgttttagcagcagaaactggaattgaagtgtcacagacaaatttagcacacatctgtgaggagaggccagacctggccaggagatacttgggtgttaactgtgtttggagatactataatttctctgtttttcaaatcgatgctccttcctttgcatatttgaagatgggagacctttactactatggccaccaaaaccagtcacaagacctggagttgtctgtgcagatgtacgcccaagccgccctggatggagactcccagggattttttaacctggccctgctaatcgaggaaggtacgataatcccacaccatatcttggatttcttggaaattgactcaactctccattctaataacatctccattctccaggaactgtacgaaaggtgctggagccacagtaacgaggagtccttcagcccctgctccttggcctggctttacctgcacttgcggcttctctggggtgctatcctgcactcagccctgatctactttctgggaacctttctgctatccatattgatcgcctggactgtgcagtatttccagtctgtctcagcaagcgatccccctccaagaccatcccaggcctccccagacactgccacatccactgcaagtccagctgtgactccagctgcagatgcctctgaccaagaccagcccacagtaactaataacccggagccacgtgggtgaactgtgcactccagttctctccagatgagagagaatcttttcaacagctggtattgggaagctggggccagggcatgatcctgataaacaccttaaatgtcttgtcaactggatgcaaattttgcaattggtgtcattttttttaaagtcaaattacaaggaagtacccagatcaggcagtggtaataccaaaggtcatcaaacacatacaaggaacatcttgatcatagggcatgtggggaagtttactgggccatcacagacttttgttctagtgattgtatgtattaggagtcatagcatgccctacggcagatctggattcttatacactaagatgtgtcttaagaatcacagtgcgtgcttcatccctttattgaagaacagaaaattatgactactctacaaggtggataatattttggtacctgtgcttgccacagccctgttcctcaaagctgaattgatagatttctctttgacttccaagacctagcagttataaggcaccttgaaataaattgtttgtgcctggaaatgcagggagggcaatagctttgtaaattggtttacatttttctccttgaatttttctagggtcctagtgcttccgaatcatttaatggcattgtcggatatcttttacatttcaattgcaatccatgaaattacatttagaagattcttagtacttaactgtagtcttctccatgaattacacgttagaatagactggcagcaacggaatatgcagcaagtaagcctctagcttatagtttcatccctacccctcatgcctgcgtgagtctgtacagggatatgtgtgtgtgtgtgtgtgtgtgtgtgttagagaggaagaggaagagcagaatgtctgtatactacatgctgctaaggtagtgaataaatcagtaatgcaatattgtgggtccaaactactctttgcactactttatttacagtagtaaataaaattatttttatacaattgactaccaaaaaaaaaaaaaaaa

SEQ ID NO: 13660 - DNA, 6923 bp, Homo sapiens
cgcgctgcctgagctgagccgccgtaggtgaggggcccgcgtccccgcccgccctgggcgccgcgcctggcactgatcctgccggtcgcccactgtcgccgccgccgccgcccgcgggcaccatgacagctctgagcgctggggttacagactgtggttttgtgcttgctcaccaaagctaacctcagcatgctcaaaaggaagcagagttccagggtggaagcccagccagtcactgactttggtcctgatgagtctctgtcggataatgctgacatcctctggattaacaaaccatgggttcactctttgctgcgcatctgtgccatcatcagcgtcatttctgtttgtatgaatacgccaatgaccttcgagcactatcctccacttcagtatgtgaccttcactttggatacattattgatgtttctctacacggcagagatgatagcaaaaatgcacatccggggcattgtcaagggggatagttcctatgtgaaagatcgctggtgtgtttttgatggatttatggtcttttgcctttgggtttctttggtgctacaggtgtttgaaattgctgatatagttgatcagatgtcaccttggggcatgttgcggattccacggccactgattatgatccgagcattccggatttatttccgatttgaactgccaaggaccagaattacaaatattttaaagcgatcgggagaacaaatatggagtgtttccatttttctacttttctttctacttctttatggaattttaggagttcagatgtttggaacatttacttatcactgtgttgtaaatgacacaaagccagggaatgtaacctggaatagtttagctattccagacacacactgctcaccagagctagaagaaggctaccagtgcccacctggatttaaatgcatggaccttgaagatctgggacttagcaggcaagagctgggctacagtggctttaatgagataggaactagtatattcaccgtctatgaggccgcctcacaggaaggctgggtgttcctcatgtacagagcaattgacagctttccccgttggcgttcctacttctatttcatcactctcattttcttcctcgcctggcttgtgaagaacgtgtttattgctgttatcattgaaacatttgcagaaatcagagtacagtttcaacaaatgtggggatcgagaagcagcactacctcaacagccaccacccagatgtttcatgaagatgctgctggaggttggcagctggtagctgtggatgtcaacaagccccagggacgcgccccagcctgcctccagaaaatgatgcggtcatccgttttccacatgttcatcctgagcatggtgaccgtggacgtgatcgtggcggctagcaactactacaaaggagaaaacttcaggaggcagtacgacgagttctacctggcggaggtggcttttacagtactttttgatttggaagcacttctgaagatatggtgtttgggatttactggatatattagctcatctctccacaaattcgaactactactcgtaattggaactactcttcatgtatacccagatctttatcattcacaattcacgtactttcaggttctccgagtagttcggctgattaagatttcacctgcattagaagactttgtgtacaagatatttggtcctggaaaaaagcttgggagtttggttgtatttactgccagcctcttgattgttatgtcagcaattagtttgcagatgttctgctttgtcgaagaactggacagatttactacgtttccgagggcatttatgtccatgttccagatcctcacccaggaaggatgggtggacgtaatggaccaaactctaaatgctgtgggacatatgtgggcacccgtggttgccatctatttcattctctatcatctttttgccactctgatcctcctgagtttgtttgttgctgttattttggacaacttagaacttgatgaagacctaaagaagcttaaacaattaaagcaaagtgaagcaaatgcggacaccaaagaaaagctccctttacgcctgcgaatctttgaaaaatttccaaacagacctcaaatggtgaaaatctcaaagcttccttcagattttacagttcctaaaatcagggagagttttatgaagcagtttattgaccgccagcaacaggacacatgttgcctcctgagaagcctcccgaccacctcttcctcctcctgcgaccactccaaacgctcagcaattgaggacaacaaatacatcgaccaaaaacttcgcaagtctgttttcagcatcagggcaaggaaccttctggaaaaggagaccgcagtcactaaaatcttaagagcttgcacccgacagcgcatgctgagcggatcatttgaggggcagcccgcaaaggagaggtcaatcctcagcgtgcagcatcatatccgccaagagcgcaggtcactaagacatggatcaaacagccagaggatcagcaggggaaaatctcttgaaactttgactcaagatcattccaatacagtgagatatagaaatgcacaaagagaagacagtgaaataaagatgattcaggaaaaaaaggagcaagcagagatgaaaaggaaagtgcaagaagaggaactcagagagaaccacccatacttcgataagccactgttcattgtcgggcgagaacacaggttcagaaacttttgccgggtggtggtccgagcacgcttcaacgcatctaaaacagaccctgtcacaggagctgtgaaaaatacaaagtaccatcaactttatgatttgctgggattggtcacttacctggactgggtcatgatcatcgtaaccatctgctcttgcatttccatgatgtttgagtccccgtttcgaagagtcatgcatgcacctactttgcagattgctgagtatgtgtttgtgatattcatgagcattgagcttaatctgaagattatggcagatggcttatttttcactccaactgctgtcatcagggacttcggtggagtaatggacatatttatatatcttgtgagcttgatatttctttgttggatgcctcaaaatgtacctgctgaatcgggagctcagcttctaatggtccttcggtgcctgagacctctgcgcatattcaaactggtgccccagatgaggaaagttgttcgagaacttttcagcggcttcaaggaaatttttttggtctccattcttttgctgacattaatgctcgtttttgcaagctttggagttcagctttttgctggaaaactggccaagtgcaatgatcccaacattattagaagggaagattgcaatggcatattcagaattaatgtcagtgtgtcaaagaacttaaatttaaaattgaggcctggagagaaaaaacctggattttgggtgccccgtgtttgggcgaatcctcggaactttaatttcgacaatgtgggaaacgctatgctggcgttgtttgaagttctctccttgaaaggctgggtggaagtgagagatgttattattcatcgtgtggggccgatccatggaatctatattcatgtttttgtattcctgggttgcatgattggactgaccctttttgttggagtagttattgctaatttcaatgaaaacaaggggacggctttgctgaccgtcgatcagagaagatgggaagacctgaagagccgactgaagatcgcacagcctcttcatcttccgcctcgcccggataatgatggttttagagctaaaatgtatgacataacccagcatccattttttaagaggacaatcgcattactcgtcctggcccagtcggtgttgctctctgtcaagtgggacgtcgaggacccggtgaccgtacctttggcaacaatgtcagttgttttcaccttcatctttgttctggaggttaccatgaagatcatagcaatgtcgcctgctggcttctggcaaagcagaagaaaccgatacgatctcctggtgacgtcgcttggcgttgtatgggtggtgcttcactttgccctcctgaatgcatatacttacatgatgggcgcttgtgtgattgtatttaggtttttctccatctgtggaaaacatgtaacgctaaagatgctcctcttgacagtggtcgtcagcatgtacaagagcttctttatcatagtaggcatgtttctcttgctgctgtgttacgcttttgctggagttgttttatttggtactgtgaaatatggggagaatattaacaggcatgcaaatttttcttcggctggaaaagctattaccgtactgttccgaattgtcacaggtgaagactggaacaagattatgcatgactgtatggttcagcctccgttttgtactccagatgaatttacatactgggcaacagactgtggaaattatgctggggcacttatgtatttctgttcattttatgtcatcattgcctacatcatgctaaatctgcttgtagccataattgtggagaatttctccttgttttattccactgaggaggaccagcttttaagttacaatgatcttcgccactttcaaataatatggaacatggtggatgataaaagagagggggtgatccccacgttccgcgtcaagttcctgctgcggctactgcgtgggaggctggaggtggacctggacaaggacaagctcctgtttaagcacatgtgctacgaaatggagaggctccacaatggcggcgacgtcaccttccatgatgtcctgagcatgctttcataccggtccgtggacatccggaagagcttgcagctggaggaactcctggcgagggagcagctggagtacaccatagaggaggaggtggccaagcagaccatccgcatgtggctcaagaagtgcctgaagcgcatcagagctaaacagcagcagtcgtgcagtatcatccacagcctgagagagagtcagcagcaagagctgagccggtttctgaacccgcccagcatcgagaccacccagcccagtgaggacacgaatgccaacagtcaggacaacagcatgcaacctgagacaagcagccagcagcagctcctgagccccacgctgtcggatcgaggaggaagtcggcaagatgcagccgacgcagggaaaccccagaggaaatttgggcagtggcgtctgccctcagccccaaaaccaataagccattcagtgtcctcagtcaacttacggtttggaggaaggacaaccatgaaatctgtcgtgtgcaaaatgaaccccatgactgacgcggcttcctgcggttctgaagttaagaagtggtggacccggcagctgactgtggagagcgacgaaagtggggatgaccttctggatatttaggtggatgtcaatgtagatgaatttctagtggtggaaaccgttttctaataatgtccttgattgtccagtgagcaatctgtaattgatctataactgaattccagcttgtcacaagatgtttataaattgattttcatcctgccacagaaaggcataagctgcatgtatgatgggttactatcaatcattgctcaaaaaaatttttgtataatgacagtactgataatattagaaatgataccgcaagcaaatgtatatcacttaaaaatgtcatatattctgtctgcgtaaactaaggtatatattcatatgtgctctaatgcagtattatcaccgccccgcaaaagagtgctaagcccaaagtggctgatatttagggtacaggggttatagctttagttcacatctttcccatttccactagaaatatttctcttgagagaatttattatttatgattgatctgaaaaggtcagcactgaacttatgctaaaatgatagtagttttacaaactacagattctgaattttaaaaagtatcttctttttctcgtgttatatttttaaatatacacaagacatttggtgaccagaacaagttgatttctgtcctcagttatgttaatgaaactgttgcctccttctaagaaaattgtgtgtgcaagcaccaggcaaagaaatggactcaggatgcttagcggtttaaaacaaacctgtagataaatcacttgagtgacatagttgcgcaaagatgttaagtttcttaagaaaccttttaataactgagtttagcaaaaagaataaaactatatagctcaatttatttaaaaaaatctttgcatgtgtgatgttatcattggcttcatttcttacccaaggtatgtctgttttgccataaatcagcagagtcatttcattctgggtgatcctaacacaccattgctacgttagatttgaaatgacatctctgttaaaagaatcttctatggaaataatggtgccctgcaaaatcttcctttgaactcacaggttagggatcacacaacttacttaatcgttttttgtttttgttttttttccttatatgtcaatggcccatgtcctccgggaaaattagaaaagcaaaatgattacaaagtgctgttagatttcttgtgctgggccagccaagtagaagtggacttgacttggacctttaactattttattacagattggacatttgctgttcagatgttttttaacagagggattatctcagaatcctgtgacctccaggttgttttataatctatttttctctatttaacattcctcagatagataggcaaataggacattccttctgtgtcacagaagtatcgtggtagtggcagtctacagtttatatgattcattgtaactatgagataaagaacaaccagtcatgtggccaaaaggattagatttgatttgatgttcacttggagtttactttttgtacatacaagataaaataaatattggatttgtaaaat

SEQ ID NO: 13661 - DNA, 4807 bp, Homo sapiens
gcatgtacacgcgcacccgcacccgcgcgcctgtatcccgtgctgtttccctggcagacacacaggcgctcacgagtctctccttgccagcctgcagggcggcgacccccaaaacccagctccgggtcccaacctaggcaagaagctgcttctctgccaacagctcctcttcggcctccgtcacagccacctggaccctaccctttcgcgactgctgctgctgctgcccggacgtggaagcagcaagaggcgcttggtcaagacacactgacggtacctacagaatactggacatacggattcagaatccataaggctttatcaccttgaatcaaggatttatttgatatcatcctcggtctttacttcctatcaagtaacattgttttgaaaaatagagttaacacatttgccataagggagtttttttttttttttttaaatacttcgcatactctccaatgcccaaaaatagcaaggtggtaaaaagagaattagatgatgatgttactgagtctgtcaaagaccttctttccaatgaagacgcagctgatgatgcttttaagacaagtgaactaattgttgatggccaggaagagaaagatacagatgttgaagaaggatctgaagtcgaagatgaaagaccagcttggaacagtaaactacaatacatcctggcccaagttggattttctgtaggtttaggaaatgtgtggcgatttccatacctatgtcagaagaatgggggcggtgcatatcttttaccatatttaatactacttatggtaataggtattcccctttttttcttggaactctctgtgggtcaaagaattcggcgaggcagcattggtgtatggaattacataagccctaaactgggcgggattggatttgcaagttgtgtagtgtgctattttgtagctctctactacaacgtcatcattggctggagtttgttttatttttctcagtcttttcagcaacccctgccttgggatcagtgtcctttggtgaaaaatgcttcacacacttttgtagaaccagaatgtgaacaaagttctgccaccacctattactggtacagggaagcactgaatatttcaagttccatttctgaaagtgggggcttaaactggaagatgaccatctgcttgttggctgcctgggtcatggtttgcttggctatgatcaaaggcattcagtcttctggaaaaatcatatattttagttctctgtttccatatgtggtacttatttgcttcctcatcagagcattccttttaaatggttcaattgatggcattcgccacatgtttacccctaagcttgaaataatgctggagcccaaggtctggagagaagctgctactcaagtgttctttgccttaggtctgggatttggtggtgtcattgccttttcaagctacaacaagagagacaacaactgccactttgatgctgtcctggtgtccttcatcaattttttcacttctgtcctggcaacattggtggtgtttgcagttctgggcttcaaagcaaatgtcataaatgagaaatgcattacacaaaattcagagacgatcatgaaatttttgaaaatggggaacattagtcaggatattattccccatcatatcaacctttcaactgttactgcagaagattatcatttagtttatgacatcattcaaaaagtgaaagaagaagagtttcctgctcttcatctcaattcctgtaaaattgaagaagagctaaataaagctgttcaggggaccggcttagcttttattgcctttacagaagcgatgacacattttcctgcatctcccttctggtcagtgatgtttttcctcatgctggtcaatctaggccttggcagtatgtttggaaccattgaagggattgtcacgcctattgtggacactttcaaagtgaggaaagaaattcttactgttatctgttgtcttctggcattttgtattggcctgatatttgtgcaacgctctggaaattactttgttacaatgtttgatgattattctgctacactgcctctgctaattgtagtcattttggagaatattgctgtatgctttgtttatggcatagataagtttatggaagacctaaaagatatgctgggctttgctcccagcagatattactactatatgtggaaatatatttctcctctaatgctattatcattgctaatagctagtgttgtgaatatgggattaagtcctcctggctataacgcatggattgaagataaggcatctgaagaatttctgagctatccaacatggggactggttgtttgtgtctctctggttgtctttgcaatactcccagtccctgtagttttcattgttcgtcgcttcaaccttatagatgatagttctggtaatttagcatctgtgacctataagagaggaagggtcctgaaagagcctgtgaacttagagggcgatgatacaagcctcattcacggaaaaataccgagcgagatgccatctccaaattttggtaaaaatatttatcgaaaacagagtggatccccaactctggatactgctcccaatggacggtatggaatagggtacttgatggcagatattatgccagatatgccagaatctgatttgtagctgggggaaaagtcagtgggttttatttggttcatttttaccaatgaacattggccctagtaggagaagcattaggcttcacttatcagagggcaatctcaggtgttccgtggctgtgatctttaatcctaacagtatatgtcagttcaacttgagcattcttttggattctttggtttacatttgtgcagaaaggattgcagacaaatcttaggagggctgaggtacatgtttgccaggatttttttttaagtacctttggtgtattttcaaatatttctatctcttaaaaaaatggtattacctcagtttctaataatttctgggtttagtagtgttgacaattaaaaatggtatacattaaaatttataagtttgccttcagggtaacttccagtgtcacaatgagcagttctgtaagtgggtgcctctcagcacatttctatgaatatattatgtagataggctgtattgattttggtagcattgacaccttcttaggcaattagttgaagaaaactgcaaaatattttcttatgtaatagctgtatagagcaatagcaatcaaagcatgagaaggcactaacgctgggatgaaagatgagattcagaggtgactgagaatcatgtgagtgatggctgtatattttgtgtaaaatatatgtgtgaaaatgaactaagagtgagttactcagcactctcaagaattatgcagattctgcatttttcttatgccgtgtgcctaaaaacctacttgatatttattgtggtttcaagattattcatagtatatttatacaatatacttgcaatgcatttaagtacttaaagtactaatttgaaaacttgaagcaagatggcattttaattaatatatttctgttttgcttctgttttatgcaaatataaatcatttttaagtgattgttaaaattgtaatgcattacattttaatctacaaataaacaaagtttaaaaatgatgtttgtttttcacattgattttctttgtatcacctgaactggattgtctttcatttcagtcagcacttagacatttcataataactaaacatcacattccaagtgggatgaattacattaattgaatagagttaccaccgcttcagagtctaaggaaaaatagagtattatggttcaatggtgttcttatgtagtcttatgattcttgaaaaagtacttacagcctcccaagaaaccatgtgtacaattgactgcttgctgattcaatattgtctgcaaagtataaaagactatgatttttaaataaaactgttgtatatatgaaattggatagagcagaggaacctcactgagtgtcctctagttaaaaatctttcatttatcctaccaccagatcagttacatttttaaaacaatgatggatatagcagcaaaataagtgaggtaatacacatgccatatcaattgatttatttcagccagtattctcgctctgctatagatagatgttaataaatggtatcacagcatttaaagtattaaatccactggtgcataaatttttagtcttttaaaatatattcatgaatattgtgtttgtatccctttaaaatgtttaatattttataaataggcagtatatgcacattatacaaaactaaaaaattatgacaattcagtgtgaagtaagttctcatccaacatttctcctggccatccattctccatctttaaaggcaatcaccattgccagtttcttctgtatccttctggaaatacaatatattacataaatgacagcattctatattctctcttctatatcttacctatttctgtgaataatttattttggacagcattttatgtatgaatattcacaaatgtgcttccttatttcagaggctgaactaataaaaattttgtttatttttgtgttgaggcaatatttttatatggtaccctaatctttaatacttaacctgccagactttaaccgtaacacaataatgtattgccaaatagcaccattcttcttctctcactctcttgccatgggggctcttaaaaaaaaaagtatacatctaaggtgtacaacatgctgttttgatgtatataaatatagtgaaagcaaataaagtatatatctaaggtgtacaaaaaaaaaaa

SEQ ID NO: 13662 - DNA, 4227 bp, Homo sapiens
gcatgtacacgcgcacccgcacccgcgcgcctgtatcccgtgctgtttccctggcagacacacaggcgctcacgagtctctccttgccagcctgcagggcggcgacccccaaaacccagctccgggtcccaacctaggcaagaagctgcttctctgccaacagctcctcttcggcctccgtcacagccacctggaccctaccctttcgcgactgctgctgctgctgcccggacgtggaagcagcaagaggcgcttggtcaagacacactgacggtacctacagaatactggacatacggattcagaatccataaggctttatcaccttgaatcaaggatttatttgatatcatcctcggtctttacttcctatcaagtaacattgttttgaaaaatagagttaacacatttgccataagggagtttttttttttttttttaaatacttcgcatactctccaatgcccaaaaatagcaaggtggtaaaaagagaattagatgatgatgttactgagtctgtcaaagaccttctttccaatgaagacgcagctgatgatgcttttaagacaagtgaactaattgttgatggccaggaagagaaagatacagatgttgaagaaggatctgaagtcgaagatgaaagaccagcttggaacagtaaactacaatacatcctggcccaagttggattttctgtaggtttaggaaatgtgtggcgatttccatacctatgtcagaagaatgggggcggtgcatatcttttaccatatttaatactacttatggtaataggtattcccctttttttcttggaactctctgtgggtcaaagaattcggcgaggcagcattggtgtatggaattacataagccctaaactgggcgggattggatttgcaagttgtgtagtgtgctattttgtagctctctactacaacgtcatcattggctggagtttgttttatttttctcagtcttttcagcaacccctgccttgggatcagtgtcctttggtgaaaaatgcttcacacacttttgtagaaccagaatgtgaacaaagttctgccaccacctattactggtacagggaagcactgaatatttcaagttccatttctgaaagtgggggcttaaactggaagatgaccatctgcttgttggctgcctgggtcatggtttgcttggctatgatcaaaggcattcagtcttctggaaaagttagtatgttagagcccttcctcattctgctaatcaccatttctggattcatccctctctcaaattctgttacagatttctgtgggcaaatcacacataacacttcattctaggtagttaaatattagtgaaaagtgacacttcaaaagtgtgcttacatttttaaaaagacaaataaaaacagtgttttatagtgaaatctaaggttaattataatctttccttatttcaacaagatctttaaaatttttgtgaatacttaaaagtcctttctttttgccctttattcaattagtcctaatgtttcagttctctaattaccaattagttaaattatggaaattggggaaagtggtaaaatgagtaattcattcattttgtttgtttgatatcatttgtttctctctgctgtaggtgttctaaggaatagctgcataagacattttgaaataatgtaatgtgaagtgtttcttaaagctctgaacatcattaagtagttaataataattccaacaaggaattcagagtaatgtaaaagactaaatatcattccttctaaggcaaattgaaaattagaatggttgtggtttaaaaagacattaagtgaattctaggtagcttgtttgttattatttttaaaggacgctctaggaaagtaattgctattcactattttgctttcgtattacttttttttttttttttcattatcacagccattgttctaaagctctccacatctcttggctggatcatagcaagaatttactgttggctcttctctctgccgtttaactgtccagctgtgctattttccttttcaaagtataactgatttcaggctaacttattaccactcatcatcatatactagcaggaatggcaatagtagtagtagtagcagcagcaatagtagaagtagtcataataacaataataataaatgatgataaagatgtttctgacaagaattagggtaagaacagtaattgaagccaattatttattacaaatgtattttgctttgggtactgtgataactactttttatactttatcccatttaattataaaaaccactcttgagaagtaatttttattttcagaaccattttacagatttaaaataaacaggtttgaggaattagtttaacttatccaaagtttcgtggctattaagttctagtatttggagtcaaatgcaagtctgtctaaatctagagcccatgttctttaactgcaacactataatgtctcaccccgtcctagtcccaccaattagtcaactcttttagggcagaagtctgtctaattcatctttgcttcctgttactttatatttaattaaaaattttagtgactttttaacttgtaaattgtagctgattttacatttatcttcctgaaggaaactctgtatcattttgtcttttgaatttgtgaatatacttgttaacacatctaaatatctttaagtctttggcaatgttattgtattatatgactaaataacttcgaattgttcaattgtgtatgtcttccactatgtcagagccacattcccgtcacattataaatgaaggagtggattcttaaataagacctaaccatatttatatgattcctaacataatatcatttggtagaaagaaaaccaactgtggtcatccagagaagctcaaaaactcttgtactcaggttctcttactaccacgttttgtttctgtttcttcttagtctgtgtcttagcatcacttaaagaactattcatccttttcttatcacagaatcttggggttgttcttctcatgtcatgtagtgtaaatttatatagaaaatgtaatacaatttatttagtacatacatttattattttaatgagaatgcctcaggaaaagactagtatttgggcaatatttgaagaaagaatttaacaggcactgatggggagaaagctagctgtaggtaatgtgagcaaagatgtggaagccaaaattgtcacaattcctcaatctgaaacaatgagttaaatataataacaatgactttatgaggaattaaaggttaagctttgtgtttacctactaaacagaaaatgcctccaaataaacagtgtcacaagtacagaagagagaaatattgtttaaggctagcacatggaaaaacaacttagaggatttagcagctaaaagaagaatgagtcagctggtgatgtgcttggtcaaaacacacagtcatacatgcatatacatataccccaaaatgctaagtggaaactgcatgaattaaaagaggggtatgatagggacattgtcctttgggctaggtaggcacatatcagttggaccacatctgcaatactggattttactgaaatcttgtattttcctttttattatgagaaatttcagctcagtgatcaaagtcttcaaatagttaaaccaaaagaagaatagggctgctttgtgtggccatagagagcaaaactatgatcaaatagtgggtattatggaggaggttgtgatggtggtaagccttcaaagaaagaaaggcctttcaagaatcaaacttgataataatgaaatcagttgcctcaatggtagagagctcagcatcactggaggtggtcacacagaggtagcatgtgccctagttacagaatctattaaggggatgactgtctcaaatatgtaggacagaaatgagaagccccaagcttgcttttaactctaaggtagtattttctactctgactactttcctgttgttactactactatgctaaatactatgcatacattatcttgtttattctttctatcagctagataatttgcatattttatccccattttactgcaaagttgacaagctcagggaaaataaatagttggccagaattaagcaaccaatacatgatagacagggctaaaactgggctacagaattttcaaaaagaatgatacattctgaaggtatgtttataataaacatttttcatatgtaaaa

SEQ ID NO: 13663 - DNA, 3138 bp, Homo sapiens
ctttctccctagggtggcgtgggttgcatccctcggaagagcgaaggaatgagccaggtcggggggcggggagacaggtgcacacaggaggtccagggcttggtccatggggctggtgacctttctgcttcccttgcagaaaactctcccaccatgtcgcagaatggatacttcgaggattcaagctactacaagtgtgacacagatgacaccttcgaagcccgagaggagatcctgggggatgaggccttcgacactgccaactcctccatcgtgtctggcgagagtatccgtttttttgtcaatgtcaaccttgagatgcaggccaccaacactgagaatgaagcgacttccggtggctgtgtgctcctgcacacctcccgaaagtacctgaagttaaagaacttcaaggaagagatccgtgcgcaccgcgacctagatggcttcctggcgcaggccagcatcgtcctgaacgagacggccacctccctggataacgtgctgcggaccatgcttcgccgcttcgccagggaccctgacaacaatgagcccaactgcaacctggacctgctcatggccatgctcttcaccgatgccggggcacccatgcggggtaaagtccacctgctgtcagataccatccaaggggtcaccgccacagtgacaggggtgcggtaccagcagtcgtggctctgcatcatctgtaccatgaaggccctacagaagcggcacgtgtgcatcagccgcctggttcgcccacagaactggggggagaattcctgtgaggttcggttcgtcatcctggtgctggccccacccaagatgaaaagcactaagactgcgatggaggtggcgcgcacgtttgccaccatgttctcggatatcgccttccgccagaagctcctggagacccgcacagaggaggaattcaaggaggccttggtgcatcagagacagctgctcaccatggtgagccacggtccagtggcgccgagaacgaaggaacgcagcacagtctccctccctgcccacagacacccagagcccccaaagtgcaaggactttgtcccttttgggaagggcatccgggaggacatcgcacgcaggttccccttgtaccccttggacttcactgatggcattattgggaaaaacaaggctgtgggcaaatacatcaccaccaccctgttcctctacttcgcctgcctcctgcccaccatcgctttcgggtctctcaatgacgagaacacagacggggccatcgacgtgcagaagaccatagccgggcagagcatcgggggcctgctctacgcgctcttctctgggcagccattggtgattctgctgaccaccgcgcccctggcgctctacatccaggtgattcgtgtcatctgtgatgactatgacctggacttcaactccttctacgcatggacgggcctgtggaatagtttcttccttgcgctttatgcctttttcaacctcagcctggtcatgagtctcttcaagaggtcgacggaggagatcatcgccctcttcatttccatcacgtttgtgctggatgccgtcaagggcacggttaaaatcttctggaagtactactatgggcattacttggacgactatcacacaaaaaggacttcatcccttgtcagcctgtcaggcctcggcgccagcctcaacgccagcctccacactgccctcaacgccagcttcctcgccagccccacggagctgccctcggccacacactcaggccaggcgaccgccgtgctcagcctcctcatcatgctgggcacgctctggctgggctacaccctctaccaattcaagaagagcccctacctgcacccctgcgtgcgagagatcctgtccgactgcgccctgcccatcgcggtgctcgccttctccctcatcagctcccatggcttccgggaaatcgagatgagcaagttccgctacaaccccagcgagagcccctttgcgatggcgcagatccagtcgctgtccctgagggccgtcagcggtgccatgggcctcggcttcctgctgtccatgctcttcttcatcgagcagaacttggtggccgccttggtgaatgcaccggagaacaggctggtgaagggcactgcctaccactgggacctcctgctcctcgccatcatcaacacagggctgtctctgtttgggctgccttggatccatgccgcctacccccactccccgctgcacgtgcgagccctggccttagtggaggagcgtgtggagaacggacacatctatgacacgattgtgaacgtgaaggagacgcggctgacctcgctgggcgccagcgtcctggtgggcctgtccctgttgctgctgccggtcccgcttcagtggatccccaagcccgtgctctatggcctcttcctctacatcgcgctcacctccctcgatggcaaccagctcgtccagcgcgtggccctgctgctcaaggagcagactgcgtaccccccgacacactacatccggagggtgccccagaggaagatccactacttcacgggcctgcaggtgcttcagctgctgctgctgtgtgccttcggcatgagctccctgccctacatgaagatgatctttcccctcatcatgatcgccatgatccccatccgctatatcctgctgccccgaatcattgaagccaagtacttggatgtcatggacgctgagcacaggccttgactggcagaccctgcccacgccccattcgccagccctccacgtcctcccaggctggctctggagctgtgaggggaggtgtaggtgtgtgggtgactgctctgtgctgcgccttctcatggctgactcaggcctggggcatctgggcattgtaggggtgcagtggtatgtgcccacccctctcccattatcctttagctttaggccaagagcgttgctcagggcagcttctgcccagggtgggtgggactgagcaggatggattttcttttgataaaagagtcgatgcctgaaagagaaaccatttccttgattgtgtaaggaacttgctggacgcacattaaagaataaagctcctgtttctaggctcctaaaaaaaaaaaaaaaaaaaaaaaaaaaaaaaaaaaaaaaaaaaaa

SEQ ID NO: 13664 - DNA, 3597 bp, Homo sapiens
cgccgccgctgcgcctcgggcagccccagcgagcggcaactcccgggctggcgcggctcgctttctggctccttccgcgcggcgagctcagccccgctcgatttttcctcttctgttccagccctctcttgtctgggtggctgtggcggcggcagggggatggggaccccgtgtggggaaggggttgaagatcgatgaagattattgttcttttaaaggatgccttagcttcctcccgccgcctttcctctgagccttcctactagagaccgtgaaccagagtcagggatgtaaagacagggggaaagcacgccgggagctccagccagccggggagaccctcctctctgtggaggggagggggatttccagcgacaggtcattggcgaaggggatcgtcgcggggagaggctccccggagggagcggggaatcccacagccctttgtggtgcccgagcccgtgccgcctgctgagcggggtctgtgggagctagctttgtcagtggaaatgcctgccccagagggatattgcttcagttgacctcattttttaaggaccctggctctgcggctttgtccagttcaaaatggcagaaaaggctcccccgggcttaaacaggaagacttcaaggtcgacactttcccttcctccagagcctgtggacattatccggagcaaaacatgctccaggagagttaagatcaatgtggggggcctcaaccacgaagtcctgtggagaacgctggacaggctgcccaggacgcgcctggggaagcttcgagactgcaacacacacgagagcctcctggaagtgtgcgacgactataatctgaacgagaacgagtatttctttgatcggcatccaggagccttcacttccattttaaatttctaccggaccgggaaactccatatgatggaagaaatgtgtgcactttcgtttggccaagaacttgattactgggggattgatgagatctacttggagtcctgctgccaggccagatatcatcaaaaaaaagaacaaatgaacgaagaactgaggcgagaggcagagactatgcgagagcgagaaggagaagagtttgataatacctgctgccctgataaaaggaagaaactgtgggacttgctggagaaacctaactcatcagtggctgcaaagatcctggccatcgtgtctatcctgttcattgtgctttccaccattgctttgtctctcaatacgctgccggagctgcaggaaacggacgaatttggacaactcaatgacaaccgccaattagcacacgtggaggctgtgtgtattgcatggtttaccatggagtaccttttgcgattcttatcctcaccaaataaatggaagttcttcaaaggcccactgaatgtcattgatttgctggccatcttgccgtactatgtcaccatttttctgacggagtccaacaagagcgtgctgcagttccaaaacgtgaggcgcgtggtccagatcttccgaatcatgcgcatcctcaggatcctgaaactcgccaggcattcgacaggcctgcagtctctgggtttcacccttaggcggagttacaatgaattgggcttgttgatattgtttctggccatggggataatgatattttccagcctggtattttttgctgagaaggatgaagatgctaccaagttcaccagtatccctgcatcattttggtgggccaccatcaccatgaccactgttggctatggtgacatttaccctaaaacattactagggaaaattgtgggaggtctgtgctgtattgctggggttctggttattgcccttcctatcccaattattgtgaacaatttttctgagttttacaaggagcagaaacgccaagagaaagcaattaaaaggagggaggctcttgagcgggccaaaaggaacggaagcatcgtttctatgaacttaaaagatgccttcgctcgaagtatggaactgatagatgtggctgttgagaaggccggagagtccgccaacacaaaggactccgccgacgataatcacctgtcgccaagccggtggaagtgggccaggaaggctctgtcggaaacaagctccaacaagtctttcgagaataagtaccaggaggttagccaaaaagactcccacgagcagctgaacaacacgtcttcctccagcccacagcatctgagtgcccagaaactggagatgctatacaatgaaatcaccaagacacagcctcattctcacccaaacccagactgccaagaaaagcctgagaggccatctgcatatgaagaagagattgaaatggaagaagtggtgtgtccacaggagcagctggccgtggcacagaccgaggtcattgtggacatgaagagcacctccagcatcgacagcttcaccagctgtgccaccgacttcacagagacagagagatcgccgctgccgccgccctccgcctctcacttgcagatgaagttcccaaccgacctcccagggacagaagagcaccaaagagctaggggccccccgtttctaactctatccagagagaaaggacctgctgccagggatggcacgctggagtatgccccagttgacataactgtgaacctcgatgccagtggctcccagtgtgggctacatagtcctttgcagtctgacaatgccaccgacagtcctaagagctctctaaaaggcagcaacccactaaagtccagatccctcaaagtgaactttaaggaaaatagaggcagtgcaccacagaccccgcccagcacagccaggccactgccagtcaccacagctgacttttcgctcactaccccgcagcacatcagtaccatcctcttagaagaaaccccctcccagggagacagacccttgctgggcactgaggtttcagcgccttgtcagggaccttccaaagggctgtcccccaggtttcccaagcagaaactgttccctttctcttcaagagagaggaggagcttcactgaaatagatactggtgacgacgaagacttcttagagctcccaggggcaagggaggagaagcaggtggactccagcccaaattgctttgcagataagcctagtgatgggagagaccctttaagagaagagggcagtgtgggctcttcctccccgcaggacacaggtcacaactgtaggcaagacatttaccatgctgtgagtgaagtcaaaaaggacagtagtcaagaagggtgcaagatggaaaatcacttgtttgccccagaaattcattccaacccaggagacacaggttattgtcccacacgtgaaaccagcatgtgactagttacaaaagcaataaattgaaacaaaacaaaacaaaacaaaacttgtttcttaaaaatgcggttaataatgcctgtgaactaaaaaaatgggaagccctccccaaaaaaagtgcataaaatgttatttttgcatggcatgaacagtttagcttaagtactgtttaaataatgagtcaagactgcattttgtaacaaaccaacaaaaatgactgaagaacagtgaacaaataaaaagagctctattaggaaccaaaaaaaaaaaaaaaaa

SEQ ID NO: 13665 - DNA, 1014 bp, Homo sapiens
atgagagctgtcttcatccaaggtgctgaagagcaccctgcggcattctgctaccaggtgaatgggtcttgccccaggacagtacatactctgggcatccagttggtcatctacctgacctgtgcagcaggcatgctgattatcgtgctagggaatgtatttgtggcatttgctgtgtcctacttcaaagcgcttcacacgcccaccaacttcctgctgctctccctggccctggctgacatgtttctgggtctgctggtgctgcccctcagcaccattcgctcagtggagagctgctggttcttcggggacttcctctgccgcctgcacacctacctggacaccctcttctgcctcacctccatcttccatctctgtttcatttccattgaccgccactgtgccatctgtgaccccctgctctatccctccaagttcacagtgagggtggctctcaggtacatcctggcaggatggggggtgcccgcagcatacacttcgttattcctctacacagatgtggtagagacaaggctcagccagtggctggaagagatgccttgtgtgggcagttgccagctgctgctcaataaattttggggctggttaaacttccctttgttctttgtcccctgcctcattatgatcagcttgtatgtgaagatctttgtggttgctaccagacaggctcagcagattaccacattgagcaaaagcctggctggggctgccaagcatgagagaaaagctgccaagaccctgggcattgttgtgggcatatacctcttgtgctggctgcccttcaccatagacacgatggtcgacagcctccttcactttatcacacccccactggtctttgacatctttatctggtttgcttacttcaactcagcctgcaaccccatcatctatgtcttttcctaccagtggtttcggaaggcactgaaactcacactgagccagaaggtcttctcaccgcagacacgcactgttgatttgtaccaagaatga

SEQ ID NO: 13666 - DNA, 4260 bp, Homo sapiens
gtgcagttgagtcgcgagtacggctgagctgcgtaccggcctccctggctctcacactccctctctgctcccgctctcctaatctcctctggcatgcggtcagccccctgcccagggaccacaggagagttcttgtaaggactgttagtccctgcttacctgaaagccaagcgctctagcagagctttaaagttggagccgccaccctccctaccgccccatgccccttcaccccactccgaaattcaccgacctttgcatgcactgcctaaggatttcagagtgaggcaaagcagtcggcaaatctaccctggcttttcgtataaaaatcctctcgtctaggtaccctggctcactgaagactctgcagatatacccttataagagggagggtgggggagggaaaagaacgagagagggaggaaagaatgaaaaggagaggatgccaggaggtccgtgcttctgccaagagtcccaattagatgcgacggcttcagcctggtcaaggtgaaggaaagttgcttccgcgcctaggaagtgggtttgcctgataagagaaggaggaggggactcggctgggaagagctcccctcccctccgcggaagaccactgggtcccctctttccccaacctcctccctctcttctactccacccctccgttttcccactccccactgactcggatgcctggatgttctgccaccgggcagtggtccagcgtgcagccgggagggggcaggggcagggggcactgtgacaggaagctgcgcgcacaagttggccatttcgagggcaaaataagttctcccttggatttggaaaggacaaagccagtaagctacctcttttgtgtcggatgaggaggaccaaccatgagccagagcccgggtgcaggctcaccgccgccgctgccaccgcggtcagctccagttcctgccaggagttgtcggtgcgaggaattttgtgacaggctctgttagtctgttcctcccttatttgaaggacaggccaaagatccagtttggaaatgagagaggactagcatgacacattggctccaccattgatatctcccagaggtacagaaacaggattcatgaagatgttgacaagactgcaagttcttaccttagctttgttttcaaagggatttttactctctttaggggaccataactttctaaggagagagattaaaatagaaggtgaccttgttttagggggcctgtttcctattaacgaaaaaggcactggaactgaagaatgtgggcgaatcaatgaagaccgagggattcaacgcctggaagccatgttgtttgctattgatgaaatcaacaaagatgattacttgctaccaggagtgaagttgggtgttcacattttggatacatgttcaagggatacctatgcattggagcaatcactggagtttgtcagggcatctttgacaaaagtggatgaagctgagtatatgtgtcctgatggatcctatgccattcaagaaaacatcccacttctcattgcaggggtcattggtggctcttatagcagtgtttccatacaggtggcaaacctgctgcggctcttccagatccctcagatcagctacgcatccaccagcgccaaactcagtgataagtcgcgctatgattactttgccaggaccgtgccccccgacttctaccaggccaaagccatggctgagatcttgcgcttcttcaactggacctacgtgtccacagtagcctccgagggtgattacggggagacagggatcgaggccttcgagcaggaagcccgcctgcgcaacatctgcatcgctacggcggagaaggtgggccgctccaacatccgcaagtcctacgacagcgtgatccgagaactgttgcagaagcccaacgcgcgcgtcgtggtcctcttcatgcgcagcgacgactcgcgggagctcattgcagccgccagccgcgccaatgcctccttcacctgggtggccagcgacggctggggcgcgcaggagagcatcatcaagggcagcgagcatgtggcctacggcgccatcaccctggagctggcctcccagcctgtccgccagttcgaccgctacttccagagcctcaacccctacaacaaccaccgcaacccctggttccgggacttctgggagcaaaagtttcagtgcagcctccagaacaaacgcaaccacaggcgcgtctgcgacaagcacctggccatcgacagcagcaactacgagcaagagtccaagatcatgtttgtggtgaacgcggtgtatgccatggcccacgctttgcacaaaatgcagcgcaccctctgtcccaacactaccaagctttgtgatgctatgaagatcctggatgggaagaagttgtacaaggattacttgctgaaaatcaacttcacggctccattcaacccaaataaagatgcagatagcatagtcaagtttgacacttttggagatggaatggggcgatacaacgtgttcaatttccaaaatgtaggtggaaagtattcctacttgaaagttggtcactgggcagaaaccttatcgctagatgtcaactctatccactggtcccggaactcagtccccacttcccagtgcagcgacccctgtgcccccaatgaaatgaagaatatgcaaccaggggatgtctgctgctggatttgcatcccctgtgaaccctacgaatacctggctgatgagtttacctgtatggattgtgggtctggacagtggcccactgcagacctaactggatgctatgaccttcctgaggactacatcaggtgggaagacgcctgggccattggcccagtcaccattgcctgtctgggttttatgtgtacatgcatggttgtaactgtttttatcaagcacaacaacacacccttggtcaaagcatcgggccgagaactctgctacatcttattgtttggggttggcctgtcatactgcatgacattcttcttcattgccaagccatcaccagtcatctgtgcattgcgccgactcgggctggggagttccttcgctatctgttactcagccctgctgaccaagacaaactgcattgcccgcatcttcgatggggtcaagaatggcgctcagaggccaaaattcatcagccccagttctcaggttttcatctgcctgggtctgatcctggtgcaaattgtgatggtgtctgtgtggctcatcctggaggccccaggcaccaggaggtatacccttgcagagaagcgggaaacagtcatcctaaaatgcaatgtcaaagattccagcatgttgatctctcttacctacgatgtgatcctggtgatcttatgcactgtgtacgccttcaaaacgcggaagtgcccagaaaatttcaacgaagctaagttcataggttttaccatgtacaccacgtgcatcatctggttggccttcctccctatattttatgtgacatcaagtgactacagagtgcagacgacaaccatgtgcatctctgtcagcctgagtggctttgtggtcttgggctgtttgtttgcacccaaggttcacatcatcctgtttcaaccccagaagaatgttgtcacacacagactgcacctcaacaggttcagtgtcagtggaactgggaccacatactctcagtcctctgcaagcacgtatgtgccaacggtgtgcaatgggcgggaagtcctcgactccaccacctcatctctgtgattgtgaattgcagttcagttcttgtgtttttagactgttagacaaaagtgctcacgtgcagctccagaatatggaaacagagcaaaagaacaaccctagtacctttttttagaaacagtacgataaattatttttgaggactgtatatagtgatgtgctagaactttctaggctgagtctagtgcccctattattaacaattcccccagaacatggaaataaccattgtttacagagctgagcattggtgacagggtctgacatggtcagtctactaaaaaacaaaaaaaaaaaacaaaaaaaaaaaaacaaaagaaaaaaataaaaatacggtggcaatattatgtaaccttttttcctatgaagttttttgtaggtccttgttgtaactaatttaggatgagtttctatgttgtatattaaagttacattatgtgtaacagattgattttctcagcacaaaataaaaagcatctgtattaatgtaaagatactgagaataaaaccttcaaggttttcca

SEQ ID NO: 13667 - DNA, 2236 bp, Homo sapiens
ggaagccttggcactagcggcgcccgggcgcggagtgcgcagggcaaggtcctgcgctctgggccagcgctcggccatgcgatccgccgcgcggaggggacgcgccgcgcccgccgccagggactctttgccggtgctactgtttttatgcttgcttctgaagacgtgtgaacctaaaactgcaaatgcctttaaaccaaatatcctactgatcatggcggatgatctaggcactggggatctcggttgctacgggaacaatacactgagaacgccgaatattgaccagcttgcagaggaaggtgtgaggctcactcagcacctggcggccgccccgctctgcaccccaagccgagctgcattcctcacagggagacattccttcagatcaggcatggacgccagcaatggataccgggcccttcagtggaacgcaggctcaggtggactccctgagaacgaaaccacttttgcaagaatcttgcagcagcatggctatgcaaccggcctcataggaaaatggcaccagggtgtgaattgtgcatcccgcggggatcactgccaccaccccctgaaccacggatttgactatttctacggcatgcccttcacgctcacaaacgactgtgacccaggcaggccccccgaagtggacgccgccctgagggcgcagctctggggttacacccagttcctggcgctggggattctcaccctggctgccggccagacctgcggtttcttctctgtctccgcgagagcagtcaccggcatggccggcgtgggctgcctgtttttcatctcttggtactcctccttcgggtttgtgcgacgctggaactgtatcctgatgagaaaccatgacgtcacggagcaacccatggttctggagaaaacagcgagtcttatgctaaaggaagctgtttcctatattgaaagacacaagcatgggccatttctcctcttcctttctttgctgcatgtgcacattccccttgtgaccacgagtgcattcctggggaaaagtcagcatggcttatatggtgataatgtggaggagatggactggctcatagccagtgacttcatgtcatcatcagaagttaccgaaagtgaagcgataaagttaatgttcaggacaatgcagacacgctgtcttccttctatggccttcaagaaaccctggagaggaccagtgaggctgcagattcttaaaagagcatagacattaaaattcttgcagaatctgaatgtgtctcctgagacaagcatcgtgatagagttcacagtcttaaaagtctgcattttcaggtggggcaaggtggctcatgcctttaatcccagcattttgggaggctaaggcagggagatggcttgagaccaggagttcaagaccagcctgggcaacatagtgagacgccccccccccccatctctacaaaaaatttaaaaaattagccatggtggtgtgcacctgtggtcccagctactccagaggctgaggtgggaagatcatttgagcccaggaggctgaggctgcaatgagctataattattgcaccactgaactccagcctgggccacatagcaagaccctgtctccaaaaaaaaaaagaaataaaagacgaagaatagggagaaaaacttctctcatatcatttatttggtccttcagtatttctgattacttagtctaattttgcacaaaatcaactgtattagtccattcttgcaaagaaatacctgagactgggtaatttataaagaaaagaggttggattggctcacggttctgcaggctgcacaggaagcatggcagcatctgcttctggggagacctcggggagcttttgctcatggtggaaggcgaagggggagcaggcgtcttgtggcaggagaaggaccaagagaggagaggaagagccgcacacttttaaacaaccagatctcgtgagaagctactccctccgcagcaccaagcgggggatggtgctcaaccattcatgagaactctgtccccatcattcagtcacctccccccaggccccaccgccgattctgaggatgacaattccacatgagatttgggcggggacacacatccaaactatattgtcaaccttctacacagccaatgacttaacagcctcattagaagttacagaaactaaagcaataaagttcggacaatgcagagaggtcaccttccttctatggccttgaagaaaccctggag

SEQ ID NO: 13668 - DNA, 5159 bp, Homo sapiens
ggaagccttggcactagcggcgcccgggcgcggagtgcgcagggcaaggtcctgcgctctgggccagcgctcggccatgcgatccgccgcgcggaggggacgcgccgcgcccgccgccagggactctttgccggtgctactgtttttatgcttgcttctgaagacgtgtgaacctaaaactgcaaatgcctttaaaccaaatatcctactgatcatggcggatgatctaggcactggggatctcggttgctacgggaacaatacactgagaacgccgaatattgaccagcttgcagaggaaggtgtgaggctcactcagcacctggcggccgccccgctctgcaccccaagccgagctgcattcctcacagggagacattccttcagatcaggcatggacgccagcaatggataccgggcccttcagtggaacgcaggctcaggtggactccctgagaacgaaaccacttttgcaagaatcttgcagcagcatggctatgcaaccggcctcataggaaaatggcaccagggtgtgaattgtgcatcccgcggggatcactgccaccaccccctgaaccacggatttgactatttctacggcatgcccttcacgctcacaaacgactgtgacccaggcaggccccccgaagtggacgccgccctgagggcgcagctctggggttacacccagttcctggcgctggggattctcaccctggctgccggccagacctgcggtttcttctctgtctccgcgagagcagtcaccggcatggccggcgtgggctgcctgtttttcatctcttggtactcctccttcgggtttgtgcgacgctggaactgtatcctgatgagaaaccatgacgtcacggagcaacccatggttctggagaaaacagcgagtcttatgctaaaggaagctgtttcctatattgaaagacacaagcatgggccatttctcctcttcctttctttgctgcatgtgcacattccccttgtgaccacgagtgcattcctggggaaaagtcagcatggcttatatggtgataatgtggaggagatggactggctcataggtaaggttcttaatgccatcgaagacaatggtttaaagaactcaacattcacgtatttcacctctgaccatggaggacatttagaggcaagagatggacacagccagttagggggatggaacggaatttacaaaggtgggaagggcatgggaggatgggaaggtgggatccgcgtgcccgggatcttccactggccgggggtgctcccggccggccgagtgattggagagcccacgagcctgatggacgtgttccctactgtggtccagctggtgggtggcgaggtgccccaggacagggtgattgatggccacagcctggtacccttgctgcagggagctgaggcacgctcggcacatgagttcctgtttcattactgtgggcagcatcttcacgcagcacgctggcaccagaaggacagtggaagcgtctggaaggttcattacacgaccccgcagttccaccccgagggagcgggggcctgctacggccgaggcgtctgcccatgctccggggagggcgtgacccatcacagaccccctttgctctttgacctctccagggacccctccgaggcacggcccctgacccccgactccgagcccctgtaccacgccgtgatagcaagggtaggtgccgcggtgtcggagcatcggcagaccctgagtcctgtgccccagcagttttccatgagcaacatcctgtggaagccgtggctgcagccgtgctgcggacatttcccgttctgttcatgccacgaggatggggatggcaccccctgaatgccaggactgtgagagaggatccaggagagcctgactgcgttgcaaacaaaattctccaagcttggttctatcttcagcttccctttttgcaaggaacatgccctggactgagagtgggtccccactttctttctttctttctttcttttttgagacagagtgtcgctctgtccctcaggctggaatgcaatggcacgatctctgctcactgcaacctccgcctcccgggttcaagcgattttcctgcctcagcctcctgagtacccaggattacaggcaccaggcacctgccaccatgcctagctaatttttgtagttttagtagagacagggtttcaccatgttgcccaggctggtctcgcactcctgacctcaagtcatccacctgcctcagcctcccaaagtgctgggattacaggcacgagccactgcgcccatgtagggtttccctttcctgatttgtgaaataagactgtcccagtaggcacccactgatgcctcctcttcctcttctaaatctcagggttcgtcattgtgccaatgcccgatgttttcacccctccgtcttaaagcattgttgcaatttcatcacctagatgacataacagccttacaaaaggacagggaggagtgtctgttcctactctcacatagcggaggaaagttagagcctctcagtctctgtttatgaggactcattaatctcaaataattgatgcatttttcatacattagggtctctgtccatgtgtcttcctgatattgttatagaaatggcttcaggctgctggtaacagatgctgcggaaaaagaatgccttaaacaaagccaggcacggtgactcacacctgtaatcccagcactttgggaggctaaggtgggaggatcacttgagcctaggagttagacacctacccagcctgagcaacacagtgagacctcatctctacaaaaaacaaataattagctagatgtcgtggcgcacagctgtagtctcagctacttaggaggctgaggcgggaggattatttgagcctgggaggtcaaaactgcaatgagctaagattgcactactgcactccgggctgggagacagagtaagaccctgccttaaaaaaaaaaaaaaaaaaatgccttaaagaaaataataagagaagggtgtgttctcttccaagtaatgagccgatcaaggggaagcaacccaaggctagcaggctcttttcaattcccagctctgccactcttagcatggcagagagttggcctcattatgccagtatggctgccacagtgtcagacatcacattccaggcagtggaaaggagaaagaaccaaagggcatccctttctcttgaagcagtccctgtgaggggggattatctggaagccccaacccaatttctgcttccaaccattatccatagaaacaactggaagttgagaagtgcagtcttttaggtgggcacctggctgccctgtatgaaaccagaattaggttggtcagcaggaaaacaagaaaacacttactgtgttgactgaggtttttgacgcatcgctttattgtcaaattaaacaactctatctcattctgcactgaaacacgtactaccattgcctataattggaaaatgatcctcagaggcacagaagatgccctgatggaaagtttgccccttgggcaaagagacagccatgggaaccttcagacatagagagagaaggtggcttttctccctacattcctcaaatagctaagatttggccagtgtgttttctaagtcaattctagtgtgtttcatcctcacctcttccctctgtggctttgatgatggaagtgtagtcctaacctactgcacagctgggaccccctgcccctagatcccaatactggggatgggaggaccttgcactattcccctcagtccatctatcgaggtctttgcaggaagcatactgggaattgaaacgagagcctaaatgacatctaagaaaggcagtgttcaataccaggtattaggtgaggatgggattctaaggacatcagtgggaggcagggagccaccttcagacctcagcatggaagcttccaagatccagaggaagaggcaacagcactgagagtcataggtagaagaatcatcacagccctgctaaccaggcagctgatgcccctctcccctggctccctgtgtccaaatcctacaggggcatctgttggctgaactcaacctgaagccaaagagaagatgagtggagagaggcaacatttatagagctcaggtttctagggctggagagggatctggagggacacacaggagacacctggcataaccaaaaaatgattaaaaaaaaaaaaaaaaagaaacatctatggagcatgggacacggggagtggaggcagctaaaagccatctcatctttcaccgtattcaacaagcccattataacaagtctttcacgctcaaccattcaaacaatcccaacaatcccagcctaagaatttcctggcatttgatgaaaatggctgtgggttttgctatctttaagctccctgggaagcaggatataagcccagggctggcaggctctttctagctacctgctcttgcacatagagtttgcctcatggttgcaagaaggctgccatagctccagatggcacatagacattccaggcagcaggaaaaaggaaggagcacttaaccgaaggaggtcagggagttggttagtctccacctgaagaagagagccatgaaccagcttcagttgactaacgggctcctgtgagtgcatctttggacttttctggaggttgaaatctagatgtggtatgtgtcttaaagcagccaccaactcctcccattaccttccaagtgagcccaactacacgatggagcctcttccctgcccttggatctgggctgagcctctgacttgcgttgaccaacagaatgcagtgaaagtgatgccgatactaccctccctgccctagacttgggatacctggcagctatattcttccattcctcaggacttgcaaaaacgggtctcagcatgccttcccagagccatgaggtgtttctttgcccattcattgatctgagaagtgagtgtaaggagtttaaatcaacctctgttctgtgctagttaaggtaataaagttgctgcagtccagggggtaggtacctgtggacggctctgcgaataggacagttgcatttcttgggaatcaagtgcatccctaggctggcagtgcagcagaaatactgaataaaatgtgacaaatctccctgga

SEQ ID NO: 13669 - DNA, 11113 bp, Homo sapiens
ggctccgggggtggcggtcggacagtgtctagcacgctcagtccgggcttggggccccgcggcggagaaggaggtagagggggcggcggcggcggcggcggtggtggcggcaccatgtttcttcactcagttaatctctggaacctggcgttttatgtcttcatggtctttctggcaaccctggggctgtgggatgtcttcttcggcttcgaggagaataagtgcagtatgagctacatgtttgagtacccggagtatcagaaaatagaacttccaaagaaactggcaaaacgctatcccgcatatgagttgtatctttatggagagggatcctatgctgaagaacacaaaattctccctttgacgggtattccagttctctttcttcctggtaatgctggaagttataagcaagttcgttctattggctccattgcacttagaaaagcagaggacattgacttcaagtaccactttgacttctttagtgtgaacttcaatgaagaactggtggctttgtatggtggaagtcttcagaagcagaccaagtttgtacatgaatgtattaaaacaattctcaaactctataagggtcaagaatttgctccaaaaagtgtggcaataattggtcattctatgggtggccttgttgcaagagcattgcttacactgaaaaattttaagcatgatctgataaatcttcttattacacaagccacacctcatgttgctcctgtgatgccattagatcgtttcattacagatttttatacgactgtaaacaactattggattctaaatgctcgacacataaatttaaccacactttctgtagctggaggattccgggattaccaagttcgttcaggattgacttttctaccaaaattaagccatcataccagtgccttatctgttgtgagttcagcagtgcctaagacctgggtctcaacagaccacctctccattgtgtggtgtaaacaattgcagttgactacagttcgagcattctttgatcttattgatgctgatactaaacaaataactcaaaattccaagaagaaactgtcagttttgtatcaccactttataagacacccatcaaaacattttgaggaaaatccagctataatttctgacttaacagggacatctatgtgggttctagtaaaagtgtccaaatggacctatgtagcttacaacgaatctgagaagatatattttacatttcctcttgaaaatcatagaaaaatctacactcatgtctattgtcagagcactatgctggatacaaatagttggatttttgcttgcataaacagcacttctatgtgcctgcaaggggttgatttatcatggaaagctgaactgctgccaacaattaagtatctgacattaagacttcaagactatccatctttgtctcatcttgttgtttatgtaccatctgttcgtggaagtaagtttgttgtagattgtgaattctttaaaaaagagaaaagatacatacagcttcctgtaactcatcttttttcctttggattgtcttcaaggaaagtggtgttaaatacaaatggcctatactacaatctagagcttctgaactttggacagatataccaagcttttaaaatcaacgtggtaagcaagtgctcagcagtcaaagaagaaataaccagtatctatagacttcatattccttggtcttatgaagattcactaaccattgcacaggctccatcttccacagaaatttctctgaaactccatattgctcaaccagaaaacaatacccatgtggcattatttaaaatgtacacgtcatcagactgtcggtacgaggtgacagttaagacttccttttcacaaatacttggacaggtagttagatttcatggtggagctcttcctgcttatgtcgtatctaatatccttcttgcttatagaggacagttatattctcttttctcaacaggttgttgcttagaatatgctaccatgttggataaagaagccaaaccatacaaagttgatccttttgtaattatcattaagtttctgttggggtataaatggtttaaagaattgtgggatgtattattgttaccagaattagatgccgtcattttaacttgtcagagtatgtgtttccccctgatatccttgattctctttctgtttggaacgtgtactgcctactggagtggcctactgtcttctgcatctgtgagacttctttcttcattgtggctagctttgaaaagaccctctgaacttcctaaagatatcaagatgatatcaccagacttgccctttttgacaattgtcttgatcatagttagttggacaacttgtggagcactagccatacttctttcttatctttactatgtgtttaaggttgttcatctgcaagccagcttaacaacttttaagaatagccagcctgtgaatcccaaacactctagaagaagtgaaaagaaatccaatcatcataaagactcctcaatacaccatcttcgtttatctgccaacgatgctgaagatagccttcgcatgcacagtactgtgattaacttactaacatggattgtattactcagcatgccttctctaatttattggctaaagaatcttaggtattattttaaacttaatcctgatccatgtaaacctttggcatttatccttattccgactatggcaattcttggaaatacttacactgtttcaataaaatcaagtaaattgttgaagactacttcacaatttccacttcctctggctgttggtgtgattgcttttgggtcagcacatttatataggcttccatgctttgtcttcattcctcttttactccatgcattatgcaactttatgtaagattggacttaaggaatgatgaagataatttatgtgtttagggccagtgataagagggaacacacagatccatcagtatggacagcaagatcctttggagaagacaagtctatttttacaatattgaaaataggaaattagttttgtaatgtttgagggaagtagttgaagcatggttttgttttgtggtgtggaatccatgtagtaatcatttttgaaaaattcatgaagggatatatggtgatcactatcattgaggactcctgtgcatataaaatagtctgttttatcaactgtacgagaagtctgatatgagagatttagtagatgcagcattatttgcagtctcactgcaagcattctgctcatttcatcaaactttttttcacaaaagtaggttattttgaatttgctatagtttacctattaagaaataagtctttaaataactgatgaaatttatagctgtttggtttctcaaaggttaaatagccacagaaagcctttggttagtttttggcagccaccatgaacaaagtggatcttgtcttcttacatctatgaaaatagagctttgaatggtaaggagatatgttttcttggtaaccaatgcaagattgatgggtggaaacatgattcaaacttacacaatttttcttgctatttttcaaatatgaatcttactatatattctcggtgaacatcaggagactattaaagaggtctgctgttaaatgtaaagaaaaaatgctcgtagctatttgcttcctggtattggagcagttcagttgtttagtttataccattggattcaattcattgcaccatggttgccaaaagtgcctgaggtcataatggattgttaaaataactaaattccagtggttggaaactctaggtttgtaccattttttctgctgtgggaaaaaacaacaacaacaacatgatcaaggtaacatcacatttgatgtataatattatactattaatggaatatcagtagacaactgttaacccattagtagcatgagtataaacagtacacctgaataaattggagacattagccactaggtttaacagtggaatcttgatttgcctaggtgacttctgggattactgtttgacaaataagagtaacattttatttcatttcagaatttacgtcacttttagctacaagagtaggaagaaggtaatcggcaaggcagaagagtatactctttgccttaggatagcgtaaactcaggctgagacatacccggcttatagagttcttctagatgtgtagactgtaaatgcccaaatcctctcaactaaagttttagtgattccacaaagcctctcatgtaaatttccagtgattccaccattgcacttgtgaatatgtatccttgttagtacccagggatgtcctcgagcaccagttttattttatctgccattgcatctggattccattacagcctctcagctgttactgcctgtggacagttacttctgcttactgcctgtagagagttacctaacttctcttctcagttcttcctcaggtcctggctattttggcctcagttgaagggagtcttgctctcatctctgagggttttaagtttgtttgatcccattgttgtcttttctagctttgagcatgtttttcagtattcatattttaacttactgagaacattaaagggaaatgataaactcgtggtggggatatggcagacaggtgcttgtttgtttgagagaagtagcagaagagataaaatacaaagtgctatatgtttcagctggagaggaaagagagagaatttattagattatatacttgtcccatggcataccacgtatatgtttaaatagggacacatctccctatgtttaactatacttataaacaactttgatacacattgcgtcttttattctgtcacctgatattttagtgtatctcaagttacagattacatgtgtccttaaactatttctgaatttggacttagttccatatacagaaagaactttagaaaattcattaatttggatcttctattgatagccataaatattatgtttatgtattctaaaacctctttgtttagttagtactgttcatgaatgtaacaagcttcaatttctcatttgtgagtagtacatttgctttttgtttgtttgtttgtttgtttttgagatggagtctcacgctgtcaccaggctggagtgcagtggcgcgatttcagctcactgcaacctccacctcccaggtgcaagtgatgcccctgcctcagcctcccgagtagctgggactacagacacccgccaccacacctggctaatttttgtatttttagtagagacggggtttcaccatgttggctaggctggtctcaaactcttgacctcgtgatttgcccgcctctgcctccccaaagtgctgggattacaggcgtgagccaccacgcccagccgtacatttactttttaaagcagcagactaggtacactaattctcactcaaatattttcatgggaatgtagttatcaccaagtcctaaagtattatttatgccaaaaaaaatttcattttaaggactacaaaaatgattctaattaaacattttataatcaatagtaggttgggtctttagccattatatgtgtatatatacagacacatatgtatacacttacattttgacagggtcttcattgagtcttgatgcactttaaacccagctggctaccagagatgcgaaggtgggctctttgaagattagcaaaatggacgtttctgtcacttgagaaaaggaaagttctttgcctttaaattacacagttttcatcatgcccacaatctatattattggctggttaaacagcactgccctattagcaatgttaacaaaaatgaaattatttattggcggttatagattatctaattcaggaaatttctgagctcaacttttacagcaactgttatgccttctaatttagcaattgagttatgagtaagttttgtgcttaactcctagaccctattgttgataaccagatcaaatatagtctgtacagaggaaaacactgggaacatttagtatttctaaagcctcctttggagttactactgattgtaatttggaactgataataggtagagattgctaacactgttttttttcctggatcttttttatgccagaaattaaacaggttctgctaactcttttttttctcttggttatcaccagaatgaaaatatttaaagtgatgactctagaaaagccatctgtgcctggttaacattgagtttgagtctcttcaatatatattgatcatgtattgattaatctttattttttcatattttggctagacaaattcagatctatataatggaataccccttcttgagtgaactatactactaatctacatgattatatagtaaggaaaaaagaagaaataactgtaataggcatagtgtttgttgttggttgtcttgtcattcatgtgatactactcatttccaaaattcacacaaacttacatgaggtggattatttgttttgttcattatttagttcctatatgttttttctttagaaacagagtctcattctgtcacccaggctggagtccaatggggcggtcatagttcactgcagccttgaactctttggctcatgtgatcctcccatctcagcctcccacagcaggtgagactacaggtacatgccactgtgcctgactttttaatttttttgtagagacgaggtttcagtttgttgcccaagctgatcttgaactcctggtttcaagcgatcctcccacctcggcctcccaaagtagtgggatttcaggcatgaccacctggcctagttcctatacttttcttaattcttcagacttctcacatttagtatagtgcattcatttcatcttgctgtttattagcaccctttgtggccaagggaaataaaaggtggtaaaattcagttttcagtttagttcttgaaagctctgggaaatggaggaaacacaaaactatgaattaaactagggctgttgatttctgaacccccagataaatcagttgacccacattttcattttaggtgttaggtccaaattagcataatgtcttgcattattattaggttcagtgtgaaactttacagtgctgcatttgaagtttagtaactggttattattaatcatttgggaaaaatgaaaatgtgttgggactttctatgactaggcatttgttgattatttttcatgattgctttttgttttctcattgtgtaggatttgtgaacttgtatattacaggaaacaagatactttgtaaaatttactggggaaaatccatttggagtgcatgacatttgccaggataagaaagcagtaatatgtttgtattataaaattacaccctgccagaaaactttctttcctagtaaggtaaatgtagaagggacttttacagcatagtaagttgattaggagccaaaattttattccagtttttttttgaactaagaatgttttaaattctgtaatgaacttttatgtttacccattactcatgcattctttcacaatatgtttaatagcctgaggaaataggaaagctgtgaagctactaccattctttacttttaataagaataataggaaagaaaagtcaggtcagtaatccaaatccaaatatgtatactgcaaatgctcaagaagtcacattttttgataaattgtattgagtacagaagaacttatatgaatttattatctgttaataacttagttttgacaacagaataacatttggaaattgtgagaataatcaagctgtttttccattaacagtgtaaattcataacatgtccttcaaaaggtgatattctaagctgtcttaattgtctacggttgataacttttaaataaagtacaggactttctgaaagtgtttggcatgttatgctgccaaaaacaatctgtgttttgaaataccaattaatcagttaatttctgaagactttgtataggacttgatatatgagtcagaatctgtctgtactcattctgtacattgtaactttgaacacttatgaaaaactgtatctgttggtgtgttttgattagttagtgtagatttgtttgcgtatttgaattccgattttagtttaggaagactaaaagtagccatttttgtaaagttcatatgctattttttaatgtcatttttgtttttaatatttatacaatagtgatgttactagtaaaaaatgtttatagataacacgtagagctattaactgttcaaaagcctacatgataggcatattttgtatttcgtgttgcactcgttctgtttcatattggactttttacatcccttttttagcaaaaaaaagagacacatttgaattctctttagcataaagctgtgcattggaaactatgtgactgtatccatacggttagcaaaatactctttgccaccaaaggtaaatgaaactgtaaaatacctctggatatttgtgccaatgaacttttcttagcatattaggattaaagcaaaaataatcttttcagtatgtttcatctaggacttacaataaatgtttaaaccatgaaaacttatatttcataccctaatttttctttgaaaatattcaagatttgtagcctagtgtgttctattttgtgtgattgcttgaatgttttctgattttattgggtaaaagtttgcctagtaatgatctttcagcaattcattgaaataattatttgaagtaatcttgcttcagatttaatttgtgatgtacattgttgtacaagccattttagtacaggtgtctcatttatgtagttgaaaggtgactgtggaatttcttttgttttttatgtatttccattcagtctctttatatagtcacatgtttcacaggggaacttgtccactggaacctaacatagtacaaccttttaatatgcgtatcttaaaggaaaatattataaaacaagatattaatactaaagtgttaacattaatatgttgttctcatggaagaaaagtagaaaatgtgataggcttagaaattattttttatcagcattaagtgcttcaatttctccccataaagattctaaggaaatttcagttcctcatattatagttttccccataatttaatattactaagtatttctctgcccagtaatgttgatgcagtttgcataaatagccttggaagtaaggaggcaggacagaaagccaaatatcgaaatctctggccttgatttagtgacagtttattctaatggggaccataggtgttattagtaaaaagatagtgtacaaggcctaagttcagtttacattgttctttgaaatgagttcatcttttgtgttgaataattgtattctaagtaggagatgcctgtatttaacataatcatgctttctatataatcaaatatgtatttgttggaatactggtagaaataaccttcccttcctccactgtgcagtggaaaaaaaactcccgatttatactgtatataaattaggaaattatgttacatatttacatttttaaaaatataaaaatgacatattattttgaagtgattgtattatagtttctgaagcttatgactggctataaatataacaacatacccatgagaaaccagaccaaaattgaatatatatcatcactgtgaccttgaacttatagtcatttgggataaaacagagtgtgccttgaaatgataaagagtgccctgcaattttataactgtacattttattatgggtggtcctctcaaattggccccaaatccttgtcttcgaggttggtgaaataaaagtttaaaataaaagttgactggtatttcctttagtatttccagaactattgctgtagaggcctcccttaattttcagagttctcattttgaattaaagtagacttacgctacatagatgtagaaaattaggtttggcttaggtttctgaaaaaatattctaggagaaggtggtagcattgttctgaacttaccacacttggaaaaactaatcttcaaatgtaattttttgtcttattaatgagtaatctgtcaaagacatgaattctttgacttgtgctcattctttctgaacttattgaggcttatatatatcaaataaggttaatttacacaataattatttttaataattaataaactcattcatgtagtatattttaaaacattatttcctctcatttttccttctcttttttcttcctatatatttttaaggcttcaagagaaaacgggcttcagtttttaaaaaaatgtagacttgcatttttactgtgcttatttaaaataatggatataatttatattaaggtccaaattattttattcacaggataatcatggtctctgataaaagatgcccacatttctgtgtactcacagttgttgtatatttttcaatttcaattttgaaagtaaactcaacacattgttttcccattttacctccactacctactcgccagacaaaaatatagatttctctaaaaacacatacaaagaaaatgtctttccttaaaacatgatcttattgacatgaaggtagtttgagcaagggtatgtaataaaataaatggctctcaacctgcatcaatttttatactatagttaaaaaatttatagaggacaacctatgtgttatgctgagatagactcagtaatcatttgtttgcaaattgattatttttttctcatccatccagaaagtacagtgcataacaacaacacttaacaagtgcagaggaacctgtcctgtagtatataataaaaaatgattgtcaccttgctgatctttccatttaaacatgcatgatctccagtactttgtacaatgtatagtatattaaatacatttatgtgtaattttgtgtgtatttttatatggtataattaaaattattacatttatgtgattgtaattcacaaaaagtactacttactatattctgtagagtgtgttgtgaatgtttttacctgtgtttgagcattatggtgtaggtttaatagatgaatatttgccttcagtctctgctcaggtattaatgtgtagtaatttttggtgctttctttttaatctgtgataatctggtgttctgaatgttcaaaaataaatttggttgaatacgca

SEQ ID NO: 13670 - DNA, 7226 bp, Homo sapiens
cgggcgcgggcgcgtccctgtggccagtcacccggaggagttggtcgcacaattatgaaagactcggcttctgctgctagcgccggagctgagttagttctgagaaggtttccctgggcgttccttgtccggcggcctctgctgccgcctccggagacgcttcccgatagatggctacaggccgcggaggaggaggaggtggagttgctgcccttccggagtccgccccgtgaggagaatgtcccagaaatcctggatagaaagcactttgaccaagagggaatgtgtatatattataccaagttccaaggaccctcacagatgccttccaggatgtcaaatttgtcagcaactcgtcaggtgtttttgtggtcgcttggtcaagcaacatgcttgttttactgcaagtcttgccatgaaatactcagatgtgaaattgggtgaccattttaatcaggcaatagaagaatggtctgtggaaaagcatacagaacagagcccaacggatgcttatggagtcataaattttcaagggggttctcattcctacagagctaagtatgtgaggctatcatatgacaccaaacctgaagtcattctgcaacttctgcttaaagaatggcaaatggagttacccaaacttgttatctctgtacatgggggcatgcagaaatttgagcttcacccacgaatcaagcagttgcttggaaaaggtcttattaaagctgcagttacaactggagcctggattttaactggaggagtaaacacaggtgtggcaaaacatgttggagatgccctcaaagaacatgcttccagatcatctcgaaagatttgcactatcggaatagctccatggggagtgattgaaaacagaaatgatcttgttgggagagatgtggttgctccttatcaaaccttattgaaccccctgagcaaattgaatgttttgaataatctgcattcccatttcatattggtggatgatggcactgttggaaagtatggggcggaagtcagactgagaagagaacttgaaaaaactattaatcagcaaagaattcatgctaggattggccagggtgtccctgtggtggcacttatatttgagggtgggccaaatgttatcctcacagttcttgaataccttcaggaaagcccccctgttccagtagttgtgtgtgaaggaacaggcagagctgcagatctgctagcgtatattcataaacaaacagaagaaggagggaatcttcctgatgcagcagagcccgatattatttccactatcaaaaaaacatttaactttggccagaatgaagcacttcatttatttcaaacactgatggagtgcatgaaaagaaaggagcttatcactgttttccatattgggtcagatgaacatcaagatatagatgtagcaatacttactgcactgctaaaaggtactaatgcatctgcatttgaccagcttatccttacattggcatgggatagagttgacattgccaaaaatcatgtatttgtttatggacagcagtggctggttggatccttggaacaagctatgcttgatgctcttgtaatggatagagttgcatttgtaaaacttcttattgaaaatggagtaagcatgcataaattccttaccattccgagactggaagaactttacaacactaaacaaggtccaactaatccaatgctgtttcatcttgttcgagacgtcaaacagggaaatcttcctccaggatataagatcactctgattgatataggacttgttattgaatatctcatgggaggaacctacagatgcacctatactaggaaacgttttcgattaatatataatagtcttggtggaaataatcggaggtctggccgaaatacctccagcagcactcctcagttgcgaaagagtcatgaatcttttggcaatagggcagataaaaaggaaaaaatgaggcataaccatttcattaagacagcacagccctaccgaccaaagattgatacagttatggaagaaggaaagaagaaaagaaccaaagatgaaattgtagacattgatgatccagaaaccaagcgctttccttatccacttaatgaacttttaatttgggcttgccttatgaagaggcaggtcatggcccgttttttatggcaacatggtgaagaatcaatggctaaagcattagttgcctgtaagatctatcgttcaatggcatatgaagcaaagcagagtgacctggtagatgatacttcagaagaactaaaacagtattccaatgattttggtcagttggccgttgaattattagaacagtccttcagacaagatgaaaccatggctatgaaattgctcacttatgaactgaagaactggagtaattcaacctgccttaagttagcagtttcttcaagacttagaccttttgtagctcacacctgtacacaaatgttgttatctgatatgtggatgggaaggctgaatatgaggaaaaattcctggtacaaggtcatactaagcattttagttccacctgccatattgctgttagagtataaaactaaggctgaaatgtcccatatcccacaatctcaagatgctcatcagatgacaatggatgacagcgaaaacaactttcagaacataacagaagagatccccatggaagtgtttaaagaagtacggattttggatagtaatgaaggaaagaatgagatggagatacaaatgaaatcaaaaaagcttccaattacgcgaaagttttatgccttttatcatgcaccaattgtaaaattctggtttaacacgttggcatatttaggatttctgatgctttatacatttgtggttcttgtacaaatggaacagttaccttcagttcaagaatggattgttattgcttatatttttacttatgccattgagaaagtccgtgagatctttatgtctgaagctgggaaagtaaaccagaagattaaagtatggtttagtgattacttcaacatcagtgatacaattgccataatttctttcttcattggatttggactaagatttggagcaaaatggaactttgcaaatgcatatgataatcatgtttttgtggctggaagattaatttactgtcttaacataatattttggtatgtgcgtttgctagattttctagctgtaaatcaacaggcaggaccttatgtaatgatgattggaaaaatggtggccaatatgttctacattgtagtgattatggctcttgtattacttagttttggtgttcccagaaaggcaatactttatcctcatgaagcaccatcttggactcttgctaaagatatagtttttcacccatactggatgatttttggtgaagtttatgcatacgaaattgatgtgtgtgcaaatgattctgttatccctcaaatctgtggtcctgggacgtggttgactccatttcttcaagcagtctacctctttgtacagtatatcattatggttaatcttcttattgcatttttcaacaatgtgtatttacaagtgaaggcaatttccaatattgtatggaagtaccagcgttatcattttattatggcttatcatgagaaaccagttctgcctcctccacttatcattcttagccatatagtttctctgttttgctgcatatgtaagagaagaaagaaagataagacttccgatggaccaaaacttttcttaacagaagaagatcaaaagaaacttcatgattttgaagagcagtgtgttgaaatgtatttcaatgaaaaagatgacaaatttcattctgggagtgaagagagaattcgtgtcacttttgaaagagtggaacagatgtgcattcagattaaagaagttggagatcgtgtcaactacataaaaagatcattacaatcattagattctcaaattggccatttgcaagatctttcagccctgacggtagatacattaaaaacactcactgcccagaaagcgtcggaagctagcaaagttcataatgaaatcacacgagaactgagcatttccaaacacttggctcaaaaccttattgatgatggtcctgtaagaccttctgtatggaaaaagcatggtgttgtaaatacacttagctcctctcttcctcaaggtgatcttgaaagtaataatccttttcattgtaatattttaatgaaagatgacaaagatccccagtgtaatatatttggtcaagacttacctgcagtaccccagagaaaagaatttaattttccagaggctggttcctcttctggtgccttattcccaagtgctgtttcccctccagaactgcgacagagactacatggggtagaactcttaaaaatatttaataaaaatcaaaaattaggcagttcatctactagcataccacatctgtcatccccaccaaccaaattttttgttagtacaccatctcagccaagttgcaaaagccacttggaaactggaaccaaagatcaagaaactgtttgctctaaagctacagaaggagataatacagaatttggagcatttgtaggacacagagatagcatggatttacagaggtttaaagaaacatcaaacaagataaaaatactatccaataacaatacttctgaaaacactttgaaacgagtgagttctcttgctggatttactgactgtcacagaacttccattcctgttcattcaaaacaagaaaaaatcagtagaaggccatctaccgaagacactcatgaagtagattccaaagcagctttaataccggtttggttacaagatagaccatcaaacagagaaatgccatctgaagaaggaacattaaatggtctcacttctccatttaagccagctatggatacaaattactattattcagctgtggaaagaaataacttgatgaggttatcacagagcattccatttacacctgtgcctccaagaggggagcctgtcacagtgtatcgtttggaagagagttcacccaacatactaaataacagcatgtcttcttggtcacaactaggcctctgtgccaaaatagagtttttaagcaaagaggagatgggaggaggtttacgaagagctgtcaaagtacagtgtacctggtcagaacatgatatcctcaaatcagggcatctttatattatcaaatcttttcttccagaggtggttaatacatggtcaagtatttacaaagaagatacagttctgcatctctgtctgagagaaattcaacaacagagagcagcacaaaagcttacgtttgcctttaatcaaatgaaacccaaatccataccatattctccaaggttccttgaagttttcctgctgtattgccattcagcaggacagtggtttgctgtggaagaatgtatgactggagaatttagaaaatacaacaataataatggagatgagattattccaactaatactctggaagagatcatgctagcctttagccactggacttacgaatatacaagaggggagttactggtacttgatttgcaaggtgttggtgaaaatttgactgacccatctgtgataaaagcagaagaaaagagatcctgtgatatggtttttggcccagcaaatctaggagaagatgcaattaaaaacttcagagcaaaacatcactgtaattcttgctgtagaaagcttaaacttccagatctgaagaggaatgattatacgcctgataaaattatatttcctcaggatgagccttcagatttgaatcttcagcctggaaattccaccaaagaatcagaatcaactaattctgttcgtctgatgttataatattaatattactgaatcattggttttgcctgcacctcacagaaatgttactgtgtcacttttccctcgggaggaaattgtttggtaatatagaaaggtgtatgcaagttgaatttgctgactccagcacagttaaaaggtcaatattcttttgacctgattaatcagtcagaaagtccctataggatagagctggcagctgagaaattttaaaggtaattgataattagtatttataactttttaaagggctctttgtatagcagaggatctcatttgactttgttttgatgagggtgatgccctctcttatgtggtacaataccattaaccaaaggtaggtgtccatgcagattttattggcagctgttttattgccattcaactagggaaatgaagaaatcacgcagccttttggttaaatggcagtcaaaattttcctcagtgtatttagtgtgttcagtgatgatatcactggttcccaactagatgcttgttggccacgggaagggaaatgacttgttctaattctaggttcacagaggtatgagaagcctgaactgaagaccattttcaagagggacggtatttatgaatcagggttaggctccatatttaaagatagagccagtttttttttttaaatagaacccaaattgtgtaaaaatgttaattgggttttttaaacattgttttatcaagtcactgttaagtagaagaaagccatggtaaactgatacataacctaaattataaaagcagaaacctaactcactcgtcaagggaagttaccttttgaggaaagttaaagtacttttttccctatctgtatctatagcaacaacccagaacttacaaacttctccaaagattttattgattgttatatcaaatcagaatgtaaacatgaactcttgcatatatttaaaattgtgttggaacatttgaacatgaatgctgtttgtggtacttaagaaattaattcagttggattatcattatgtgatactggcagattgcagtgcaaccttatgccaataaaatgtaatttaacagccccagatattgttgaatattcaacaataacaagaaaagcttttcatctaagttttatgctttaattttttttctttttttttctttttcttttgtttccttggtactaattttaatttttatttggaagggagcagtataaagcttatttgtatttagtagtgtatctcatagatacagacaaggcaagagatgataagctgtttaaatagtgtttaatattgattgggggtggggagaaagaaaaagtgtattacttaaagatactatatacgttttgtatatcattaaatctttaaaagaaatgaaataaatttattgtttacagaaaaaaaaa

SEQ ID NO: 13671 - DNA, 15731 bp, Homo sapiens
cgcgcggccccctccagcccccggctcccggcagcagaagcagaaggcagcgccaggggccgccgccgccgccgagctccgcggggctcgggagccggccccggcgaggaggcgcggaaccatggccgatgggggcgagggcgaagacgagatccagttcctgcgaactgatgatgaagtggttctgcagtgcaccgcaaccatccacaaagaacaacagaagctatgcttggcagcagaaggatttggcaacagactttgtttcttggagtccacttccaattccaagaatgtgcccccagacctctccatctgcacctttgtgctggagcagtccctctctgtccgggcgctgcaggagatgctggctaacaccgtggagaaatcagaagggcaagttgatgtggaaaaatggaaattcatgatgaagactgctcaaggtggtggtcatcgaacactcctctacggacatgccatattgctgcgccattcctatagtggcatgtatctgtgctgcctgtccacctcccggtcttcaactgataagctggcttttgatgttggcttgcaagaggacaccacaggggaggcttgttggtggaccatacaccctgcctctaagcagcgatcagaaggagaaaaagtacgagttggagatgacctcatcttagttagcgtgtcctctgaaaggtacttgcacttgtcttatggcaacggcagcttacacgtggatgccgctttccagcagactctctggagcgtggccccaatcagctcaggaagtgaggcagcccaagggtatctcattggtggtgatgtcctcaggttgctgcatggacacatggacgagtgtctcactgtcccttcaggagaacatggtgaagagcagcggagaactgttcattatgaaggtggcgctgtgtctgttcatgcacgttccctttggagactagagacgctaagagttgcgtggagtggaagccacataagatggggacagccattccgactacgccatgtcacaacaggaaaatacttgagtctcatggaagacaaaaaccttctactcatggacaaagagaaagctgatgtaaaatcaacagcatttaccttccggtcttccaaggaaaaattggatgtaggggtgagaaaagaagtagatggcatgggaacatctgaaataaaatacggtgactcagtatgctatatacaacatgtagacacaggcctatggcttacttaccagtctgtggacgtgaaatccgtgagaatgggatctatacaacgtaaggctattatgcatcatgaaggccacatggatgatggcataagtttgtcgagatcccagcatgaagaatcacgcacagcccgagttatccggagcacagtcttccttttcaatagatttataaggggccttgatgctctcagcaagaaagcgaaggcttccacagtcgatttgcctatagagtccgtaagcctaagtctgcaggatctcattggctacttccaccccccagatgagcatttagagcatgaagacaaacagaacagactacgagccctgaagaatcggcaaaatctcttccaggaagagggaatgatcaacctcgtgcttgagtgcatagaccgtttgcacgtctacagcagtgcagcacactttgctgatgttgctgggcgagaagcaggagagtcttggaaatccattctgaattctctgtatgagttgctggcggctctaattagaggaaatcgtaaaaactgtgctcaattttctggctccctcgactggttgatcagcagattggaaagactggaagcttcttcaggcattctggaagttttacactgtgttttagtagaaagtccagaagctctaaatattattaaagaaggacatattaaatctattatctcacttttagacaaacatggaagaaatcacaaggttctggatgtcttgtgctcactctgtgtttgccacggggttgcagtccgttctaaccagcatctcatctgtgacaatctcctaccaggaagagacttgttattgcagacacgtcttgtgaaccatgtcagcagcatgagacccaatatttttctgggcgtcagtgaaggttctgctcagtataagaaatggtactatgaattgatggtggaccacacagagccctttgtgacagctgaagcaactcacctgcgagtgggctgggcttccactgaaggatattctccctaccctggagggggcgaagagtggggtggaaatggtgttggagatgatctcttctcctatggatttgatggccttcatctctggtcaggttgtattgctcgtactgtaagctcaccaaaccaacatctgttaagaactgatgatgtcatcagttgctgtttagatctgagtgccccaagcatctcgttccgaattaatggacaacctgttcaaggaatgtttgagaatttcaacatcgatggcctcttctttccagtcgttagtttctctgcaggaataaaagtacgctttctgcttggagggcgacatggagaattcaaatttcttcctccacctgggtatgctccttgttatgaagctgttctgccaaaagaaaagttgaaagtggaacacagccgagagtacaagcaagaaagaacttacacacgcgacctgctgggccccacagtttccctgacgcaagctgccttcacacccatccctgtggataccagccagatcgtgttgcctcctcatctagaaagaataagagaaaaactggcagagaatatccatgaactctgggttatgaataaaattgagcttggctggcagtatggtccggttagagatgacaacaagagacaacacccatgcctggtggagttctccaagctgcctgaacaggagcgcaattacaacttacaaatgtcgcttgagaccctgaagactttgttggcattaggatgtcatgtgggtatatcagatgaacatgctgaagacaaggtgaaaaaaatgaagctacccaagaattaccagctgacaagtggatacaagcctgcccctatggacctgagctttatcaaactcaccccatcgcaagaagcaatggtggacaagttggcagaaaatgcacataatgtgtgggcgcgggatcgaatccggcagggctggacttatggcatccaacaggacgtaaagaacagaagaaatcctcgccttgttccctacactcctctggatgaccgaaccaagaaatccaacaaggacagcctccgcgaggctgtgcgcacgctgctggggtacggctacaacttggaagcaccagatcaagatcatgcagccagagccgaagtgtgcagcggcaccggggaaaggttccgaatcttccgtgccgagaagacctatgcagtgaaggccggacggtggtattttgaatttgagacggtcactgctggagacatgagggttggttggagtcgtcctggttgtcaaccggatcaggagcttggctcagatgaacgtgcctttgcctttgatggcttcaaggcccagcggtggcatcagggcaatgaacactatgggcgctcttggcaagcaggcgatgtcgtggggtgtatggttgacatgaacgaacacaccatgatgttcacactgaatggtgaaatccttcttgatgattcaggctcagaactggctttcaaggactttgatgttggcgatggattcatacctgtgtgtagccttggagtggctcaagtgggtaggatgaactttggaaaggatgtcagcaccttgaaatatttcaccatctgtggcttacaagagggctatgaaccatttgccgttaatacaaacagggatattaccatgtggctgagcaagaggcttcctcagtttcttcaagttccatcaaaccatgaacatatagaggtgaccagaatagacggcaccatagacagttccccatgtttaaaggtcactcagaagtcttttggttctcagaacagcaacactgatatcatgttttatcgcctgagcatgccgatcgagtgcgcggaggtcttctccaagacggtggctggagggctccctggggctggcctttttgggcccaagaatgacttggaagattatgatgctgattctgactttgaggttctgatgaagacagctcatggccatctagtgcccgatcgtgttgacaaagacaaagaagctactaaaccagagtttaacaaccacaaagattatgcccaggaaaagccctctcgtctgaaacaaagatttttgcttagaagaacaaagccagattacagcacaagccattctgcaagactcaccgaagatgtccttgctgatgatcgggatgactatgatttcttgatgcaaacgtccacgtactattactcagtgagaatctttcctggacaagaacctgctaatgtctgggtgggctggattacatcagatttccatcagtatgacacaggctttgacttggacagagttcgcacagtaacagttactctaggagatgaaaaaggaaaagtgcatgaaagcatcaaacgcagcaactgctatatggtatgtgcgggtgagagcatgagccccgggcaaggacgcaacaataatggactggagattggctgtgtggtggatgctgccagcgggctgctcacattcattgccaatggcaaggaactgagcacatactatcaggtggaaccgagtacaaaattatttcctgcggtttttgcacaagctacaagtcccaatgttttccagtttgagttgggaagaataaagaatgtgatgcctctctcggcgggattattcaagagtgagcacaagaaccccgtgccgcagtgccccccgcgcctccacgtgcagttcctgtcacacgtcctgtggagcagaatgcccaaccagtttttgaaggtagatgtgtctcgaataagtgaacgccaaggctggttggtgcagtgtttggatcctctgcagttcatgtctcttcatatccctgaggaaaacagatctgttgacatcttagagttgacagagcaggaggaattgctgaaatttcactatcacactctccggctctactcagccgtctgtgctcttgggaaccaccgggtggcccatgccctgtgcagccatgtggatgaacctcagctcctctatgccattgagaacaagtacatgcctggtttgctgcgtgctggctactatgacctgctgattgacatccacctgagctcctatgccactgccaggctcatgatgaacaacgagtacattgtccccatgacggaggagacgaagagcatcaccctgttccctgatgagaacaaaaaacacggccttccagggatcggcctcagcacctccctcaggccacggatgcagttttcctcccccagttttgtaagcattagtaatgaatgttaccagtacagtccagagttcccactggacatcctcaagtccaaaaccatacagatgctgacagaagctgttaaagagggcagtcttcatgcccgggacccagttggagggactactgaattcctctttgtacctctcatcaagcttttctataccctgctgatcatgggcatctttcacaacgaggacttgaagcacatcttgcagttgattgagcccagtgtgtttaaagaagctgccactccggaggaggagagtgacacgctggagaaagagctcagtgtggacgatgcaaagctgcaaggagctggtgaggaagaagccaaggggggcaagcggcccaaggaaggcctgctccaaatgaaactgccagagccagttaaattgcagatgtgcctactgcttcagtacctctgtgactgccaggtccggcaccggatagaagccattgtagccttttcagatgattttgtggctaagctccaagacaatcaacgtttccgatacaacgaagtcatgcaagccttaaacatgtcagctgcactcacagccaggaagacaaaggaatttagatcaccacctcaagaacagatcaatatgcttctcaattttaaggatgacaaaagtgaatgtccatgtccagaagaaattcgtgaccaactattggatttccatgaagatttgatgacacattgtggaattgagctggatgaagatgggtctctggatggaaacagtgatttaacaattagagggcgtctgctatccctggtagaaaaggtgacatatctgaagaagaagcaagcagaaaaaccagttgagagtgactccaaaaagtcctccactctgcagcagctgatttctgagaccatggtccgatgggctcaggagtctgtcattgaagaccccgagctggtgagggccatgtttgtgttgctccatcggcagtatgacggcattgggggtcttgttcgggccctgccaaagacctacacgataaatggtgtgtccgtggaggacaccatcaacctgctggcatcccttggtcagattcggtccctgctgagtgtgagaatgggcaaagaagaagagaagctcatgattcgtggattaggggatattatgaataacaaagtgttttaccagcaccctaatctcatgagggcactggggatgcacgagactgtgatggaggtcatggtgaacgtccttggaggtggagagtccaaggaaatcacctttcccaagatggtggccaactgttgccgttttctctgttacttctgtcgtataagtaggcagaatcaaaaagctatgtttgatcatctcagttatttactggaaaacagcagtgttggtcttgcctccccagctatgagaggttcaacaccactggatgtggctgcagcttcggtgatggataataatgaactagcattagctctgcgtgagccggatctagaaaaggtagttcgttatttggctggttgtggactgcaaagttgccagatgctggtgtctaagggctatccagacattgggtggaacccagttgaaggagagagatatcttgactttctcagatttgctgtcttctgtaatggggagagtgtggaggaaaatgcaaatgtcgtggtgagattgctcattcggaggcctgagtgttttggtcctgctttgagaggagaaggtgggaatgggcttcttgcagcaatggaagaagccatcaaaatcgccgaggatccttcccgagatggtccctcaccaaatagcggatccagtaaaacacttgacacagaggaggaggaagatgacactatccacatggggaacgcgatcatgaccttctattcagctttgattgacctcttgggacgctgtgctcctgagatgcatttgattcatgccgggaagggagaagccatcagaattaggtccattttgagatccctcattcccctgggagatttggtgggcgttatcagcatcgcttttcagatgccaacaatagccaaagatgggaatgtggtggaacctgacatgtctgcggggttttgcccagatcacaaggcagccatggttttattccttgacagggtctatgggattgaggttcaagacttcctcctccatcttcttgaggttggctttctgccagatctccgggcggctgcttctttagatacggcagctttgagtgctacagacatggccttggccctcaatcggtacctttgcacagccgtcttgccattgttaacaagatgtgctcctctctttgctggcacagagcaccacgcttctctcattgactcattacttcatactgtgtatagactttctaagggctgttcacttaccaaagctcagcgggattccatagaagtttgtttactctctatttgtggacaactgagaccttctatgatgcagcacttactcagaagattagtatttgatgtcccattattaaatgaacacgcaaagatgcctcttaaactgctgacaaatcattatgaaagatgctggaaatattactgcctgcctggagggtggggaaactttggtgctgcctcagaagaagaacttcatttatcaagaaagttgttctggggcatttttgatgccctgtctcaaaagaaatatgaacaagaacttttcaaactggcactgccttgcctgagtgcagttgcgggagctttgcctccagactacatggagtcaaattatgtcagtatgatggaaaaacagtcatcaatggattctgaagggaactttaacccacaacctgttgatacctcaaatattacaattcctgagaaattggaatacttcattaacaaatatgcagaacactcccatgacaaatggtcaatggacaagttggcaaatggatggatttatggagaaatatattcagactcttctaaggttcagccattaatgaagccatataagctattgtctgaaaaggaaaaagaaatttatcgctggccaatcaaagaatctttaaaaactatgctggctaggactatgagaactgaaagaactcgggagggagacagcatggccctttacaaccggactcgtcgtatttctcagacaagccaggtttctgtggacgctgcccatggttacagtccccgggccattgacatgagcaatgttacactatctagagacctgcatgctatggcagaaatgatggctgaaaactaccataatatatgggcaaagaaaaagaaaatggagttggagtccaaaggaggaggaaaccatcctctgctggtgccctatgatacactgacagccaaagagaaagccaaggatagagaaaaagcacaggacatcctcaagttcttgcagatcaatggatatgctgtatccagaggatttaaggacctggaactggacacgccttctattgagaaacgatttgcctatagtttcctccaacaactcattcgctatgtggatgaagcccatcagtatatcctggagtttgatggtggcagcagaggcaaaggagaacatttcccttatgaacaagaaatcaagttctttgcaaaagtcgttcttcctttaattgatcagtatttcaaaaaccatcgtttatacttcttatctgcagcaagcagacctctctgctctggaggacatgcttccaacaaagagaaagaaatggtgactagcctattctgcaaacttggagttcttgtcaggcataggatttcactatttggcaatgatgcaacatcaattgtcaactgtcttcatattttgggtcagactttggatgcaaggacagtgatgaagactggcctggagagtgttaaaagtgcactcagagcttttctggacaacgctgcagaggatctggagaagaccatggaaaacctcaagcagggccagttcactcacacccgaaaccagcccaaaggggttactcagattatcaattacaccacagtggccctgctgccaatgctgtcgtcattatttgaacatattggccagcatcagttcggagaagacctaatattggaagatgtccaggtgtcttgttatagaattctgactagcttatatgctttgggaaccagcaagagtatttacgtggagaggcaacgttctgcattaggagaatgtctagctgcctttgctggtgcttttcctgtagcatttttggaaactcatctggacaaacataatatttactccatctacaataccaagtcttcacgagaaagagcagctctcagtttgccaactaatgtggaagatgtttgtccaaacattccgtctttggagaaactcatggaagaaatcgtggaattagccgagtccggcattcgctacactcaaatgccacatgtcatggaagtcatactgcccatgctttgcagctacatgtctcgttggtgggagcatggacctgagaacaatccagaacgggccgagatgtgctgcacagccctgaactcagagcacatgaacacacttctagggaacatattgaaaatcatatataataacttggggattgatgagggagcctggatgaagaggctagcagtgttttcccagcctataataaataaagtgaaacctcagctcttgaaaactcatttcttgccgttaatggagaaactcaagaaaaaggcagctacggtggtgtctgaggaagaccacctgaaagctgaggccaggggggacatgtcggaggcagaactcctcatcctagatgagttcaccacactggccagagatctctatgccttctaccctctcttgattagatttgtggactataacagggcaaagtggctaaaggagcctaacccagaagcagaggagctcttccgcatggtggctgaagtgtttatctactggtcgaagtcccataatttcaaaagagaagagcagaacttcgttgtacagaatgaaatcaacaatatgtctttccttattactgataccaagtcaaagatgtcaaaggcagctgtttctgatcaggaaaggaagaaaatgaagcgcaaaggagatcggtattccatgcagacctctctgattgtagcagctctgaagcggttactgcccattgggttgaacatctgtgcccctggggaccaggagctcattgctctggccaaaaatcgatttagcctgaaagatactgaggatgaagtacgagatataatccgcagcaatattcatttacaaggcaagttggaggatcctgctattagatggcaaatggctctttacaaagacttaccaaacaggactgatgatacctcagatccagagaagacggtagaaagagtattggatatagcaaatgtgctttttcatcttgaacagaagtctaaacgtgtgggtcgaagacattactgtctggtggaacatcctcagagatctaaaaaggctgtatggcataaactactgtctaagcagaggaaaagggctgttgtagcctgcttccggatggcccccttatataatctgccaaggcatcgggctgtcaatctctttcttcagggatatgaaaagtcttggattgaaacagaagaacattactttgaagataaactgatagaagatttagcaaaacctggggctgaacctccagaagaagatgaaggcactaagagagttgatcctctacatcagctgatccttctgtttagtcggacagctttaacagagaaatgcaaactggaggaagattttttatatatggcctatgcagatattatggcaaagagttgtcatgatgaggaagatgacgatggtgaagaggaagtgaagagttttgaagaaaaagaaatggaaaagcaaaagcttctataccagcaagcccgactccacgatcgtggcgcggctgagatggtgctacagacaatcagtgccagcaaaggtgaaactggaccaatggtagcagctactctgaaacttggaattgctattttaaatggtgggaactccacagtacagcagaaaatgcttgactacctcaaggagaaaaaggatgtgggcttctttcagagcctggccggcctgatgcagtcatgtagtgtccttgacctaaatgcatttgagcgacaaaacaaagctgaaggtcttgggatggtgacagaggaaggatcaggagaaaaggttctgcaggacgatgagttcacctgtgacctcttccgattcctgcaactactctgtgagggacacaactcagattttcagaattatctgagaactcagactggcaataatacaactgtcaacataattatctccactgtagactacctactgagagttcaggaatcaattagtgacttttattggtattactctgggaaagatgttattgatgaacaaggacaacggaatttctccaaagctatccaagtggcaaaacaagtctttaacactcttacagagtatattcagggtccttgcactgggaatcaacagagtttggcacacagcaggctgtgggatgctgtggtcggctttcttcatgtgtttgcccatatgcagatgaagctgtcgcaggattccagtcaaattgagctattaaaagaattaatggatctgcagaaggatatggtggtcatgttgctgtccatgttagaaggtaatgttgttaatggaacgattggcaaacagatggtggatatgcttgtggaatcttccaacaacgtggagatgattctcaaattttttgacatgttcttaaaactaaaggatttgacgtcgtctgatacttttaaagaatatgaccccgatggcaagggagtcatttccaagagggacttccacaaagcgatggagagccataagcactacacgcagtcagaaacggaatttcttttgtcttgtgcggagacggatgagaatgaaaccctcgactacgaagagttcgtcaaacgcttccacgaacctgcgaaggacatcggcttcaacgtcgccgtccttctgacaaacctctctgagcacatgcccaacgatacccgacttcagacttttctggaattagcagagagcgtcctgaattatttccagccctttctgggccgcatcgaaatcatgggaagcgccaaacgcatcgagagggtctattttgaaatcagtgagtccagccgaacccagtgggagaagccccaggtcaaggagtccaaaagacagttcatatttgacgtggtcaacgaaggcggagagaaagagaagatggaactctttgtgaacttctgcgaggacaccatctttgaaatgcagctggcggctcagatctcggagtcggacttgaacgagaggtcagcgaataaggaagaaagcgagaaggagaggccggaagagcaggggccgaggatggctttcttctccattctgacggtcaggtcggccctgtttgcgctcaggtacaatatcttgacccttatgcgaatgctcagtctgaagagcctgaagaagcagatgaaaaaagtaaaaaagatgaccgtgaaggacatggtcacggccttcttttcatcctactggagtattttcatgaccctcttgcacttcgtggccagcgttttcagaggctttttccgcatcatttgcagcctgctgcttgggggaagcctcgtcgaaggtgctaaaaagatcaaagttgcagaactgttagccaacatgccagaccccactcaggatgaggttagaggagatggggaggagggagagaggaaacccctggaagccgccctgccctccgaggatctgaccgacttaaaggagctgacagaggaaagtgaccttctttcggacatctttggcctggatctgaagagagaaggaggacagtacaaactgattcctcataatccaaatgctgggctcagtgacctcatgagcaacccagtccccatgcctgaggtgcaggaaaaatttcaggaacagaaggcaaaagaagaagaaaaggaagaaaaagaagaaaccaaatctgaacctgaaaaagccgagggagaagatggagaaaaagaagagaaagccaaggaagacaagggcaaacaaaagttgaggcagcttcacacacacagatacggagaaccagaagtgccagagtcagcattctggaagaaaatcatagcatatcaacagaaacttctaaactattttgctcgcaacttttacaacatgagaatgttagccttatttgtcgcatttgctatcaatttcatcttgctcttttataaggtctccacttcttctgtggttgaaggaaaggagctccccacgagaagttcaagtgaaaatgccaaagtgacaagcctggacagcagctcccatagaatcatcgcagttcactatgtactagaggagagcagcggctacatggagcccacgttgcgtatcttagctattctgcacacggtcatttctttcttctgcatcattggatactactgcttgaaagtcccattggttatttttaagcgagaaaaggaagtggcacggaaattggaatttgatgggctttatattacagaacagccttcagaagatgatattaaaggccagtgggatagactcgtaatcaacacacagtcatttcccaacaactactgggacaaatttgttaaaagaaaggttatggataaatatggagagttctacggccgagacagaatcagtgaattacttggcatggacaaggcagctctggacttcagtgatgccagagaaaagaagaagccaaagaaagacagctccttatcagctgtactgaactccattgatgtgaagtatcagatgtggaaactaggagtcgttttcactgacaactccttcctctacctagcctggtatatgactatgtctgttcttggacactataacaactttttttttgccgctcaccttctcgacattgctatgggattcaagacattaagaaccatcttgtcctcagtaactcacaatggcaaacagctcgtattaaccgttggcttattagctgttgttgtatacctatacactgtggtggcattcaattttttccgaaaattctacaataaaagtgaagatggtgatacaccagatatgaaatgtgacgatatgctaacatgctatatgttccacatgtatgttggagttcgtgctggaggagggatcggggatgaaatcgaagacccagcaggagatgaatatgagatctatcgaatcatctttgacatcactttcttcttctttgttattgtcattctcttggccataatacaaggtctaattattgatgcttttggagaactaagagaccaacaggaacaagtcaaagaagacatggagaccaaatgcttcatctgtgggataggcaatgattacttcgacacagtgccacatggctttgaaacccacactttacaggagcacaacttggctaattacttgttttttctgatgtatcttataaacaaagatgaaacagaacacacaggacaggaatcttatgtctggaagatgtatcaagaaaggtgttgggaatttttcccagcaggggattgcttccggaaacagtatgaagaccagctaaattaaactcagacccaatcacctctaaaaaccaaaaccctacccctctctctccctctctcaatttctctgctctcttggaaacattttgctgattttgtgaattgccagcgatgtgtgttttctgggagcatcgaagctctgtttcggaagagctgtttcctccccccaccttttgtatttactttgagactaaagactgaagaataatctaaattcatactcagacaaaaaaaggaattctggaaagaaaaccattctggacactgtcataacacacatagatagattttcttctgagactcccggagtcttctcgagctacgagaccttcacagagacacgtggcagccacactcacccagcctctttatttcaccatcctggaaggaaactgtctgtctaatggtcacagagcactgtagcacttaacagattgccatggacaccagttgcgaagggaaatagtgccttactatatgtgggttgagctatgcagaagatacgtgcatgaaaaaacatctttattttctttatgtcgacctttcttttcttagattgattttgtgaggttttttttttttcctttagtcttttctttagtgggggagggtaagaaaagcagtttgcacttaaaaagaaaaaaaaaaaacgggtggtgtgtctcaggacaaaaggaggctcttctcattcagctaaattcacatttgcc

SEQ ID NO: 13672 - DNA, 5389 bp, Homo sapiens
gcggccgcgcaagtcctccaccatgtgaatgccaacatggccaggtcattagagctgagggaaaactagtgcccaaagatatgaaaagagtgtggatcttctggagaagtgctgttgttcaacaggtacaaaattggaaatgttggcttcaccagaacctaagggccttgttcccttcactaaagagtcttttgaacttataaaacagcatattgctaaaacacataatgaagaccatgaagaagaagacttaaagccaaatcctgatttggaagttggcaaaaagcttccatttatttatggaaacctttctcaaggaatggtgtcagagcccttggaagatgtggacccatattactacaagaaaaaaaatactttcatagtattaaataaaaatagaacaatcttcagattcaatgcggcttccatcttgtgtacattgtctcctttcaattgtattagaagaacaactatcaaggttttggtacatccctttttccaactgtttattctaattagtgtcctgattgattgcgtattcatgtccctgactaatttgccaaaatggagaccagtattagagaatactttgcttggaatttacacatttgaaatacttgtaaaactctttgcaagaggtgtctgggcaggatcattttccttcctcggtgatccatggaactggctcgatttcagcgtaactgtgtttgaggttattataagatactcacctctggacttcattccaacgcttcaaactgcaagaactttgagaattttaaaaattattcctttaaatcaaggtctgaaatcccttgtaggggtcctgatccactgcttgaagcagcttattggtgtcattatcctaactctgttttttctgagcatattttctctaattgggatggggctcttcatgggcaacttgaaacacaaatgttttcgatggccccaagagaatgaaaatgaaaccctgcacaacagaactggaaacccatattatattcgagaaacagaaaacttttattatttggaaggagaaagatatgctctcctttgtggcaacaggacagatgctggtcagtgtcctgaaggatatgtgtgtgtaaaagctggcataaatcctgatcaaggcttcacaaattttgacagttttggctgggccttatttgccctatttcggttaatggctcaggattaccctgaagtactttatcacctgatactttatgcttctgggaaggtctacatgatattttttgtggtggtaagttttttgttttccttttatatggcaagtttgttcttaggcatacttgccatggcctatgaagaagaaaagcagagagttggtgaaatatctaagaagattgaaccaaaatttcaacagactggaaaagaacttcaagaaggaaatgaaacagatgaggccaagaccatacaaatagaaatgaagaaaaggtcaccaatttccacagacacatcattggatgtgttggaagatgctactctcagacataaggaagaacttgaaaaatccaagaagatatgcccattatactggtataagtttgctaaaactttcttgatctggaattgttctccctgttggttaaaattgaaagagtttgtccataggattataatggcaccatttactgatcttttccttatcatatgcataattttaaacgtatgttttctgaccttggagcattatccaatgagtaaacaaactaacactcttctcaacattggaaacctggttttcattggaattttcacagcagaaatgatttttaaaataattgcaatgcatccatatgggtatttccaagtaggttggaacatttttgatagcatgatagtgttccatggtttaatagaactttgtctagcaaatgttgcaggaatggctcttcttcgattattcaggatgttaagaattttcaagttgggaaagtattggccaacattccagattttgatgtggtctcttagtaactcatgggtggccctgaaagacttggtcctgttgttgttcacattcatcttcttttctgctgcattcggcatgaagctgtttggtaagaattatgaagaatttgtctgccacatagacaaagactgtcaactcccacgctggcacatgcatgactttttccactccttcctgaatgtgttccgaattctctgtggagagtgggtagagaccttgtgggactgtatggaggttgcaggccaatcctggtgtattcctttttacctgatggtcattttaattggaaatttactggtactttacctgtttctggcattggtgagctcatttagttcatgcaaggatgtaacagctgaagagaataatgaagcaaaaaatctccagcttgcagtggcaagaattaaaaaaggaataaactatgtgcttcttaaaatactatgcaaaacacaaaatgtcccaaaggacacaatggaccatgtaaatgaggtatatgttaaagaagatatttctgaccataccctttctgaattgagcaacacccaagattttctcaaagataaggaaaaaagcagtggcacagagaaaaacgctactgaaaatgagagccaatcacttatccccagtcctagtgtctcagaaactgtaccaattgcttcaggagaatctgatatagaaaatctggataataaggagattcagagtaagtctggtgatggaggcagcaaagagaaaataaagcaatctagctcatctgaatgcagtactgttgatattgctatctctgaagaagaagaaatgttctatggaggtgaaagatcaaagcatctgaaaaatggttgcagacgcggatcttcacttggtcaaatcagtggagcatccaagaaaggaaaaatctggcagaacatcaggaaaacctgctgcaagattgtagagaacaattggtttaagtgttttattgggcttgttactctgctcagcactggcactctggcttttgaagatatatatattgatcagagaaagacaattaaaattttattagaatatgctgacatgatctttacttatatcttcattctggaaatgcttctaaaatggatggcatatggttttaaggcctatttctctaatggctggtacaggctggacttcgtggttgttattgtgttttgtcttagcttaataggcaaaactcgggaagaactaaaacctcttatttccatgaaattccttcggcccctcagagttctatctcaatttgaaagaatgaaggtggttgtgagagctttgatcaaaacaaccttacccactttgaatgtgtttcttgtctgcctgatgatctggctgatttttagtatcatgggagtagacttatttgctggcagattctatgaatgcattgacccaacaagtggagaaaggtttccttcatctgaagtcatgaataagagtcggtgtgaaagccttctgtttaacgaatccatgctatgggaaaatgcaaaaatgaactttgataatgttggaaatggtttcctttctctgcttcaagtagcaacatttaatggatggatcactattatgaattcagcaattgattctgttgctgttaatatacagcctcattttgaagtcaacatctacatgtattgttactttatcaactttattatatttggagtatttctccctctgagtatgctgattactgttattattgataatttcaacaagcataaaataaagctgggaggctcaaatatctttataacggttaaacagagaaaacagtaccgcaggctgaagaagctaatgtatgaggattctcaaagaccagtacctcgcccattaaacaagctccaaggattcatctttgatgtggtaacaagccaagcttttaatgtcattgttatggttcttatatgtttccaagcaatagccatgatgatagacactgatgttcagagtctacaaatgtccattgctctctactggattaactcaatttttgttatgctatatactatggaatgtatactgaagctcatcgctttccgttgtttttatttcaccattgcgtggaacatttttgattttatggtggttattttctccatcacaggactatgtctgcctatgacagtaggatcctaccttgtgcctccttcacttgtgcaactgatacttctctcacggatcattcacatgctgcgtcttggaaaaggaccaaaggtgtttcataatctgatgcttcctttgatgctgtccctcccagcattattgaacatcattcttctcatcttcctggtcatgttcatctatgccgtatttggaatgtataattttgcctatgttaaaaaagaagctggaattaatgatgtgtctaattttgaaacctttggcaacagtatgctctgtctttttcaagttgcaatatttgctggttgggatgggatgcttgatgcaattttcaacagtaaatggtctgactgtgatcctgataaaattaaccctgggactcaagttagaggagattgtgggaacccctctgttgggattttttattttgtcagttatatcctcatatcatggctgatcattgtaaatatgtacattgttgttgtcatggagtttttaaatattgcttctaagaagaaaaacaagaccttgagtgaagatgattttaggaaattctttcaggtatggaaaaggtttgatcctgataggacccagtacatagactctagcaagctttcagattttgcagctgctcttgatcctcctcttttcatggcaaaaccaaacaagggccagctcattgctttggacctccccatggctgttggggacagaattcattgcctcgatatcttacttgcttttacaaagagagttatgggtcaagatgtgaggatggagaaagttgtttcagaaatagaatcagggtttttgttagccaacccttttaagatcacatgtgagccaattacgactactttgaaacgaaaacaagaggcagtttcagcaaccatcattcaacgtgcttataaaaattaccgcttgaggcgaaatgacaaaaatacatcagatattcatatgatagatggtgacagagatgttcatgctactaaagaaggtgcctattttgacaaagctaaggaaaagtcacctattcaaagccagatctaataccacttaccacctcttttcatatttcttcacatatctgaaaaatgttgaaagcctaagccaggaataaaagaaaagtagagataataatcagttctttacaaccgatggtaattaagcttgtattcacaagacttcatgccaaattcactttttagcattatatctaacaaatcaagagaatccttaatattgctgcag

SEQ ID NO: 13673 - DNA, 6500 bp, Homo sapiens
attccatcccatcaccccatgatccttccccattgtcccatgaacagcccctgcaggaccctcccctgctccatgtgaccctccctctgcctcctccatgaaggtctcctggatttccccactcgcctctcacagccctccattgtctctgcagacgttgccccatctgacgctcggctcgaggcctctctgtgagggaccggggggccatccccctccagggcggagatcggaggtcgctgccaagcatggcgcccacctggggccctggcatggtgtctgtggttggtcccatgggcctccttgtggtcctgctcgttggaggctgtgcagcagaagagccccccaggtttatcaaagaacccaaggaccagatcggcgtgtcggggggtgtggcctctttcgtgtgtcaggccacgggtgaccccaagccacgagtgacctggaacaagaagggcaagaaggtcaactctcagcgctttgagacgattgagtttgatgagagtgcaggggcagtgctgaggatccagccgctgaggacaccgcgggatgaaaacgtgtacgagtgtgtggcccagaactcggttggggagatcacagtccatgccaagcttactgtcctccgagaggaccagctgccctctggcttccccaacatcgacatgggcccacagttgaaggtggtggagcggacacggacagccaccatgctctgtgcagccagcggcaaccctgaccctgagatcacctggttcaaggacttcctgcctgtggatcctagtgccagcaatggacgcatcaaacagctgcgatcagaaacctttgaaagcactccgattcgaggagccctgcagattgaaagcagtgaggaaaccgaccagggcaaatatgagtgtgtggccaccaacagcgccggcgtgcgctactcctcacctgccaacctctacgtgcgagagcttcgagaagtccgccgcgtggccccgcgcttctccatcctgcccatgagccacgagatcatgccagggggcaacgtgaacatcacctgcgtggccgtgggctcgcccatgccatacgtgaagtggatgcagggggccgaggacctgacccccgaggatgacatgcccgtgggtcggaacgtgctggaactcacagatgtcaaggactcggccaactacacctgcgtggccatgtccagcctgggcgtcattgaggcggttgctcagatcacggtgaaatctctccccaaagctcccgggactcccatggtgactgagaacacagccaccagcatcaccatcacgtgggactcgggcaacccagatcctgtgtcctattacgtcatcgaatataaatccaagagccaagacgggccgtatcagattaaagaggacatcaccaccacacgttacagcatcggcggcctgagccccaactcggagtacgagatctgggtgtcggccgtcaactccatcggccaggggccccccagcgagtccgtggtcacccgcacaggcgagcaggccccggccagcgcgccgcggaacgtgcaagcccggatgctcagcgcgaccaccatgattgtgcagtgggaggagccggtggagcccaacggcctgatccgcggctaccgcgtctactacaccatggaaccggagcaccccgtgggcaactggcagaagcacaacgtggacgacagcctgctgaccaccgtgggcagcctgctggaggacgagacctacaccgtgcgggtgctcgccttcacctccgtcggcgacgggcccctctcggaccccatccaggtcaagacgcagcagggagtgccgggccagcccatgaacctgcgggccgaggccaggtcggagaccagcatcacgctgtcctggagccccccgcggcaggagagtatcatcaagtacgagctcctcttccgggaaggcgaccatggccgggaggtgggaaggaccttcgacccgacgacttcctacgtggtggaggacctgaagcccaacacggagtacgccttccgcctggcggcccgctcgccgcagggcctgggcgccttcacccccgtggtgcggcagcgcacgctgcagtccaaaccgtcagccccccctcaagacgttaaatgtgtcagcgtgcgctccacggccattttggtaagttggcgcccgccgccgccggaaacgcacaacggggccctggtgggctacagcgtccgctaccgaccgctgggctcagaggacccggaacccaaggaggtgaacggcatccccccgaccaccactcagatcctgctggaggccttggagaagtggacccagtaccgcatcacgactgtcgctcacacagaggtgggaccagggcccgagagctcgcccgtggtcgtccgcaccgacgaggatgtgcccagcgcgccgccgcggaaggtggaggcggaggcgctcaacgccacggccatccgcgtgctgtggcgctcgcccgcgcccggccggcagcacggccagatccgcggctaccaggtccactacgtgcgcatggagggcgccgaggcccgcgggccgccgcgcatcaaggacgtcatgctggccgatgcccagtgggagacggatgacacggccgaatatgagatggtcatcacaaacttgcagcctgagaccgcgtactccatcacggtagccgcctacaccatgaagggcgatggcgctcgcagcaaacccaaggtggttgtgaccaagggagcagtgctgggccgcccaaccctgtcggtgcagcagacccccgagggcagcctgctggcacgctgggagcccccggctggcaccgcggaggaccaggtgctgggctaccgcctgcagtttggccgtgaggactcgacgcccctggccaccctggagttcccgccctccgaggaccgctacacggcatcaggcgtgcacaagggggccacgtatgtgttccggcttgcggcccggagccgcggcggcctgggcgaggaggcagccgaggtcctgagcatcccggaggacacgccccgtggccacccgcagattctggaggcggccggcaacgcctcggccgggaccgtccttctccgctggctgccacccgtgcccgccgagcgcaacggggccatcgtcaaatacacggtggccgtgcgggaggccggtgccctgggccctgcccgagagactgagctgccggcagcggctgagccgggcgcggagaacgcgctcacgctgcagggcctgaagcccgacacggcctatgacctccaagtgcgagcccacacgcgccggggccctggccccttcagcccccccgtccgctaccggacgttcctgcgggaccaagtctcgcccaagaacttcaaggtgaaaatgatcatgaagacatcagttctgctcagctgggagttccctgacaactacaactcacccacaccctacaagatccagtacaatgggctcacactggatgtggatggccgtaccaccaagaagctcatcacgcacctcaagccccacaccttctacaactttgtgctgaccaatcgcggcagcagcctgggcggcctccagcagacggtcaccgcctggactgccttcaacctgctcaacggcaagcccagcgtcgcccccaagcctgatgctgacggcttcatcatggtgtatcttcctgacggccagagccccgtgcctgtccagagctatttcattgtgatggtgccactgcgcaagtctcgtggaggccaattcctgaccccgctgggtagcccagaggacatggatctggaagagctcatccaggacatctcacggctacagaggcgcagcctgcggcactcgcgtcagctggaggtgccccggccctatattgcagctcgcttctctgtgctgccacccacgttccatcccggcgaccagaagcagtatggcggcttcgataaccggggcctggagcccggccaccgctatgtcctcttcgtgcttgccgtgcttcagaagagcgagcctacctttgcagccagtcccttctcagaccccttccagctggataacccggacccccagcccatcgtggatggcgaggaggggcttatctgggtgatcgggcctgtgctggccgtggtcttcataatctgcattgtcattgctatcctgctctacaagaacaaacccgacagtaaacgcaaggactcagaaccccgcaccaaatgcctcctgaacaatgccgacctcgcccctcaccaccccaaggaccctgtggaaatgagacgcattaacttccagactccagattcaggcctcaggagccccctcagggagccggggtttcactttgaaagcatgcttagccacccgccaattcccatcgcagacatggcggagcacacggagcggctcaaggccaacgacagcctcaagctctcccaggagtatgagtccatcgaccctggacagcagttcacatgggaacattccaacctggaagtgaacaagccgaagaaccgctatgccaacgtcatcgcctatgaccactcccgtgtcatcctccagcccattgaaggcatcatgggcagtgattacatcaatgccaactacgtggacggctaccggcgtcagaacgcgtacattgccacgcaggggccgctgcctgagacctttggggacttctggcgtatggtgtgggagcagcggtcggcgaccatcgtcatgatgacgcggctggaggagaagtcacggatcaagtgtgatcagtattggcccaacagaggcacggagacctacggcttcatccaggtcacgttgctagataccatcgagctggccacattctgcgtcaggacattctctctgcacaagaatggctccagtgagaaacgcgaggtccgccagttccagtttacggcgtggccggaccatggcgtgcccgaatacccaacgcccttcctggctttcctgcggagagtcaagacctgcaacccgccagatgccggccccatcgtggttcactgcagtgccggtgtgggccgcacaggctgctttatcgtcatcgacgccatgcttgagcggatcaagccagagaagacagtcgatgtctatggccacgtgacgctcatgaggtcccagcgcaactacatggtgcagacggaggaccagtacagcttcatccacgaggccctgctggaggccgtgggctgtggcaacacagaagtgcccgcacgcagcctctatgcctacatccagaagctggcccaggtggagcctggcgaacacgtcactggcatggaactcgagttcaagcggctggctaactccaaggcccacacgtcacgcttcatcagtgccaatctgccttgtaacaagttcaagaaccgcctggtgaacatcatgccctatgagagcacacgggtctgtctgcaacccatccggggtgtggagggctctgactacatcaacgccagcttcattgatggctacaggcagcagaaggcctacatcgcgacacaggggccgctggcggagaccacggaagacttctggcgcatgctgtgggagaacaattcgacgatcgtggtgatgctgaccaagctgcgggagatgggccgggagaagtgtcaccagtactggccggccgagcgctctgcccgctaccagtactttgtggtagatccgatggcagaatacaacatgcctcagtatatcctgcgagagttcaaggtcacagatgcccgggatggccagtcccggactgtccggcagttccagttcacagactggccggaacagggtgtgccaaagtcgggggagggcttcatcgacttcattggccaagtgcataagactaaggagcagtttggccaggacggccccatctctgtccactgcagtgccggcgtgggcaggacgggcgtcttcatcacgcttagcatcgtgctggagcggatgcggtatgaaggcgtggtggacatctttcagacggtgaagatgctacgaacccagcggccggccatggtgcagacagaggatgagtaccagttctgttaccaggcggcactggagtacctcggaagctttgaccactatgcaacctaaagccatggtcccccccaggcccgacaccactggccccggatgcctctgcccctcccgggcggacctcctgaggcctggacccccagtgggcagggcaggaggtggcagcggcagcagctgtgtttctgcaccatttccgaggacgacgcagcccctcgagcccccccaccggccccggccgccccagcgacctccctggcacggccgccgccttcaaatacttggcacattcctcctttccttccaattccaaaaccagattccggggtggggggtggggggatggtgagcaaataggagtgctccccagaaccagaggagggtggggcacagaccatagacggacccctcgtcctcccccagcggtggtagggggacccggggggctcctccccgctctgcacc

SEQ ID NO: 13674 - DNA, 5159 bp, Homo sapiens
attccatcccatcaccccatgatccttccccattgtcccatgaacagcccctgcaggaccctcccctgctccatgtgaccctccctctgcctcctccatgaaggtctcctggatttccccactcgcctctcacagccctccattgtctctgcagacgttgccccatctgacgctcggctcgaggcctctctgtgagggaccggggggccatccccctccagggcggagatcggaggtcgctgccaagcatggcgcccacctggggccctggcatggtgtctgtggttggtcccatgggcctccttgtggtcctgctcgttggaggctgtgcagcagaagagccccccaggtttatcaaagaacccaaggaccagatcggcgtgtcggggggtgtggcctctttcgtgtgtcaggccacgggtgaccccaagccacgagtgacctggaacaagaagggcaagaaggtcaactctcagcgctttgagacgattgagtttgatgagagtgcaggggcagtgctgaggatccagccgctgaggacaccgcgggatgaaaacgtgtacgagtgtgtggcccagaactcggttggggagatcacagtccatgccaagcttactgtcctccgagaggaccagctgccctctggcttccccaacatcgacatgggcccacagttgaaggtggtggagcggacacggacagccaccatgctctgtgcagccagcggcaaccctgaccctgagatcacctggttcaaggacttcctgcctgtggatcctagtgccagcaatggacgcatcaaacagctgcgatcaggagccctgcagattgaaagcagtgaggaaaccgaccagggcaaatatgagtgtgtggccaccaacagcgccggcgtgcgctactcctcacctgccaacctctacgtgcgagtccgccgcgtggccccgcgcttctccatcctgcccatgagccacgagatcatgccagggggcaacgtgaacatcacctgcgtggccgtgggctcgcccatgccatacgtgaagtggatgcagggggccgaggacctgacccccgaggatgacatgcccgtgggtcggaacgtgctggaactcacagatgtcaaggactcggccaactacacctgcgtggccatgtccagcctgggcgtcattgaggcggttgctcagatcacggtgaaatctctccccaaagctcccgggactcccatggtgactgagaacacagccaccagcatcaccatcacgtgggactcgggcaacccagatcctgtgtcctattacgtcatcgaatataaatccaagagccaagacgggccgtatcagattaaagaggacatcaccaccacacgttacagcatcggcggcctgagccccaactcggagtacgagatctgggtgtcggccgtcaactccatcggccaggggccccccagcgagtccgtggtcacccgcacaggcgagcaggccccggccagcgcgccgcggaacgtgcaagcccggatgctcagcgcgaccaccatgattgtgcagtgggaggagccggtggagcccaacggcctgatccgcggctaccgcgtctactacaccatggaaccggagcaccccgtgggcaactggcagaagcacaacgtggacgacagcctgctgaccaccgtgggcagcctgctggaggacgagacctacaccgtgcgggtgctcgccttcacctccgtcggcgacgggcccctctcggaccccatccaggtcaagacgcagcagggagtgccgggccagcccatgaacctgcgggccgaggccaggtcggagaccagcatcacgctgtcctggagccccccgcggcaggagagtatcatcaagtacgagctcctcttccgggaaggcgaccatggccgggaggtgggaaggaccttcgacccgacgacttcctacgtggtggaggacctgaagcccaacacggagtacgccttccgcctggcggcccgctcgccgcagggcctgggcgccttcacccccgtggtgcggcagcgcacgctgcagtccatctcgcccaagaacttcaaggtgaaaatgatcatgaagacatcagttctgctcagctgggagttccctgacaactacaactcacccacaccctacaagatccagtacaatgggctcacactggatgtggatggccgtaccaccaagaagctcatcacgcacctcaagccccacaccttctacaactttgtgctgaccaatcgcggcagcagcctgggcggcctccagcagacggtcaccgcctggactgccttcaacctgctcaacggcaagcccagcgtcgcccccaagcctgatgctgacggcttcatcatggtgtatcttcctgacggccagagccccgtgcctgtccagagctatttcattgtgatggtgccactgcgcaagtctcgtggaggccaattcctgaccccgctgggtagcccagaggacatggatctggaagagctcatccaggacatctcacggctacagaggcgcagcctgcggcactcgcgtcagctggaggtgccccggccctatattgcagctcgcttctctgtgctgccacccacgttccatcccggcgaccagaagcagtatggcggcttcgataaccggggcctggagcccggccaccgctatgtcctcttcgtgcttgccgtgcttcagaagagcgagcctacctttgcagccagtcccttctcagaccccttccagctggataacccggacccccagcccatcgtggatggcgaggaggggcttatctgggtgatcgggcctgtgctggccgtggtcttcataatctgcattgtcattgctatcctgctctacaagaacaaacccgacagtaaacgcaaggactcagaaccccgcaccaaatgcctcctgaacaatgccgacctcgcccctcaccaccccaaggaccctgtggaaatgagacgcattaacttccagactccaggcatgcttagccacccgccaattcccatcgcagacatggcggagcacacggagcggctcaaggccaacgacagcctcaagctctcccaggagtatgagtccatcgaccctggacagcagttcacatgggaacattccaacctggaagtgaacaagccgaagaaccgctatgccaacgtcatcgcctatgaccactcccgtgtcatcctccagcccattgaaggcatcatgggcagtgattacatcaatgccaactacgtggacggctaccggcgtcagaacgcgtacattgccacgcaggggccgctgcctgagacctttggggacttctggcgtatggtgtgggagcagcggtcggcgaccatcgtcatgatgacgcggctggaggagaagtcacggatcaagtgtgatcagtattggcccaacagaggcacggagacctacggcttcatccaggtcacgttgctagataccatcgagctggccacattctgcgtcaggacattctctctgcacaagaatggctccagtgagaaacgcgaggtccgccagttccagtttacggcgtggccggaccatggcgtgcccgaatacccaacgcccttcctggctttcctgcggagagtcaagacctgcaacccaccagatgccggccccatcgtggttcactgcagtgccggtgtgggccgcacaggctgctttatcgtcatcgacgccatgcttgagcggatcaagccagagaagacagtcgatgtctatggccacgtgacgctcatgaggtcccagcgcaactacatggtgcagacggaggaccagtacagcttcatccacgaggccctgctggaggccgtgggctgtggcaacacagaagtgcccgcacgcagcctctatgcctacatccagaagctggcccaggtggagcctggcgaacacgtcactggcatggaactcgagttcaagcggctggctaactccaaggcccacacgtcacgcttcatcagtgccaatctgccttgtaacaagttcaagaaccgcctggtgaacatcatgccctatgagagcacacgggtctgtctgcaacccatccggggtgtggagggctctgactacatcaacgccagcttcattgatggctacaggcagcagaaggcctacatcgcgacacaggggccgctggcggagaccacggaagacttctggcgcatgctgtgggagaacaattcgacgatcgtggtgatgctgaccaagctgcgggagatgggccgggagaagtgtcaccagtactggccggccgagcgctctgcccgctaccagtactttgtggtagatccgatggcagaatacaacatgcctcagtatatcctgcgagagttcaaggtcacagatgcccgggatggccagtcccggactgtccggcagttccagttcacagactggccggaacagggtgtgccaaagtcgggggagggcttcatcgacttcattggccaagtgcataagactaaggagcagtttggccaggacggccccatctctgtccactgcagtgccggcgtgggcaggacgggcgtcttcatcacgcttagcatcgtgctggagcggatgcggtatgaaggcgtggtggacatctttcagacggtgaagatgctacgaacccagcggccggccatggtgcagacagaggatgagtaccagttctgttaccaggcggcactggagtacctcggaagctttgaccactatgcaacctaaagccatggtcccccccaggcccgacaccactggccccggatgcctctgcccctcccgggcggacctcctgaggcctggacccccagtgggcagggcaggaggtggcagcggcagcagctgtgtttctgcaccatttccgaggacgacgcagcccctcgagcccccccaccggccccggccgccccagcgacctccctggcacggccgccgccttcaaatacttggcacattcctcctttccttccaattccaaaaccagattccggggtggggggtggggggatggtgagcaaataggagtgctccccagaaccagaggagggtggggcacagaccatagacggacccctcgtcctcccccagcggtggtagggggacccggggggctcctccccgctctgcacc

SEQ ID NO: 13675 - DNA, 6386 bp, Homo sapiens
attccatcccatcaccccatgatccttccccattgtcccatgaacagcccctgcaggaccctcccctgctccatgtgaccctccctctgcctcctccatgaaggtctcctggatttccccactcgcctctcacagccctccattgtctctgcagacgttgccccatctgacgctcggctcgaggcctctctgtgagggaccggggggccatccccctccagggcggagatcggaggtcgctgccaagcatggcgcccacctggggccctggcatggtgtctgtggttggtcccatgggcctccttgtggtcctgctcgttggaggctgtgcagcagaagagccccccaggtttatcaaagaacccaaggaccagatcggcgtgtcggggggtgtggcctctttcgtgtgtcaggccacgggtgaccccaagccacgagtgacctggaacaagaagggcaagaaggtcaactctcagcgctttgagacgattgagtttgatgagagtgcaggggcagtgctgaggatccagccgctgaggacaccgcgggatgaaaacgtgtacgagtgtgtggcccagaactcggttggggagatcacagtccatgccaagcttactgtcctccgagaggaccagctgccctctggcttccccaacatcgacatgggcccacagttgaaggtggtggagcggacacggacagccaccatgctctgtgcagccagcggcaaccctgaccctgagatcacctggttcaaggacttcctgcctgtggatcctagtgccagcaatggacgcatcaaacagctgcgatcaggagccctgcagattgaaagcagtgaggaaaccgaccagggcaaatatgagtgtgtggccaccaacagcgccggcgtgcgctactcctcacctgccaacctctacgtgcgagtccgccgcgtggccccgcgcttctccatcctgcccatgagccacgagatcatgccagggggcaacgtgaacatcacctgcgtggccgtgggctcgcccatgccatacgtgaagtggatgcagggggccgaggacctgacccccgaggatgacatgcccgtgggtcggaacgtgctggaactcacagatgtcaaggactcggccaactacacctgcgtggccatgtccagcctgggcgtcattgaggcggttgctcagatcacggtgaaatctctccccaaagctcccgggactcccatggtgactgagaacacagccaccagcatcaccatcacgtgggactcgggcaacccagatcctgtgtcctattacgtcatcgaatataaatccaagagccaagacgggccgtatcagattaaagaggacatcaccaccacacgttacagcatcggcggcctgagccccaactcggagtacgagatctgggtgtcggccgtcaactccatcggccaggggccccccagcgagtccgtggtcacccgcacaggcgagcaggccccggccagcgcgccgcggaacgtgcaagcccggatgctcagcgcgaccaccatgattgtgcagtgggaggagccggtggagcccaacggcctgatccgcggctaccgcgtctactacaccatggaaccggagcaccccgtgggcaactggcagaagcacaacgtggacgacagcctgctgaccaccgtgggcagcctgctggaggacgagacctacaccgtgcgggtgctcgccttcacctccgtcggcgacgggcccctctcggaccccatccaggtcaagacgcagcagggagtgccgggccagcccatgaacctgcgggccgaggccaggtcggagaccagcatcacgctgtcctggagccccccgcggcaggagagtatcatcaagtacgagctcctcttccgggaaggcgaccatggccgggaggtgggaaggaccttcgacccgacgacttcctacgtggtggaggacctgaagcccaacacggagtacgccttccgcctggcggcccgctcgccgcagggcctgggcgccttcacccccgtggtgcggcagcgcacgctgcagtccaaaccgtcagccccccctcaagacgttaaatgtgtcagcgtgcgctccacggccattttggtaagttggcgcccgccgccgccggaaacgcacaacggggccctggtgggctacagcgtccgctaccgaccgctgggctcagaggacccggaacccaaggaggtgaacggcatccccccgaccaccactcagatcctgctggaggccttggagaagtggacccagtaccgcatcacgactgtcgctcacacagaggtgggaccagggcccgagagctcgcccgtggtcgtccgcaccgacgaggatgtgcccagcgcgccgccgcggaaggtggaggcggaggcgctcaacgccacggccatccgcgtgctgtggcgctcgcccgcgcccggccggcagcacggccagatccgcggctaccaggtccactacgtgcgcatggagggcgccgaggcccgcgggccgccgcgcatcaaggacgtcatgctggccgatgcccaggagatggtcatcacaaacttgcagcctgagaccgcgtactccatcacggtagccgcctacaccatgaagggcgatggcgctcgcagcaaacccaaggtggttgtgaccaagggagcagtgctgggccgcccaaccctgtcggtgcagcagacccccgagggcagcctgctggcacgctgggagcccccggctggcaccgcggaggaccaggtgctgggctaccgcctgcagtttggccgtgaggactcgacgcccctggccaccctggagttcccgccctccgaggaccgctacacggcatcaggcgtgcacaagggggccacgtatgtgttccggcttgcggcccggagccgcggcggcctgggcgaggaggcagccgaggtcctgagcatcccggaggacacgccccgtggccacccgcagattctggaggcggccggcaacgcctcggccgggaccgtccttctccgctggctgccacccgtgcccgccgagcgcaacggggccatcgtcaaatacacggtggccgtgcgggaggccggtgccctgggccctgcccgagagactgagctgccggcagcggctgagccgggcgcggagaacgcgctcacgctgcagggcctgaagcccgacacggcctatgacctccaagtgcgagcccacacgcgccggggccctggccccttcagcccccccgtccgctaccggacgttcctgcgggaccaagtctcgcccaagaacttcaaggtgaaaatgatcatgaagacatcagttctgctcagctgggagttccctgacaactacaactcacccacaccctacaagatccagtacaatgggctcacactggatgtggatggccgtaccaccaagaagctcatcacgcacctcaagccccacaccttctacaactttgtgctgaccaatcgcggcagcagcctgggcggcctccagcagacggtcaccgcctggactgccttcaacctgctcaacggcaagcccagcgtcgcccccaagcctgatgctgacggcttcatcatggtgtatcttcctgacggccagagccccgtgcctgtccagagctatttcattgtgatggtgccactgcgcaagtctcgtggaggccaattcctgaccccgctgggtagcccagaggacatggatctggaagagctcatccaggacatctcacggctacagaggcgcagcctgcggcactcgcgtcagctggaggtgccccggccctatattgcagctcgcttctctgtgctgccacccacgttccatcccggcgaccagaagcagtatggcggcttcgataaccggggcctggagcccggccaccgctatgtcctcttcgtgcttgccgtgcttcagaagagcgagcctacctttgcagccagtcccttctcagaccccttccagctggataacccggacccccagcccatcgtggatggcgaggaggggcttatctgggtgatcgggcctgtgctggccgtggtcttcataatctgcattgtcattgctatcctgctctacaagaacaaacccgacagtaaacgcaaggactcagaaccccgcaccaaatgcctcctgaacaatgccgacctcgcccctcaccaccccaaggaccctgtggaaatgagacgcattaacttccagactccaggcatgcttagccacccgccaattcccatcgcagacatggcggagcacacggagcggctcaaggccaacgacagcctcaagctctcccaggagtatgagtccatcgaccctggacagcagttcacatgggaacattccaacctggaagtgaacaagccgaagaaccgctatgccaacgtcatcgcctatgaccactcccgtgtcatcctccagcccattgaaggcatcatgggcagtgattacatcaatgccaactacgtggacggctaccggcgtcagaacgcgtacattgccacgcaggggccgctgcctgagacctttggggacttctggcgtatggtgtgggagcagcggtcggcgaccatcgtcatgatgacgcggctggaggagaagtcacggatcaagtgtgatcagtattggcccaacagaggcacggagacctacggcttcatccaggtcacgttgctagataccatcgagctggccacattctgcgtcaggacattctctctgcacaagaatggctccagtgagaaacgcgaggtccgccagttccagtttacggcgtggccggaccatggcgtgcccgaatacccaacgcccttcctggctttcctgcggagagtcaagacctgcaacccaccagatgccggccccatcgtggttcactgcagtgccggtgtgggccgcacaggctgctttatcgtcatcgacgccatgcttgagcggatcaagccagagaagacagtcgatgtctatggccacgtgacgctcatgaggtcccagcgcaactacatggtgcagacggaggaccagtacagcttcatccacgaggccctgctggaggccgtgggctgtggcaacacagaagtgcccgcacgcagcctctatgcctacatccagaagctggcccaggtggagcctggcgaacacgtcactggcatggaactcgagttcaagcggctggctaactccaaggcccacacgtcacgcttcatcagtgccaatctgccttgtaacaagttcaagaaccgcctggtgaacatcatgccctatgagagcacacgggtctgtctgcaacccatccggggtgtggagggctctgactacatcaacgccagcttcattgatggctacaggcagcagaaggcctacatcgcgacacaggggccgctggcggagaccacggaagacttctggcgcatgctgtgggagaacaattcgacgatcgtggtgatgctgaccaagctgcgggagatgggccgggagaagtgtcaccagtactggccggccgagcgctctgcccgctaccagtactttgtggtagatccgatggcagaatacaacatgcctcagtatatcctgcgagagttcaaggtcacagatgcccgggatggccagtcccggactgtccggcagttccagttcacagactggccggaacagggtgtgccaaagtcgggggagggcttcatcgacttcattggccaagtgcataagactaaggagcagtttggccaggacggccccatctctgtccactgcagtgccggcgtgggcaggacgggcgtcttcatcacgcttagcatcgtgctggagcggatgcggtatgaaggcgtggtggacatctttcagacggtgaagatgctacgaacccagcggccggccatggtgcagacagaggatgagtaccagttctgttaccaggcggcactggagtacctcggaagctttgaccactatgcaacctaaagccatggtcccccccaggcccgacaccactggccccggatgcctctgcccctcccgggcggacctcctgaggcctggacccccagtgggcagggcaggaggtggcagcggcagcagctgtgtttctgcaccatttccgaggacgacgcagcccctcgagcccccccaccggccccggccgccccagcgacctccctggcacggccgccgccttcaaatacttggcacattcctcctttccttccaattccaaaaccagattccggggtggggggtggggggatggtgagcaaataggagtgctccccagaaccagaggagggtggggcacagaccatagacggacccctcgtcctcccccagcggtggtagggggacccggggggctcctccccgctctgcacc

SEQ ID NO: 13676 - DNA, 5171 bp, Homo sapiens
attccatcccatcaccccatgatccttccccattgtcccatgaacagcccctgcaggaccctcccctgctccatgtgaccctccctctgcctcctccatgaaggtctcctggatttccccactcgcctctcacagccctccattgtctctgcagacgttgccccatctgacgctcggctcgaggcctctctgtgagggaccggggggccatccccctccagggcggagatcggaggtcgctgccaagcatggcgcccacctggggccctggcatggtgtctgtggttggtcccatgggcctccttgtggtcctgctcgttggaggctgtgcagcagaagagccccccaggtttatcaaagaacccaaggaccagatcggcgtgtcggggggtgtggcctctttcgtgtgtcaggccacgggtgaccccaagccacgagtgacctggaacaagaagggcaagaaggtcaactctcagcgctttgagacgattgagtttgatgagagtgcaggggcagtgctgaggatccagccgctgaggacaccgcgggatgaaaacgtgtacgagtgtgtggcccagaactcggttggggagatcacagtccatgccaagcttactgtcctccgagaggaccagctgccctctggcttccccaacatcgacatgggcccacagttgaaggtggtggagcggacacggacagccaccatgctctgtgcagccagcggcaaccctgaccctgagatcacctggttcaaggacttcctgcctgtggatcctagtgccagcaatggacgcatcaaacagctgcgatcaggagccctgcagattgaaagcagtgaggaaaccgaccagggcaaatatgagtgtgtggccaccaacagcgccggcgtgcgctactcctcacctgccaacctctacgtgcgagagcttcgagaagtccgccgcgtggccccgcgcttctccatcctgcccatgagccacgagatcatgccagggggcaacgtgaacatcacctgcgtggccgtgggctcgcccatgccatacgtgaagtggatgcagggggccgaggacctgacccccgaggatgacatgcccgtgggtcggaacgtgctggaactcacagatgtcaaggactcggccaactacacctgcgtggccatgtccagcctgggcgtcattgaggcggttgctcagatcacggtgaaatctctccccaaagctcccgggactcccatggtgactgagaacacagccaccagcatcaccatcacgtgggactcgggcaacccagatcctgtgtcctattacgtcatcgaatataaatccaagagccaagacgggccgtatcagattaaagaggacatcaccaccacacgttacagcatcggcggcctgagccccaactcggagtacgagatctgggtgtcggccgtcaactccatcggccaggggccccccagcgagtccgtggtcacccgcacaggcgagcaggccccggccagcgcgccgcggaacgtgcaagcccggatgctcagcgcgaccaccatgattgtgcagtgggaggagccggtggagcccaacggcctgatccgcggctaccgcgtctactacaccatggaaccggagcaccccgtgggcaactggcagaagcacaacgtggacgacagcctgctgaccaccgtgggcagcctgctggaggacgagacctacaccgtgcgggtgctcgccttcacctccgtcggcgacgggcccctctcggaccccatccaggtcaagacgcagcagggagtgccgggccagcccatgaacctgcgggccgaggccaggtcggagaccagcatcacgctgtcctggagccccccgcggcaggagagtatcatcaagtacgagctcctcttccgggaaggcgaccatggccgggaggtgggaaggaccttcgacccgacgacttcctacgtggtggaggacctgaagcccaacacggagtacgccttccgcctggcggcccgctcgccgcagggcctgggcgccttcacccccgtggtgcggcagcgcacgctgcagtccatctcgcccaagaacttcaaggtgaaaatgatcatgaagacatcagttctgctcagctgggagttccctgacaactacaactcacccacaccctacaagatccagtacaatgggctcacactggatgtggatggccgtaccaccaagaagctcatcacgcacctcaagccccacaccttctacaactttgtgctgaccaatcgcggcagcagcctgggcggcctccagcagacggtcaccgcctggactgccttcaacctgctcaacggcaagcccagcgtcgcccccaagcctgatgctgacggcttcatcatggtgtatcttcctgacggccagagccccgtgcctgtccagagctatttcattgtgatggtgccactgcgcaagtctcgtggaggccaattcctgaccccgctgggtagcccagaggacatggatctggaagagctcatccaggacatctcacggctacagaggcgcagcctgcggcactcgcgtcagctggaggtgccccggccctatattgcagctcgcttctctgtgctgccacccacgttccatcccggcgaccagaagcagtatggcggcttcgataaccggggcctggagcccggccaccgctatgtcctcttcgtgcttgccgtgcttcagaagagcgagcctacctttgcagccagtcccttctcagaccccttccagctggataacccggacccccagcccatcgtggatggcgaggaggggcttatctgggtgatcgggcctgtgctggccgtggtcttcataatctgcattgtcattgctatcctgctctacaagaacaaacccgacagtaaacgcaaggactcagaaccccgcaccaaatgcctcctgaacaatgccgacctcgcccctcaccaccccaaggaccctgtggaaatgagacgcattaacttccagactccaggcatgcttagccacccgccaattcccatcgcagacatggcggagcacacggagcggctcaaggccaacgacagcctcaagctctcccaggagtatgagtccatcgaccctggacagcagttcacatgggaacattccaacctggaagtgaacaagccgaagaaccgctatgccaacgtcatcgcctatgaccactcccgtgtcatcctccagcccattgaaggcatcatgggcagtgattacatcaatgccaactacgtggacggctaccggcgtcagaacgcgtacattgccacgcaggggccgctgcctgagacctttggggacttctggcgtatggtgtgggagcagcggtcggcgaccatcgtcatgatgacgcggctggaggagaagtcacggatcaagtgtgatcagtattggcccaacagaggcacggagacctacggcttcatccaggtcacgttgctagataccatcgagctggccacattctgcgtcaggacattctctctgcacaagaatggctccagtgagaaacgcgaggtccgccagttccagtttacggcgtggccggaccatggcgtgcccgaatacccaacgcccttcctggctttcctgcggagagtcaagacctgcaacccaccagatgccggccccatcgtggttcactgcagtgccggtgtgggccgcacaggctgctttatcgtcatcgacgccatgcttgagcggatcaagccagagaagacagtcgatgtctatggccacgtgacgctcatgaggtcccagcgcaactacatggtgcagacggaggaccagtacagcttcatccacgaggccctgctggaggccgtgggctgtggcaacacagaagtgcccgcacgcagcctctatgcctacatccagaagctggcccaggtggagcctggcgaacacgtcactggcatggaactcgagttcaagcggctggctaactccaaggcccacacgtcacgcttcatcagtgccaatctgccttgtaacaagttcaagaaccgcctggtgaacatcatgccctatgagagcacacgggtctgtctgcaacccatccggggtgtggagggctctgactacatcaacgccagcttcattgatggctacaggcagcagaaggcctacatcgcgacacaggggccgctggcggagaccacggaagacttctggcgcatgctgtgggagaacaattcgacgatcgtggtgatgctgaccaagctgcgggagatgggccgggagaagtgtcaccagtactggccggccgagcgctctgcccgctaccagtactttgtggtagatccgatggcagaatacaacatgcctcagtatatcctgcgagagttcaaggtcacagatgcccgggatggccagtcccggactgtccggcagttccagttcacagactggccggaacagggtgtgccaaagtcgggggagggcttcatcgacttcattggccaagtgcataagactaaggagcagtttggccaggacggccccatctctgtccactgcagtgccggcgtgggcaggacgggcgtcttcatcacgcttagcatcgtgctggagcggatgcggtatgaaggcgtggtggacatctttcagacggtgaagatgctacgaacccagcggccggccatggtgcagacagaggatgagtaccagttctgttaccaggcggcactggagtacctcggaagctttgaccactatgcaacctaaagccatggtcccccccaggcccgacaccactggccccggatgcctctgcccctcccgggcggacctcctgaggcctggacccccagtgggcagggcaggaggtggcagcggcagcagctgtgtttctgcaccatttccgaggacgacgcagcccctcgagcccccccaccggccccggccgccccagcgacctccctggcacggccgccgccttcaaatacttggcacattcctcctttccttccaattccaaaaccagattccggggtggggggtggggggatggtgagcaaataggagtgctccccagaaccagaggagggtggggcacagaccatagacggacccctcgtcctcccccagcggtggtagggggacccggggggctcctccccgctctgcacc

SEQ ID NO: 13677 - DNA, 2032 bp, Homo sapiens
gttactttttaaatggacaaaagtggctctcaatccagcacatgcacattgaagcaagttaaaggatttaatatgaagcacagaagcagatagtgccaaatagcaagcagtagttgttacacatttctggaaaagcagtgtccgtgttgttatgtacacctccaaaaaaagttcaaatgtgtaggggaattgttgtgtaaagtaaactgaactgcagggtagcagtattttaatagctattatagacctgtatttactgtatttaaatgagtaaaggaacaagcagtgacacatcactaggaagggtgagcagggcagcatttccttctcccactgctgctgagatggcagaaattagtcgaattcagtacgaaatggaatatactgaaggcattagtcagcgaatgagggtcccagaaaagttaaaagtagcaccgccaaacgctgacctggaacaaggattccaagaaggagttccaaatgctagtgtgataatgcaagttccggagaggattgttgtagcaggaaataatgaagatgtttcattttcaagaccagcagatcttgaccttattcagtcaactccctttaaacccctggcactgaaaacaccacctcgtgtacttacgctgagtgaaagaccactagattttctggatttagaaagacctcctacaacccctcaaaatgaagaaatccgagcagttggcagactaaaaagagagcggtctatgagtgaaaatgctgttcgccaaaatggacagctggtcagaaatgattctctgtggcacagatcagattctgccccaagaaataaaatttcaaggttccaggcaccgatttctgcaccggagtacactgtgacaccatcgccacaacaggctcgggtctgtcctccccatatgttacctgaagatggagctaatctttcctctgctcgtggcattttgtcgcttatccagtcttctactcgtagggcataccagcagatcttggatgtgctggatgaaaatcgcagacctgtgttgcgtggtgggtctgctgccgccacttctaatcctcatcatgacaacgtcaggtatggcatttcaaatatagatacaaccattgaaggaacgtcagatgacctgactgttgtagatgcagcttcactaagacgacagataatcaaactaaatagacgtctacaacttctggaagaggagaacaaagaacgtgctaaaagagaaatggtcatgtattcaattactgtagctttctggctgcttaatagctggctctggtttcgccgctagaggtaacatcagccctcaaaaatactgtctcaacagctggaaatataaaagatttgcaaacttctttgtttctgtctctgcattgtatgccattttatagtccacaccctgaaaatgtatttcttccagaaagtctggaggaaggacctatatttgtagaagtaaaggtatattctgtcactcagctgtattcacgtctgagcagttctgcagtaacacctgcttaaaattctccctttgcatgttttgtaaataggctccagttttgttttttaaaaggaatttattttttgcctcatcagtccacccaactgattctgaatgggagagagtctgtagagaattgattcagaaaagtgtctgtgaaagaaaaacaattattttgtcctgtttctcaaacagtgttaagcagttttgttaatagacatttttgcatcgacacttcaacattaacactttgaaagtcatggtctggtgccagatttaagaaactcgaaccacctaatatttcataaccttcttcattaggtacttgtacagattaatttctaacattgcagcagtttcatatgtgtgcaatatgtgcattctttcattttagttttgcacttggttttctataaagtacgtttttactcagttcatgcgtgaacaatttaaaaaacgacagaataaggtacaaatgtagtgtatttaataaactgtcaaccaaagaaaaaaaaaaaaaaaaaaaaaaa

SEQ ID NO: 13678 - DNA, 3822 bp, Homo sapiens
gctcagggacccaaacctgtcgggcaggttttgagagctgtggagagagggacagaggctggagaaggatgtatggcctgccctgggcttgtctgttccctcctgagcctgagccccttaccttcctgaccccatgaagcacacactggctctgctggctcccctgctgggcctgggcctggggctggccctgagtcagctggctgcaggggccacagactgcaagttccttggcccggcagagcacctgacattcaccccagcagccagggcccggtggctggcccctcgagttcgtgcgccaggactcctggactccctctatggcaccgtgcgccgcttcctctcggtggtgcagctcaatcctttcccttcagagttggtaaaggccctactgaatgagctggcctccgtgaaggtgaatgaggtggtgcggtacgaggcgggctacgtggtatgcgctgtgatcgcgggcctctacctgctgctggtgcccactgccgggctttgcttctgctgctgccgctgccaccggcgctgcgggggacgagtgaagacagagcacaaggcgctggcctgtgagcgcgcggccctcatggtcttcctgctgctgaccaccctcttgctgctgattggtgtggtctgtgcctttgtcaccaaccagcgcacgcatgaacagatgggccccagcatcgaggccatgcctgagaccctgctcagcctctggggcctggtctctgatgtcccccaagagctgcaggccgtggcacagcaattctccctgccccaggagcaagtctcagaggagctggatggtgttggtgtgagcattgggagcgcgatccacactcagctcaggagctccgtgtaccccttgctggcggccgtgggcagtttgggccaggtcctgcaggtctccgtgcaccacctgcaaaccttgaatgctacagtggtagagctgcaggccgggcagcaggacctggagccagccatccgggaacaccgggaccgcctccttgagctgctgcaggaggccaggtgccagggagattgtgcaggggccctgagctgggcccgcaccctggagctgggtgctgacttcagccaggtgccctctgtggaccatgtcctgcaccagctaaaaggtgtccccgaggccaacttctccagcatggtccaggaggagaacagcaccttcaacgcccttccagccctggctgccatgcagacatccagcgtggtgcaagagctgaagaaggcagtggcccagcagccggaaggggtgaggacactggctgaagggttcccgggcttggaggcagcttcccgctgggcccaggcactgcaggaggtggaggagagcagccgcccctacctgcaggaggtgcagagatacgagacctacaggtggatcgtgggctgcgtgctgtgctccgtggtcctattcgtggtgctctgcaacctgctgggcctcaatctgggcatctggggcctgtctgccagggacgaccccagccacccagaagccaagggcgaggctggagcccgcttcctcatggcaggtgtgggcctcagcttcctctttgctgcacccctcatcctcctggtgttcgccaccttcctggtgggtggcaacgtgcagacgctggtgtgccggagctgggagaacggcgagctctttgagtttgcagacaccccagggaacctgcccccgtccatgaacctgtcgcaacttcttggcctgaggaagaacatcagcatccaccaagcctatcagcagtgcaaggaaggggcagcgctctggacagtcctgcagctcaacgactcctacgacctggaggagcacctggatatcaaccagtataccaacaagctacggcaggagttgcagagcctgaaagtagacacacagagcctggacctgctgagctcagccgcccgccgggacctggaggccctgcagagcagtgggcttcagcgcatccactaccccgacttcctcgttcagatccagaggcccgtggtgaagaccagcatggagcagctggcccaggagctgcaaggactggcccaggcccaagacaattctgtgctggggcagcggctgcaggaggaggcccaaggactcagaaaccttcaccaggagaaggtcgtcccccagcagagccttgtggcaaagctcaacctcagcgtcagggccctggagtcctctgccccgaatctccagctggagacctcagatgtcctagccaatgtcacctacctgaaaggagagctgcctgcctgggcagccaggatcctgaggaatgtgagtgagtgtttcctggcccgggagatgggctacttctcccagtacgtggcctgggtgagagaggaggtgactcagcgcattgccacctgccagcccctctccggagccctggacaacagccgtgtgatcctgtgtgacatgatggctgacccctggaatgccttctggttctgcctggcatggtgcaccttcttcctgatccccagcatcatctttgccgtcaagacctccaaatacttccgtcctatccggaaacgcctcagctccaccagctctgaggagactcagctcttccacatcccccgggttacctccctgaagctgtagggccttgtgggagtgatctggtggccagaacaggattttgcacggccccttttatcctgcgcatgtggcctagggtcatccccagcccatccctgtgtcagccctgagtgctggacactgcgttccagaaatgaggaagaggagagagaagagatggacagacctcagatccattaaagtgttctcacttccctgagacttggttctgggtccttaaaaccaggtttcctaggctgggaccctgtacatagttggtgtttaatgagtgtttatggagaggagagttctaaggtcacctctggctgcaggcatccagggattattccagcaatctgcaggtagggagtgggtcccagcctgggagcctgctgtcaggagcaggcagacctggactcacagcctggctgtgatgcttgttcgctcagcttctccatttatgagatggggagaatagtcacagcctcctcaaagggttgtgaaaatcaaatgtgataatttgtggaaagcccttagcagtggcctggcacaaaacaaatgctcagtggatggaagctgcctattattattgtcgttgttgttgtttgccatgactgctctgggccgggggtagagctagcatccgggcatgtacgagggaagagggaggcaggcctctattcaaaggcagaaattcctttaagattgtggtctgctgggtttcagggagtgtctgtgttgtttgtttttgtttgtttgtttgttttgagacggggtctcgctctgtcacccaggctggagtgtagtggtgcagtcttggctcactgcagcctccacctcctgggctcaagcgattctcatgcctcagcctcccgagtagctgggactgcaggtgtgtgccactatgcctggctaatttttgtgttttttgtagagacggggttttgccatgttgcccaggctggaagtgtctatgtttaactgcatcttataaaccagcaacaagttttctactgggaattagaatggtgcatacacaatgtattattatcactgtcagatgagcatgcttgaatgtagcatgactgcctctttttgcttttcctagaggttttttttttgcttgttactcatctgttgacctacctgggggaagtagcacccttgcatttcaaaaataaaattgatggcattacaaatggaataga

SEQ ID NO: 13679 - DNA, 3396 bp, Homo sapiens
gtcgggggccgaagcgcctcccgcagggagtccccgtgaggccgcgctgccgcgttacccgcagcggccgggggtccggggagtgcggggctccgagacagagccaggcgccccccagcggtcggcgcgggccccatggctgggccgggcggagcggaaccggtgaggtgaagccccggggccggcagccggaggcgcgtggccggggcgccggctccatgggcagcggcacacggcggcgcgatgatggacgttaacagcagcggccgcccggacctctacgggcacctccgctctttccttctgccagaagtggggcgcgggctgcccgacttgagccccgacggtggcgccgacccggtcgcgggctcctgggcgccgcacctgctgagcgaggtgacagccagcccggcgcccacctgggacgcgcccccggacaatgcctccggctgtggggaacagatcaactacggcagagtcgagaaagttgtgatcggctccatcctgacgctcatcacgctgctgacgatcgcgggcaactgcctggtggtgatctccgtgtgcttcgtcaagaagctccgccagccctccaactacctgatcgtgtccctggcgctggccgacctctcggtggctgtggcggtcatgcccttcgtcagcgtcaccgacctcatcgggggcaagtggatctttggacactttttctgtaatgtcttcatcgccatggacgtcatgtgctgcacggcctcgatcatgaccctgtgcgtgatcagcattgacaggtaccttgggatcacaaggcccctcacataccctgtgaggcagaatgggaaatgcatggcgaagatgattctctccgtctggcttctctccgcctccatcaccttacctccactctttggatgggctcagaatgtaaatgatgataaggtgtgcttgatcagccaggactttggctatacgatttactctaccgcagtggcattttatatccccatgtccgtcatgcttttcatgtactaccagatttacaaggctgccaggaagagtgctgccaaacacaagtttcctggcttccctcgagtggagccagacagcgtcatcgccctgaatggcatagtgaagctccagaaggaggtggaagagtgtgcaaacctttcgagactcctcaagcatgaaaggaaaaacatctccatctttaagcgagaacagaaagcagccaccaccctggggatcatcgtcggggcctttaccgtgtgctggctgccatttttcctcctctcgacagccagacccttcatctgtggcacttcctgcagctgcatcccactgtgggtggagaggacatttctgtggctaggctatgcaaactctctcattaacccttttatatatgccttcttcaaccgggacctgaggaccacctatcgcagcctgctccagtgccagtaccggaatatcaaccggaagctctcagctgcaggcatgcatgaagccctgaagcttgctgagaggccagagagacctgagtttgtgctgagggcctgcacaaggagggtgctgttgagaccagaaaagaggccaccggtatctgtgtgggtgctacaatctccagaccatcacaattggttagcagacaaaatgctgactactgtagaaaaaaaggtcatgattcatgattgaaagcagaacaatggagatgaaataaacaaggcaaaatagaggtggaaacagaaggaagtcatttgctgagtctgcagaatggaatgcagcttctgtcctttcttgggatgtctaaaacatgacaaacagggtgatctgttgtacacactatcttatgagggagatggtgacttctcctttttttctgtggatcagtgctattgtgtgttctcagtttaagatagcagatcatctcagcagtaagcacaccaacagaactgagttccagaaaggaagcagtttctggtgctttgcatatgtccaaatccatgcaagtgggagaaagttccagtgcacacttcccatgcttctgagtctaggcgttgtggtgaatatgcaggaatcattcatgagacagaatgtattttgttgtatgacagaaggcttttccaagcaaactgcggtgagcgtagtgttgaatatgttgcatgtccatgttagaaaacagaatccagtcatcagctaatacaaatgatttcccagagcagtgtttgtttcaagcttctgtcaaatagtttggcttttctgcagggtctctgtgatttccccacctatgtacttttctgtgttaactcacttattatggtataactcaggaacaggtctcaggatggagagaagcatacaacatgagcaaagctttttctcgtgctctgaagggtcttgagaggggagtgggatgccttctgtgaggatttttatcgcagtgaagctcaagtggtacccaactgcgttgtaattaacatgattattggcatgtttttgactctcattttctacaaggctgcagtgggcccacccatgggctggcccataactgtatgttatgtggaagaagtgtgggaatgatgggttttccatgaaatgtgatgcttctggagatggggcataaacatgttcattcttgttgagctgcattgtgttaaaccaaattgtgtgaagcgaggtcacctggaccactcttgggaaatgcttcagaacaccagtctgttccttctagagaatttgtttttgtgttctatgtatcttaaatcaaatgtgtgcctaagcaattctgtcctctgattcccacccctacccaccaaaaaatggtagacatgaaaggcaggtgaggaaacagaaaaggtctctttgcagatatatattttttaaatggcactatgtagtaattaagagctaaggagacagaaagacagtagatgagaatagaagagtacctgtacctacaaggggaaaaatgaatgcaattctttatttgataagagtgaactgaaagagaatattattttcctacaataaagcaagctgtcctctcacaggataaagtggaattctgacatggattatggacttcttctaactcccattgacattgcttcttaccagacatggggaaaagctacctttcctgaaaggggaggagggcactgtcctttcagacaaagcttgtacaaattcctgaaccgcaaatttgctgaagtgaccgtatatattatattcataatttaaatgattatttatggtcagatacatattgttaaacttgaaaatgttttattacattacatcaaataaagtttatttgtagctgaaataaagcaacgtaagtaacaatttttaattaaaaaaaaaaaaaaaaaaaaaaaaaaaaaaaaaaaaaaaaaaaaaaaaaaa

SEQ ID NO: 13680 - DNA, 3263 bp, Homo sapiens
gtcgggggccgaagcgcctcccgcagggagtccccgtgaggccgcgctgccgcgttacccgcagcggccgggggtccggggagtgcggggctccgagacagagccaggcgccccccagcggtcggcgcgggccccatggctgggccgggcggagcggaaccggtgaggtgaagccccggggccggcagccggaggcgcgtggccggggcgccggctccatgggcagcggcacacggcggcgcgatgatggacgttaacagcagcggccgcccggacctctacgggcacctccgctctttccttctgccagaagtggggcgcgggctgcccgacttgagccccgacggtggcgccgacccggtcgcgggctcctgggcgccgcacctgctgagcgaggtgacagccagcccggcgcccacctgggacgcgcccccggacaatgcctccggctgtggggaacagatcaactacggcagagtcgagaaagttgtgatcggctccatcctgacgctcatcacgctgctgacgatcgcgggcaactgcctggtggtgatctccgtgtgcttcgtcaagaagctccgccagccctccaactacctgatcgtgtccctggcgctggccgacctctcggtggctgtggcggtcatgcccttcgtcagcgtcaccgacctcatcgggggcaagtggatctttggacactttttctgtaatgtcttcatcgccatggacgtcatgtgctgcacggcctcgatcatgaccctgtgcgtgatcagcattgacaggtaccttgggatcacaaggcccctcacataccctgtgaggcagaatgggaaatgcatggcgaagatgattctctccgtctggcttctctccgcctccatcaccttacctccactctttggatgggctcagaatgtaaatgatgataaggtgtgcttgatcagccaggactttggctatacgatttactctaccgcagtggcattttatatccccatgtccgtcatgcttttcatgtactaccagatttacaaggctgccaggaagagtgctgccaaacacaagtttcctggcttccctcgagtggagccagacagcgtcatcgccctgaatggcatagtgaagctccagaaggaggtggaagagtgtgcaaacctttcgagactcctcaagcatgaaaggaaaaacatctccatctttaagcgagaacagaaagcagccaccaccctggggatcatcgtcggggcctttaccgtgtgctggctgccatttttcctcctctcgacagccagacccttcatctgtggcacttcctgcagctgcatcccactgtgggtggagaggacatttctgtggctaggctatgcaaactctctcattaacccttttatatatgccttcttcaaccgggacctgaggaccacctatcgcagcctgctccagtgccagtaccggaatatcaaccggaagctctcagctgcaggcatgcatgaagccctgaagcttgctgagaggccagagagacctgagtttgtgctacaaaatgctgactactgtagaaaaaaaggtcatgattcatgattgaaagcagaacaatggagaaggaagtcatttgctgagtctgcagaatggaatgcagcttctgtcctttcttgggatgtctaaaacatgacaaacagggtgatctgttgtacacactatcttatgagggagatggtgacttctcctttttttctgtggatcagtgctattgtgtgttctcagtttaagatagcagatcatctcagcagtaagcacaccaacagaactgagttccagaaaggaagcagtttctggtgctttgcatatgtccaaatccatgcaagtgggagaaagttccagtgcacacttcccatgcttctgagtctaggcgttgtggtgaatatgcaggaatcattcatgagacagaatgtattttgttgtatgacagaaggcttttccaagcaaactgcggtgagcgtagtgttgaatatgttgcatgtccatgttagaaaacagaatccagtcatcagctaatacaaatgatttcccagagcagtgtttgtttcaagcttctgtcaaatagtttggcttttctgcagggtctctgtgatttccccacctatgtacttttctgtgttaactcacttattatggtataactcaggaacaggtctcaggatggagagaagcatacaacatgagcaaagctttttctcgtgctctgaagggtcttgagaggggagtgggatgccttctgtgaggatttttatcgcagtgaagctcaagtggtacccaactgcgttgtaattaacatgattattggcatgtttttgactctcattttctacaaggctgcagtgggcccacccatgggctggcccataactgtatgttatgtggaagaagtgtgggaatgatgggttttccatgaaatgtgatgcttctggagatggggcataaacatgttcattcttgttgagctgcattgtgttaaaccaaattgtgtgaagcgaggtcacctggaccactcttgggaaatgcttcagaacaccagtctgttccttctagagaatttgtttttgtgttctatgtatcttaaatcaaatgtgtgcctaagcaattctgtcctctgattcccacccctacccaccaaaaaatggtagacatgaaaggcaggtgaggaaacagaaaaggtctctttgcagatatatattttttaaatggcactatgtagtaattaagagctaaggagacagaaagacagtagatgagaatagaagagtacctgtacctacaaggggaaaaatgaatgcaattctttatttgataagagtgaactgaaagagaatattattttcctacaataaagcaagctgtcctctcacaggataaagtggaattctgacatggattatggacttcttctaactcccattgacattgcttcttaccagacatggggaaaagctacctttcctgaaaggggaggagggcactgtcctttcagacaaagcttgtacaaattcctgaaccgcaaatttgctgaagtgaccgtatatattatattcataatttaaatgattatttatggtcagatacatattgttaaacttgaaaatgttttattacattacatcaaataaagtttatttgtagctgaaataaagcaacgtaagtaacaatttttaattaaaaaaaaaaaaaaaaaaaaaaaaaaaaaaaaaaaaaaaaaaaaaaaaaaa

SEQ ID NO: 13681 - DNA, 3303 bp, Homo sapiens
gtcgggggccgaagcgcctcccgcagggagtccccgtgaggccgcgctgccgcgttacccgcagcggccgggggtccggggagtgcggggctccgagacagagccaggcgccccccagcggtcggcgcgggccccatggctgggccgggcggagcggaaccggtgaggtgaagccccggggccggcagccggaggcgcgtggccggggcgccggctccatgggcagcggcacacggcggcgcgatgatggacgttaacagcagcggccgcccggacctctacgggcacctccgctctttccttctgccagaagtggggcgcgggctgcccgacttgagccccgacggtggcgccgacccggtcgcgggctcctgggcgccgcacctgctgagcgaggtgacagccagcccggcgcccacctgggacgcgcccccggacaatgcctccggctgtggggaacagatcaactacggcagagtcgagaaagttgtgatcggctccatcctgacgctcatcacgctgctgacgatcgcgggcaactgcctggtggtgatctccgtgtgcttcgtcaagaagctccgccagccctccaactacctgatcgtgtccctggcgctggccgacctctcggtggctgtggcggtcatgcccttcgtcagcgtcaccgacctcatcgggggcaagtggatctttggacactttttctgtaatgtcttcatcgccatggacgtcatgtgctgcacggcctcgatcatgaccctgtgcgtgatcagcattgacaggtaccttgggatcacaaggcccctcacataccctgtgaggcagaatgggaaatgcatggcgaagatgattctctccgtctggcttctctccgcctccatcaccttacctccactctttggatgggctcagaatgtaaatgatgataaggtgtgcttgatcagccaggactttggctatacgatttactctaccgcagtggcattttatatccccatgtccgtcatgcttttcatgtactaccagatttacaaggctgccaggaagagtgctgccaaacacaagtttcctggcttccctcgagtggagccagacagcgtcatcgccctgaatggcatagtgaagctccagaaggaggtggaagagtgtgcaaacctttcgagactcctcaagcatgaaaggaaaaacatctccatctttaagcgagaacagaaagcagccaccaccctggggatcatcgtcggggcctttaccgtgtgctggctgccatttttcctcctctcgacagccagacccttcatctgtggcacttcctgcagctgcatcccactgtgggtggagaggacatttctgtggctaggctatgcaaactctctcattaacccttttatatatgccttcttcaaccgggacctgaggaccacctatcgcagcctgctccagtgccagtaccggaatatcaaccggaagctctcagctgcaggcatgcatgaagccctgaagcttgctgagaggccagagagacctgagtttgtgctgtaagacaaaatgctgactactgtagaaaaaaaggtcatgattcatgattgaaagcagaacaatggagatgaaataaacaaggcaaaatagaggtggaaacagaaggaagtcatttgctgagtctgcagaatggaatgcagcttctgtcctttcttgggatgtctaaaacatgacaaacagggtgatctgttgtacacactatcttatgagggagatggtgacttctcctttttttctgtggatcagtgctattgtgtgttctcagtttaagatagcagatcatctcagcagtaagcacaccaacagaactgagttccagaaaggaagcagtttctggtgctttgcatatgtccaaatccatgcaagtgggagaaagttccagtgcacacttcccatgcttctgagtctaggcgttgtggtgaatatgcaggaatcattcatgagacagaatgtattttgttgtatgacagaaggcttttccaagcaaactgcggtgagcgtagtgttgaatatgttgcatgtccatgttagaaaacagaatccagtcatcagctaatacaaatgatttcccagagcagtgtttgtttcaagcttctgtcaaatagtttggcttttctgcagggtctctgtgatttccccacctatgtacttttctgtgttaactcacttattatggtataactcaggaacaggtctcaggatggagagaagcatacaacatgagcaaagctttttctcgtgctctgaagggtcttgagaggggagtgggatgccttctgtgaggatttttatcgcagtgaagctcaagtggtacccaactgcgttgtaattaacatgattattggcatgtttttgactctcattttctacaaggctgcagtgggcccacccatgggctggcccataactgtatgttatgtggaagaagtgtgggaatgatgggttttccatgaaatgtgatgcttctggagatggggcataaacatgttcattcttgttgagctgcattgtgttaaaccaaattgtgtgaagcgaggtcacctggaccactcttgggaaatgcttcagaacaccagtctgttccttctagagaatttgtttttgtgttctatgtatcttaaatcaaatgtgtgcctaagcaattctgtcctctgattcccacccctacccaccaaaaaatggtagacatgaaaggcaggtgaggaaacagaaaaggtctctttgcagatatatattttttaaatggcactatgtagtaattaagagctaaggagacagaaagacagtagatgagaatagaagagtacctgtacctacaaggggaaaaatgaatgcaattctttatttgataagagtgaactgaaagagaatattattttcctacaataaagcaagctgtcctctcacaggataaagtggaattctgacatggattatggacttcttctaactcccattgacattgcttcttaccagacatggggaaaagctacctttcctgaaaggggaggagggcactgtcctttcagacaaagcttgtacaaattcctgaaccgcaaatttgctgaagtgaccgtatatattatattcataatttaaatgattatttatggtcagatacatattgttaaacttgaaaatgttttattacattacatcaaataaagtttatttgtagctgaaataaagcaacgtaagtaacaatttttaattaaaaaaaaaaaaaaaaaaaaaaaaaaaaaaaaaaaaaaaaaaaaaaaaaaa

SEQ ID NO: 13682 - DNA, 2255 bp, Homo sapiens
agctggacggccccgggaggccgcagaccgccgggctccccgaggacacctcgcaccggaggaggagaggaggcagcgcccggccaggctgggagcacctacggccgcgcgggggcgggagccaggtggcctcggcgcgcccgcctcgcccgggcaccgagcaggaagtggctgcggcgcggcctcctcgcggtgcaacagggcggggaggcggccgcagcccgagccggagcccgagcgccgggagcgagacctcatggcagcggtggcgcccgcgggccccggggactccgcctcggccgccctggacgagctgtcactgaatttcacgtacggggcaccaggcgccggcaacggctccctctcgggcgactggtaccgcaggaaccagattcacctttttggagttttgctggctattttaggaaacttggtgatcagtatttctctaaatattcagaaatattctcaccttcagctggcacaacaagagcacccaaggccatacttcaagagtgtgctgtggtggggtggtgtcctgctgatggccgtgggagagacggggaactttgcagcctatggatttgctcccattactctgatcgctccgttaggctgtgtgtctgttacaggtagtgccattatttctgttacatttctgaaagacaatttgagagcctcagacttactcggtacgacactggcatttgcaggaacatatttactggtgaactttgctccaaatataactcaggcaatctcagcaagaacagtacagtattaccttgtcggatggcagttcctgatctatgtgattttagaaatattaattttctgcattctcctgtatttctataaaagaaaaggaatgaagcatatggtgattctgctaaccctggtggcaattctagcctcattgactgttatttcagtaaaggccgtctcaggcatgatcactttttctgtgatggataaaatgcaactaacttaccccattttctatatcatgtttatcatcatgatagcatcttgtgttttccaagtcaagttcctgaatcaagccacgaaactctacaatacgacaacagtggtgccagttaatcatattttctttacaatcagtgccatcattgcaggtatcatattttatcaggaattccttggtgctccttttctcactgtatttatatatctttttgggtgttttctgtcattccttggtgtatttttggtcacaagaaatcgagaaaaggaacatctgcaacagtcttatattgattttggaaatattcctgacacaaccccagagagaaaggcttggagggaaacaaatgttggacaaaatacaaccagattcacatagcttatcctatggaactttgcctgatggaagtgactcaacaaagagccaaagtggagagaagaaagaggtctaaatgctgagaaggatggctgttggcctgttattcgataccacctttttaaaaaattgcacatgttcaatttgtgtcagcagctcttttataagctaacatgtgctagcattcatttcagtcctttcccccacctcagcgtctatggacaatcggggacttcctaagctctgacagtctaatatttccatggaatgtgatttggagtgttccccacaccctggacctctccctagtgattatctagccagctacaccttactcagagcccggctgctctagcaggaatgttgcacagaaacatacatttgcggtttggccacaggtcgcataggtggcttctcccacgggtagtgtcagttgcttcactttaaaaagtcacttcagccccacaacctcactcccaaaagaaaggtttgagagcgctcattttttttctaagacaccttttataagcctccctataaaaatctcacctttcaagtactaagttagaattgcaagtcatcttttctgaaaactaatgctatcaaagtcctcctttgaaaattaagggtctctttaaaattagaatttataaatggcattcagtgatagtgtacaccaaaattaaaagaccttgactggtgggctttttacgtgtaaggaagaggaagtttaagaagtaggactctgcttgtttcagtagcccatgtactaaaataggaacaatgcagagattagcacagcccctgcacaaggctgacacataaattcatgaagcgttagagacaaaaagtaggactaatgtttgtttattttttaataaaaatctagaatggt

SEQ ID NO: 13683 - DNA, 2863 bp, Homo sapiens
tggggctcaaattgggtgccctggtgaaggaggggggcacactccagaacctagtccaaccccagacgctgcctgaggcttccctccagctcccctcccttccttttctccctttcctccctccctctctttccctttctccctccccgctaaggctggcgtgccagggggtgggacatgccaatcactggctgtgcctctcccgctgccagcacagggcgcagctccccctgggagccaggtgtttgggtccctggagacgccgcaggcccccagggaggcagtggggctgaggaccctacagacccctcttcagccccgtggtgatgactttcccctgaggaagccctgtagcgtgcctggaggaaggggctctccaaccccagccccacctagccaccatgaacacttcagccccacctgctgtcagccccaacatcaccgtcctggcaccaggaaagggtccctggcaagtggccttcattgggatcaccacgggcctcctgtcgctagccacagtgacaggcaacctgctggtactcatctctttcaaggtcaacacggagctcaagacagtcaataactacttcctgctgagcctggcctgtgctgacctcatcatcggtaccttctccatgaacctctataccacgtacctgctcatgggccactgggctctgggcacgctggcttgtgacctctggctggccctggactatgtggccagcaatgcctccgtcatgaatctgctgctcatcagctttgaccgctacttctccgtgactcggcccctgagctaccgtgccaagcgcacaccccgccgggcagctctgatgatcggcctggcctggctggtttcctttgtgctctgggccccagccatcctcttctggcagtacctggtaggggagcggacagtgctagctgggcagtgctacatccagttcctctcccagcccatcatcacctttggcacagccatggctgccttctacctccctgtcacagtcatgtgcacgctctactggcgcatctaccgggagacagagaaccgagcacgggagctggcagcccttcagggctccgagacgccaggcaaagggggtggcagcagcagcagctcagagaggtctcagccaggggctgagggctcaccagagactcctccaggccgctgctgtcgctgctgccgggcccccaggctgctgcaggcctacagctggaaggaagaagaggaagaggacgaaggctccatggagtccctcacatcctcagagggagaggagcctggctccgaagtggtgatcaagatgccaatggtggaccccgaggcacaggcccccaccaagcagcccccacggagctccccaaatacagtcaagaggccgactaagaaagggcgtgatcgagctggcaagggccagaagccccgtggaaaggagcagctggccaagcggaagaccttctcgctggtcaaggagaagaaggcggctcggaccctgagtgccatcctcctggccttcatcctcacctggacaccgtacaacatcatggtgctggtgtccaccttctgcaaggactgtgttcccgagaccctgtgggagctgggctactggctgtgctacgtcaacagcaccatcaaccccatgtgctacgcactctgcaacaaagccttccgggacacctttcgcctgctgctgctttgccgctgggacaagagacgctggcgcaagatccccaagcgccctggctccgtgcaccgcactccctcccgccaatgctgatagtcccctctcctgcatccctccaccccagtccccgggaaaggccggtgggaagagggcaggggctgcatcctcagccccagggccctgctcaggcctcacctggcttcccaggaccctgggtcaccttcctgggcagcccagagagaccctgccaactttccagacttcgctattcccaggcagggagggaaacccggggaactggtttttctgttccctgctgggtgggaatgcgctcttcaccaggaagaaggcccgggaggaggatccgggctttggactccttgtttgcctttaggcaggaagtcaggagccagcagggcgggccaggagaaagaaggcttaacattaagtattccttggcccagcagcggcccagattgcggtgtgagatggtgccccctggggggcacagccagaaactgaactggccgctgggagaaaagccagatgacagggagctggggaatcccctcgcttcataggcagagcccgcccacctgggccctaggcatactctccaggattgtccacaaatgtcctcagagggtccctaggtgggtcaactccaaggcaaatgtccaagcatcagcaagacaatgacactggaagggtccggcttggctagtcacatatcaagtcccgaggcagcaacaggaccaggagccaggtgtcctgactgtcctacaatatcattttcctgggagtgggagtcaagtgtgcctgctatccagccgcaaatccataccccctgccccagagaagcctcagtccctccctcctggctcacagccaccacctggatggatctgctccatgcagatctagccaggcctcccgcatgctgcctgcctccggccctgccccacacaggcctggcccagccagcaggttctctcctgtgagctccccaatccaacccatgcatggcctcccagccacccggatctccaggcccagcctggccccaaatgttctttcctttcatcctcagcaagtgctgagtctgtgaataaagccacataaccagcgggcaaaaaaaaaaaaaaaaaaaaaaaaaaaaaaaaaaaaaaaaa

SEQ ID NO: 13684 - DNA, 7095 bp, Homo sapiens
ccgggctgcgcggcgaggctgagccgggcccgggcgccggggccgggggcggctggcgcgggcaggaagcgcctcgcggacccgggcccgccccccgcctcccgccgcctccgggctcccggctcccggccgcgcctcgccccatgcactcgccgcgccgcgcagcccgcgcacgcccggatggctcctcgcgccgcgggcggcgcaccccttagcgcccgggccgccgccgccagccccccgccgttccagacgccgccgcggtgcccggtgccgctgctgttgctgctgctcctgggggcggcgcgggccggcgccctggagatccagcgtcggttcccctcgcccacgcccaccaacaacttcgccctggacggcgcggcggggaccgtgtacctggcggccgtcaaccgcctctatcagctgtcgggcgccaacctgagcctggaggccgaggcggccgtgggcccggtgcccgacagcccgctgtgtcacgctccgcagctgccgcaggcctcgtgcgagcacccgcggcgcctcacggacaactacaacaagatcctgcagctggaccccggccagggcctggtagtcgtgtgcgggtccatctaccagggcttctgccagctgcggcgccggggtaacatctcggccgtggccgtgcgcttcccgcccgccgcgccgcccgccgagcccgtcacggtgttccccagcatgctgaacgtggcggccaaccacccgaacgcgtccaccgtggggctagttctgcctcccgccgcgggcgcggggggcagccgcctgctcgtgggcgccacgtacaccggttacggcagctccttcttcccgcgcaaccgcagcctggaggaccaccgcttcgagaacacgcccgagatcgccatccgctccctggacacgcgcggcgacctggccaagctcttcaccttcgacctcaacccctccgacgacaacatcctcaagatcaagcagggcgccaaggagcagcacaagctgggcttcgtgagcgccttcctgcacccgtccgacccgccgccgggtgcacagtcctacgcgtacctggcgctcaacagcgaggcgcgcgcgggcgacaaggagagccaggcgcggagcctgctggcgcgcatctgcctgccccacggcgccggcggcgacgccaagaagctcaccgagtcctacatccagttgggcttgcagtgcgcgggcggcgcgggccgcggcgacctctacagccgcctggtgtcggtcttcccagcccgggagcggctctttgctgtcttcgagcggccccaggggtcccccgcggcccgcgctgctccggccgcactctgcgccttccgcttcgccgacgtgcgagccgccatccgagctgcgcgcaccgcctgcttcgtggaaccggcgcccgacgtggtggcggtgctcgacagcgtggtgcagggcacgggaccggcctgcgagcgcaagctcaacatccagctccagccagagcagctggactgtggagctgctcacctgcagcacccgctgtccatcctgcagcccctgaaggccacgcccgtgttccgcgccccgggcctcacctccgtggccgtggccagcgtcaacaactacacagcggtcttcctgggcacggtcaacgggaggcttctcaagatcaacctgaacgagagcatgcaggtggtgagcaggcgggtggtgactgtggcctatggggagcccgtgcaccatgtcatgcagtttgacccagcagactccgtttacctttacctgatgacgtcccaccagatggccagggtgaaggtcgccgcctgcaacgtgcactccacctgtggggactgcgtgggtgcggcggacgcctactgcggctggtgtgccctggagacgcggtgcaccttgcagcaggactgcaccaattccagccagcagcatttctggaccagtgccagcgagggccccagccgctgtcctgccatgaccgtcctgccttccgagatcgatgtgcgccaggagtacccaggcatgatcctgcagatctcgggcagcctgcccagcctcagtggcatggagatggcctgtgactatgggaacaacatccgcactgtggctcgggtcccaggccctgcctttggtcaccagattgcctactgcaacctcctgccgagggaccagtttccgcccttcccccccaaccaggaccacgtgactgttgagatgtctgtgagggtcaatgggcggaacatcgtcaaggccaatttcaccatctacgactgcagccgcactgcacaagtgtacccccacacagcctgtaccagctgcctgtcggcacagtggccctgtttctggtgcagccagcagcactcctgtgtttccaaccagtctcggtgcgaggcctcaccaaaccccacgagccctcaggactgcccccggaccctgctctcacccctggcacccgtgcctacgggtggctcccagaacatcctggtgcctctggccaacactgcctttttccagggtgcagccctggagtgtagttttgggctggaggagatcttcgaggctgtgtgggtgaatgagtctgttgtacgctgtgaccaggtggtgctgcacacgacccggaagagccaggtgttcccgctcagcctccaactaaaggggcggccagcccgattcctggacagccctgagcccatgacagtcatggtctataactgtgccatgggcagccccgactgttcccagtgcctgggccgcgaagacctgggtcacctgtgcatgtggagtgatggctgccgcctgcgggggcctctgcagcccatggctggcacctgccccgcccccgagatccgcgcgattgagcccctgagtggcccgttggacggtgggaccctgctgaccatccgaggaaggaacctgggccggcggctcagtgacgtggcccacggcgtgtggattggtggtgtggcctgtgagccactgcctgacagatacacggtgtcggaggagatcgtgtgtgtcacagggccagccccaggaccactctcaggtgtggtgaccgtgaacgcctctaaggagggcaagtcccgggaccgcttctcctacgtgctgcccctggtccactccctggagcctaccatgggccccaaggccgggggcaccaggatcaccatccatgggaatgacctccatgtaggctccgagctccaggtcctggtgaacgacacagacccctgcacggagctgatgcgcacagataccagcatcgcctgcaccatgcctgagggggccctgccggctccggtgcctgtgtgtgtgcgcttcgagcgtcggggctgcgtgcacggcaacctcaccttctggtacatgcagaacccggtcatcacggccatcagtccccgccgcagccctgtcagtggcggcaggaccatcacagtggctggtgagcgtttccacatggtgcagaatgtgtccatggccgtccaccacattggccgggagcccacgctctgcaaggttctcaactccaccctcatcacctgcccgtcccccggggccctgagcaacgcatcagcgccagtggacttcttcatcaatgggcgggcctacgcagacgaggtggctgtggctgaggagctactggaccccgaggaggcacagcggggcagcaggttccgcctggactacctccccaacccacagttctctacggccaagagggagaagtggatcaagcaccaccccggggagcctctcaccctcgttatccacaaggagcaggacagcctggggctccagagtcacgagtaccgggtcaagataggccaagtaagctgcgacatccagattgtctctgacagaatcatccactgctcggtcaacgagtccctgggcgcggccgtggggcagctgcccatcacaatccaggtagggaacttcaaccagaccatcgccacactgcagctggggggtagcgagacggccatcatcgtgtccatcgtcatctgcagcgtcctgctgctgctctccgtggtggccctgttcgtcttctgtaccaagagccgacgtgctgagcgttactggcagaagacgctgctgcagatggaggagatggaatctcagatccgagaggaaatccgcaaaggcttcgctgagctgcagacagacatgacagatctcaccaaggagctgaaccgcagccagggcatccccttcctggagtataagcacttcgtgacccgcaccttcttccccaagtgttcctccctttatgaagagcgttacgtgctgccctcccagaccctcaactcccagggcagctcccaggcacaggaaacccacccactgctgggagagtggaagattcctgagagctgccggcccaacatggaagagggaattagcttgttctcctcactactcaacaacaagcacttcctcatcgtctttgtccacgcgctggagcagcagaaggactttgcggtgcgcgacaggtgcagcctggcctcgctgctgaccatcgcgctgcacggcaagctggagtactacaccagcatcatgaaggagctgctggtggacctcattgacgcctcggccgccaagaaccccaagctcatgctgcggcgcacagagtctgtggtggagaagatgctcaccaactggatgtccatctgcatgtacagctgtctgcgggagacggtgggggagccattcttcctgctgctgtgtgccatcaagcagcaaatcaacaagggctccatcgacgccatcacaggcaaggcccgctacacactcaatgaggagtggctgctgcgggagaacatcgaggccaagccccggaacctgaacgtgtccttccagggctgtggcatggactcgctgagcgtgcgggccatggacaccgacacgctgacacaggtcaaggagaagatcctggaggccttctgcaagaatgtgccctactcccagtggccgcgtgcagaggacgtcgaccttgagtggttcgcctccagcacacagagctacatccttcgggacctggacgacacctcagtggtggaagacggccgcaagaagcttaacacgctggcccattacaagatccctgaaggtgcctccctggccatgagtctcatagacaagaaggacaacacactgggccgagtgaaagacttggacacagagaagtatttccatttggtgctgcctacggacgagctggcggagcccaagaagtctcaccggcagagccatcgcaagaaggtgctcccggaaatctacctgacccgcctgctctccaccaagggcacgttgcagaagtttctggatgacctgttcaaggccattctgagtatccgtgaagacaagcccccactggctgtcaagtactttttcgacttcctggaggagcaggctgagaagaggggaatctccgaccccgacaccctacacatctggaagaccaacagccttcctctccggttctgggtgaacatcctgaagaacccccagtttgtctttgacatcgacaagacagaccacatcgacgcctgcctttcagtcatcgcgcaggccttcatcgacgcctgctccatctctgacctgcagctgggcaaggattcgccaaccaacaagctcctctacgccaaggagattcctgagtaccggaagatcgtgcagcgctactacaagcagatccaggacatgacgccgctcagcgagcaagagatgaatgcccatctggccgaggagtcgaggaaataccagaatgagttcaacaccaatgtggccatggcagagatttataagtacgccaagaggtatcggccgcagatcatggccgcgctggaggccaaccccacggcccggaggacacaactgcagcacaagtttgagcaggtggtggctttgatggaggacaacatctacgagtgctacagtgaggcctgagacacatggagagttggtcaggctgctgctgggagaaatggacgcccactgggcctcaacttgatcttctaccccgtgcctgtgactcagactgggaaatactgagcagagacggctggggcgggggcaggaggaggggctgctctctgagacaggggcgcccccgccttgacccctgggcacctccatcccctcccacctgtccccagatcagtctctgggatggaggccagagagctggtcaggctcccccatctgcccagcacggcctgcactgtgcccacccacttgctccacaacgtccagttggtcctgctgccaagagccccgtgcatccaggcggccaagcacaaactgggggagaggaggccgccagcccggaggctgcagcccagaaactctacctcatccacactggtgcagggagccctccttgaactgacctttgattggtttctgcttcaactaccaaaatgttatctccacttccccctcacccgtagaggatcctggccacagacagtttcaagtagtgtcagatttttgttgcttgggcggctgttggtagagtgggcagtgcccgcgccatggggtgctctgtgggcttctccaggagcagggagggtggaggggagggatggggggcacaggagctgggagccccgtctccaggaaaaggagaggggttaagatgcaccgaggctgtagctgggctacttgatcttgctgaaagtgtttctaaagatagcaccacttttttttttaaagcttttatatattaaaaaacgtatcatgcaccaactgtgaatagctgccgcttgcgcagaggacccggggaggggtcccgagaggctccccatgcaacactggaaatgactgttccagagagcgggcagacctggcagagcgcccctggcgcctgagactaccacccactccgttcctgccagaaacgaccctctgtggccgatgggccatgcgggcccctcgcagccaactcagccagtgttgggactggctcagagcccatgggggctggaggggggcagctgggactctggaatcttctttataataaaagccttacggacaaacctactgtgggctccagcgtttgtcctgagatagccaagcggg

SEQ ID NO: 13685 - DNA, 4815 bp, Homo sapiens
gagcagagccctttcacacacctcaggaacacctttcggctgcccgctccccagacacacctgcagccctgcccagccggctttgctcacccactgcttgtaaatgccccagatatgagccagcccaggccccgctacgtggtagacagagccgcatactcccttaccctcttcgacgatgagtttgagaagaaggaccggacatacccagtgggagagaaacttcgcaatgccttcagatgttcctcagccaagatcaaagctgtggtgtttgggctgctgcctgtgctctcctggctccccaagtacaagattaaagactacatcattcctgacctgctcggtggactcagcgggggatccatccaggtcccacaaggcatggcatttgctctgctggccaaccttcctgcagtcaatggcctctactcctccttcttccccctcctgacctacttcttcctggggggtgttcaccagatggtgccaggtacctttgccgttatcagcatcctggtgggtaacatctgtctgcagctggccccagagtcgaaattccaggtcttcaacaatgccaccaatgagagctatgtggacacagcagccatggaggctgagaggctgcacgtgtcagctacgctagcctgcctcaccgccatcatccagatgggtctgggcttcatgcagtttggctttgtggccatctacctctccgagtccttcatccggggcttcatgacggccgccggcctgcagatcctgatttcggtgctcaagtacatcttcggactgaccatcccctcctacacaggcccagggtccatcgtctttaccttcattgacatttgcaaaaacctcccccacaccaacatcgcctcgctcatcttcgctctcatcagcggtgccttcctggtgctggtgaaggagctcaatgctcgctacatgcacaagattcgcttccccatccctacagagatgattgtggtggtggtggcaacagctatctccgggggctgtaagatgcccaaaaagtatcacatgcagatcgtgggagaaatccaacgcgggttccccaccccggtgtcgcctgtggtctcacagtggaaggacatgataggcacagccttctccctagccatcgtgagctacgtcatcaacctggctatgggccggaccctggccaacaagcacggctacgacgtggattcgaaccaggagatgatcgctctcggctgcagcaacttctttggctccttctttaaaattcatgtcatttgctgtgcgctttctgtcactctggctgtggatggagctggaggaaaatcccaggtggccagcctgtgtgtgtctctggtggtgatgatcaccatgctggtcctggggatctatctgtatcctctccctaagtctgtgctaggagccctgatcgctgtcaatctcaagaactccctcaagcaactcaccgacccctactacctgtggaggaagagcaagctggactgttgcatctgggtagtgagcttcctctcctccttcttcctcagcctgccctatggtgtggcagtgggtgtcgccttctccgtcctggtcgtggtcttccagactcagtttcgaaatggctatgcactggcccaggtcatggacactgacatttatgtgaatcccaagacctataatagggcccaggatatccaggggattaaaatcatcacgtactgctcccctctctactttgccaactcagagatcttcaggcaaaaggtcatcgccaagacaggcatggacccccagaaagtattactagccaagcaaaaatacctcaagaagcaggagaagcggagaatgaggcccacacaacagaggaggtctctattcatgaaaaccaagactgtctccctgcaggagctgcagcaggactttgagaatgcgccccccaccgaccccaacaacaaccagaccccggctaacggcaccagcgtgtcctatatcaccttcagccctgacagctcctcacctgcccagagtgagccaccagcctccgctgaggcccccggcgagcccagtgacatgctggccagcgtcccacccttcgtcaccttccacaccctcatcctggacatgagtggagtcagcttcgtggacttgatgggcatcaaggccctggccaagctgagctccacctatgggaagatcggcgtgaaggtcttcttggtgaacatccatgcccaggtgtacaatgacattagccatggaggcgtctttgaggatgggagtctagaatgcaagcacgtctttcccagcatacatgacgcagtcctctttgcccaggcaaatgctagagacgtgaccccaggacacaacttccaaggggctccaggggatgctgagctctccttgtacgactcagaggaggacattcgcagctactgggacttagagcaggagatgttcgggagcatgtttcacgcagagaccctgaccgccctgtgagggctcagccagtcctcatgctgcctacagagtgcctggcacttgggacttccataaaggatgagcctggggtcacagggggtgtcgggcggaggaaagtgcatcccccagagcttgggttcctctctcctctccccctctctcctcccttccttccctccccgcatctccagagagagcctctcagcagcaggggggtgctacccttacgggagtgagagtctggtgagcccactcttcacccgtcaggccctggccgcaatggacaagcctcctgctcactccaccccacccacatctgccctgtccttggcagctgaaggacaccttgacttccagcttttacgagtgagccaaaaacagaaggacaagtacaactgtgctggcctgctgtacaagcttcaaaaagtgtcccagagcccgcacggctcggtgtcagatggtgtcaggctgtcacggacatagggataaacttggttaggactctggcttgccttccccagctgcctcaactctgtctctggcagctctgcacccagggaccatgtgctctccacacccaggagtctaggccttggtaactatgcgccccccctccatcatccccaaggctgcccaaaccaccactgctgtcagcaagcacatcagactctagcctggacagtggccaggaccgtcgagaccaccagagctacctccccggggacagcccactaaggttctgcctcagcctcctgaaacatcactgccctcagaggctgctcccttcccctggaggctggctagaaaccccaaagagggggatgggtagctggcagaatcatctggcatcctagtaatagataccagttattctgcacaaaacttttgggaattcctctttgcacccagagactcagaggggaagagggtgctagtaccaacacagggaaaacggatgggacctgggcccagacagtcccccttgaccccagggcccatcagggaaatgcctccctttggtaaatctgccttatccttctttacctggcaaagagccaatcatgttaactcttccttatcagcctgtggcccagagacacaatggggtccttctgtaggcaaaggtggaagtcctccagggatccgctacatcccctaactgcatgcagatgtggaaaggggctgatccagattgggtcttcctgcacaggaagactctttaacacccttaggacctcaggccatcttctcctatgaagatgaaaataggggttaagttttccatatgtacaaggaggtattgagaggaaccctactgttgacttgaaaataaataggttccatgtgtaagtgttttgtaaaatttcagtggaaatgcacagaaaatcttctggcctctcatcactgcttttctcaagcttcttcagcttaacaaccccttccctaacaggttgggctggcccagcctaggaaaacatccccatttctaacttcagccagacctgcgttgtgtgtctgtgtgttgagtgagctggtcagctaacaagtcttcttagagttaaaggagggggtgctggccaagagccaacacattcttggcccaggagcattgcttttctgtgaattcattatgccatctggctgccaatggaactcaaaacttggaaggcgaaggacaatgttatctgggattcaccgtgcccagcacccgaagtgccaaattccaggaggacaagagccttagccaatgacaactcactctcccctactccacctccttccaagtccagctcaggcccaggaggtgggagaaggtcacagagcctcaggaatttccaagtcagagtcccctttgaaccaagtatctagatcccctgaggacttgatgaagtgatccttaacccccaagtaatcattaacccccagaccagcctcagaactgaaggagattgttgacccagtgacctggagttgaggctcagggagagatctgccacatgtctgagggttgcagagcccgctgtggaggtaagattggaaacacatgaggcagagggaagacattgaagaaaacatctctgctggaatatttggaaaagaacactcttctggacctggttgaagcaggaaagatggaggcaaagtagtgaaataatccagaatttcaatgcttttgaatgttcttagtgatactgacctgtgataatataattcccagggaggactgggaaccttatctcttgagatatttgcataatttatttaatttaagcctcattctccttttgttcattttggtaataaactggatttgaattgtgaacaaaaaaaaaaaaaaaaaaa

SEQ ID NO: 13686 - DNA, 4638 bp, Homo sapiens
gagcagagccctttcacacacctcaggaacacctttcggctgcccgctccccagacacacctgcagccctgcccagccggctttgctcacccactgcttgtaaatgccccagatatgagccagcccaggccccgctacgtggtagacagagccgcatactcccttaccctcttcgacgatgagtttgagaagaaggaccggacatacccagtgggagagaaacttcgcaatgccttcagatgttcctcagccaagatcaaagctgtggtgtttgggctgctgcctgtgctctcctggctccccaagtacaagattaaagactacatcattcctgacctgctcggtggactcagcgggggatccatccaggtcccacaaggcatggcatttgctctgctggccaaccttcctgcagtcaatggcctctactcctccttcttccccctcctgacctacttcttcctggggggtgttcaccagatggtgccaggtacctttgccgttatcagcatcctggtgggtaacatctgtctgcagctggccccagagtcgaaattccaggtcttcaacaatgccaccaatgagagctatgtggacacagcagccatggaggctgagaggctgcacgtgtcagctacgctagcctgcctcaccgccatcatccagatgggtctgggcttcatgcagtttggctttgtggccatctacctctccgagtccttcatccggggcttcatgacggccgccggcctgcagatcctgatttcggtgctcaagtacatcttcggactgaccatcccctcctacacaggcccagggtccatcgtctttaccttcattgacatttgcaaaaacctcccccacaccaacatcgcctcgctcatcttcgctctcatcagcggtgccttcctggtgctggtgaaggagctcaatgctcgctacatgcacaagattcgcttccccatccctacagagatgattgtggtggtggtggcaacagctatctccgggggctgtaagatgcccaaaaagtatcacatgcagatcgtgggagaaatccaacgcgggttccccaccccggtgtcgcctgtggtctcacagtggaaggacatgataggcacagccttctccctagccatcgtgagctacgtcatcaacctggctatgggccggaccctggccaacaagcacggctacgacgtggattcgaaccaggagatgatcgctctcggctgcagcaacttctttggctccttctttaaaattcatgtcatttgctgtgcgctttctgtcactctggctgtggatggagctggaggaaaatcccaggtggccagcctgtgtgtgtctctggtggtgatgatcaccatgctggtcctggggatctatctgtatcctctccctaagtctgtgctaggagccctgatcgctgtcaatctcaagaactccctcaagcaactcaccgacccctactacctgtggaggaagagcaagctggactgttgcatctgggtagtgagcttcctctcctccttcttcctcagcctgccctatggtgtggcagtgggtgtcgccttctccgtcctggtcgtggtcttccagactcagtttcgaaatggctatgcactggcccaggtcatggacactgacatttatgtgaatcccaagacctataatagggcccaggatatccaggggattaaaatcatcacgtactgctcccctctctactttgccaactcagagatcttcaggcaaaaggtcatcgccaagacaggcatggacccccagaaagtattactagccaagcaaaaatacctcaagaagcaggagaagcggagaatgaggcccacacaacagaggaggtctctattcatgaaaaccaagactgtctccctgcaggagctgcagcaggactttgagaatgcgccccccaccgaccccaacaacaaccagaccccggctaacggcaccagcgtgtcctatatcaccttcagccctgacagctcctcacctgcccagagtgagccaccagcctccgctgaggcccccggcgagcccagtgacatgctggccagcgtcccacccttcgtcaccttccacaccctcatcctggacatgagtggagtcagcttcgtggacttgatgggcatcaaggccctggccaagctgagctccacctatgggaagatcggcgtgaaggtcttcttggtgaacatccatgcccaggtgtacaatgacattagccatggaggcgtctttgaggatgggagtctagaatgcaagcacgtctttcccagcatacatgacgcagtcctctttgcccaggcaaatgctagagacgtgaccccaggacacaacttccaaggggctccaggggatgctgagctctccttgtacgactcagaggaggacattcgcagctactgggacttagagcaggagatgttcgggagcatgtttcacgcagagaccctgaccgccctagagagcctctcagcagcaggggggtgctacccttacgggagtgagagtctggtgagcccactcttcacccgtcaggccctggccgcaatggacaagcctcctgctcactccaccccacccacatctgccctgtccttggcagctgaaggacaccttgacttccagcttttacgagtgagccaaaaacagaaggacaagtacaactgtgctggcctgctgtacaagcttcaaaaagtgtcccagagcccgcacggctcggtgtcagatggtgtcaggctgtcacggacatagggataaacttggttaggactctggcttgccttccccagctgcctcaactctgtctctggcagctctgcacccagggaccatgtgctctccacacccaggagtctaggccttggtaactatgcgccccccctccatcatccccaaggctgcccaaaccaccactgctgtcagcaagcacatcagactctagcctggacagtggccaggaccgtcgagaccaccagagctacctccccggggacagcccactaaggttctgcctcagcctcctgaaacatcactgccctcagaggctgctcccttcccctggaggctggctagaaaccccaaagagggggatgggtagctggcagaatcatctggcatcctagtaatagataccagttattctgcacaaaacttttgggaattcctctttgcacccagagactcagaggggaagagggtgctagtaccaacacagggaaaacggatgggacctgggcccagacagtcccccttgaccccagggcccatcagggaaatgcctccctttggtaaatctgccttatccttctttacctggcaaagagccaatcatgttaactcttccttatcagcctgtggcccagagacacaatggggtccttctgtaggcaaaggtggaagtcctccagggatccgctacatcccctaactgcatgcagatgtggaaaggggctgatccagattgggtcttcctgcacaggaagactctttaacacccttaggacctcaggccatcttctcctatgaagatgaaaataggggttaagttttccatatgtacaaggaggtattgagaggaaccctactgttgacttgaaaataaataggttccatgtgtaagtgttttgtaaaatttcagtggaaatgcacagaaaatcttctggcctctcatcactgcttttctcaagcttcttcagcttaacaaccccttccctaacaggttgggctggcccagcctaggaaaacatccccatttctaacttcagccagacctgcgttgtgtgtctgtgtgttgagtgagctggtcagctaacaagtcttcttagagttaaaggagggggtgctggccaagagccaacacattcttggcccaggagcattgcttttctgtgaattcattatgccatctggctgccaatggaactcaaaacttggaaggcgaaggacaatgttatctgggattcaccgtgcccagcacccgaagtgccaaattccaggaggacaagagccttagccaatgacaactcactctcccctactccacctccttccaagtccagctcaggcccaggaggtgggagaaggtcacagagcctcaggaatttccaagtcagagtcccctttgaaccaagtatctagatcccctgaggacttgatgaagtgatccttaacccccaagtaatcattaacccccagaccagcctcagaactgaaggagattgttgacccagtgacctggagttgaggctcagggagagatctgccacatgtctgagggttgcagagcccgctgtggaggtaagattggaaacacatgaggcagagggaagacattgaagaaaacatctctgctggaatatttggaaaagaacactcttctggacctggttgaagcaggaaagatggaggcaaagtagtgaaataatccagaatttcaatgcttttgaatgttcttagtgatactgacctgtgataatataattcccagggaggactgggaaccttatctcttgagatatttgcataatttatttaatttaagcctcattctccttttgttcattttggtaataaactggatttgaattgtgaacaaaaaaaaaaaaaaaaaaa

SEQ ID NO: 13687 - DNA, 15359 bp, Homo sapiens
tctacctcgcgggtgcctctggtgtctccagaggtctccgaccccagcccgcccccagccctcccgcccagcccgcagccccctccctctgttccccgacctcagaccctgggcttccgacctcgacatcatgggtgacgcagaaggcgaagacgaggtccagttcctgcggacggacgatgaggtggtcctgcagtgcagcgctaccgtgctcaaggagcagctcaagctctgcctggccgccgagggcttcggcaaccgcctgtgcttcctggagcccactagcaacgcgcagaatgtgccccccgatctggccatctgttgcttcgtcctggagcagtccctgtctgtgcgagccctgcaggagatgctggctaacacggtggaggctggcgtggagtcatcccagggcgggggacacaggacgctcctgtatggccatgccatcctgctccggcatgcacacagccgcatgtatctgagctgcctcaccacctcccgctccatgactgacaagctggccttcgatgtgggactgcaggaggacgcaacaggagaggcttgctggtggaccatgcacccagcctccaagcagaggtctgaaggagaaaaggtccgcgttggggatgacatcatccttgtcagtgtctcctccgagcgctacctgcacctgtcgaccgccagtggggagctccaggttgacgcttccttcatgcagacactgtggaacatgaaccccatctgctcccgctgcgaagagggcttcgtgacgggaggtcacgtcctccgcctctttcatggacatatggatgagtgtctgaccatttcccctgctgacagtgatgaccagcgcagacttgtctactatgaggggggagctgtgtgcactcatgcccgctccctctggaggctggagccactgagaatcagctggagtgggagccacctgcgctggggccagccactccgagtccggcatgtcactaccgggcagtacctagcgctcaccgaggaccagggcctggtggtggttgacgccagcaaggctcacaccaaggctacctccttctgcttccgcatctccaaggagaagctggatgtggcccccaagcgggatgtggagggcatgggcccccctgagatcaagtacggggagtcactgtgcttcgtgcagcatgtggcctcaggactgtggctcacctatgccgctccagaccccaaggccctgcggctcggcgtgctcaagaagaaggccatgctgcaccaggagggccacatggacgacgcactgtcgctgacccgctgccagcaggaggagtcccaggccgcccgcatgatccacagcaccaatggcctatacaaccagttcatcaagagcctggacagcttcagcgggaagccacggggctcggggccacccgctggcacggcgctgcccatcgagggcgttatcctgagcctgcaggacctcatcatctacttcgagcctccctccgaggacttgcagcacgaggagaagcagagcaagctgcgaagcctgcgcaaccgccagagcctcttccaggaggaggggatgctctccatggtcctgaattgcatagaccgcctaaatgtctacaccactgctgcccactttgctgagtttgcaggggaggaggcagccgagtcctggaaagagattgtgaatcttctctatgaactcctagcttctctaatccgtggcaatcgtagcaactgtgccctcttctccacaaacttggactggctggtcagcaagctggatcggctggaggcctcgtctggcatcctggaggtcctgtactgtgtcctcattgagagtccagaggttctgaacatcatccaggagaatcacatcaagtccatcatctccctcctggacaagcatgggaggaaccacaaggtcctggacgtgctatgctccctgtgtgtgtgtaatggtgtggctgtacgctccaaccaagatcttattactgagaacttgctgcctggccgtgagcttctgctgcagacaaacctcatcaactatgtcaccagcatccgccccaacatctttgtgggccgagcggaaggcaccacgcagtacagcaaatggtactttgaggtgatggtggacgaggtgactccatttctgacagctcaggccacccacttgcgggtgggctgggccctcaccgagggctacaccccctaccctggggccggcgagggctggggcggcaacggggtcggcgatgacctctattcctacggctttgatggactgcatctctggacaggacacgtggcacgcccagtgacttccccagggcagcacctcctggcccctgaagacgtgatcagctgctgcctggacctcagcgtgccgtccatctccttccgcatcaacggctgccctgtgcagggtgtctttgagtccttcaacctggacgggctcttcttccctgttgtcagcttctcggctggtgtcaaggtgcggttcctccttggtggccgccatggtgaattcaagttcctgcccccacctggctatgctccatgccatgaggctgtgctccctcgagagcgactccatcttgaacccatcaaggagtatcgacgggaggggccccgggggcctcacctggtgggccccagtcgctgcctctcacacaccgacttcgtgccctgccctgtggacactgtccagattgtcctgccgccccatctggagcgcattcgggagaagctggcggagaacatccacgagctctgggcgctaacccgcatcgagcagggctggacctacggcccggttcgggatgacaacaagaggctgcacccgtgtcttgtggacttccacagccttccagagcctgagaggaactacaacctgcagatgtctggggagacgctcaagactctgctggctctgggctgccacgtgggcatggcggatgagaaggcggaggacaacctgaagaagacaaaactccccaagacgtatatgatgagcaatgggtacaagccggctccgctggacctgagccacgtgcggctgacgccggcgcagacaacactggtggaccgtctggcagaaaatgggcacaacgtgtgggcccgagaccgcgtgggccagggctggagctacagcgcagtgcaggacatcccagcgcgccgaaaccctcggctggtgccctaccgcctgctggatgaagccaccaagcgcagcaaccgggacagcctctgccaggccgtgcgcaccctcctgggctacggctacaacatcgagcctcctgaccaggagcccagtcaggtggagaaccagtctcgttgtgaccgggtgcgcatcttccgggcagagaaatcctatacagtgcagagcggccgctggtacttcgagtttgaagcagtcaccacaggcgagatgcgcgtgggctgggcgaggcccgagctgaggcctgatgtagagctgggagctgacgagctggcctatgtcttcaatgggcaccgcggccagcgctggcacttgggcagtgaaccatttgggcgcccctggcagccgggcgatgtcgttggctgtatgatcgacctcacagagaacaccattatcttcaccctcaatggcgaggtcctcatgtctgactcaggctccgaaacagccttccgggagattgagattggggacggcttcctgcccgtctgcagcttgggacctggccaggtgggtcatctgaacctgggccaggacgtgagctctctgaggttctttgccatctgtggcctccaggaaggcttcgagccatttgccatcaacatgcagcgcccagtcaccacctggttcagcaaaggcctgccccagtttgagccagtgccccttgaacaccctcactatgaggtatcccgagtggacggcactgtggacacgcccccctgcctgcgcctgacccaccgcacctggggctcccagaacagcctggtggagatgcttttcctgcggctgagcctcccagtccagttccaccagcacttccgctgcactgcaggggccaccccgctggcacctcctggcctgcagccccccgccgaggacgaggcccgggcggcggaacccgaccctgactacgaaaacctgcgccgctcagctgggggctggagcgaggcagagaacggcaaagaagggactgcgaaggagggcgcccccgggggcaccccgcaggcggggggagaggcgcagcccgccagggcggagaatgagaaggatgccaccaccgagaagaacaagaagagaggcttcttattcaaggccaagaaggtcgccatgatgacccagccaccggccacccccacgctgccccgactccctcacgacgtggtgcctgcagacaaccgcgatgaccccgagatcatcctcaacaccaccacgtactattactccgtgagggtctttgctggacaggagcccagctgcgtgtgggcgggctgggtcacccctgactaccatcagcacgacatgagcttcgacctcagcaaggtccgggtcgtgacggtgaccatgggggatgaacaaggcaacgtccacagcagcctcaagtgtagcaactgctacatggtgtggggcggagactttgtgagtcccgggcagcagggccggatcagccacacggaccttgtcattgggtgcctggtggacttggccactggcttaatgacctttacagccaatggcaaagagagcaacacctttttccaggtggaacccaacactaagctatttcctgccgtcttcgtcctgcccacccaccagaacgtcatccagtttgagctggggaagcagaagaacatcatgccgttgtcagccgccatgttccaaagcgagcgcaagaacccggccccgcagtgcccaccgcggctggagatgcagatgctgatgccagtgtcctggagccgcatgcccaaccacttcctgcaggtggagacgaggcgtgccggcgagcggctgggctgggccgtgcagtgccaggagccgctgaccatgatggcgctgcacatccccgaggagaaccggtgcatggacatcctggagctgtcggagcgcctggacctgcagcgcttccactcgcacaccctgcgcctctaccgcgctgtgtgcgccctgggcaacaatcgcgtggcgcacgctctgtgcagccacgtagaccaagctcagctgctgcacgccctggaggacgcgcacctgccaggcccactgcgcgcaggctactatgacctcctcatcagcatccacctcgaaagtgcctgccgcagccgccgctccatgctctctgaatacatcgtgcccctcacgcctgagacccgcgccatcacgctcttccctcctggaaggagcacagaaaatggtcacccccggcatggcctgccgggagttggagtcaccacttcgctgaggcccccgcatcatttctcgcccccctgtttcgtggccgctctgccagctgctggggcagcagaggccccggcccgcctcagccctgccatcccgctggaggccctgcgggacaaggcactgaggatgctgggggaggcggtgcgcgacggtgggcagcacgctcgcgaccccgtcggggcctccgtggagttccagtttgtgcctgtgctcaagctcgtgtccaccctgctggtgatgggcatctttggcgatgaggatgtgaaacagatcttgaagatgattgagcctgaggtcttcactgaggaagaggaggaggaggacgaggaggaagagggtgaagaggaagatgaggaggagaaggaggaggatgaggaggaaacagcacaggaaaaggaagatgaggaaaaagaggaagaggaggcagcagaaggggagaaagaagaaggcttggaggaagggctgctccagatgaagttgccagagtctgtgaagttacagatgtgccacctgctggagtatttctgtgaccaagagctgcagcaccgtgtggagtccctggcagcctttgcggagcgctatgtggacaagctccaggccaaccagcggagccgctatggcctcctcataaaagccttcagcatgaccgcagcagagactgcaagacgtacccgtgagttccgctccccaccccaggaacagatcaatatgctattgcaattcaaagatggtacagatgaggaagactgtcctctccctgaagagattcgacaggatttgcttgactttcatcaagacctgctggcacactgtggaattcagctagatggagaggaggaggaaccagaggaagagaccaccctgggcagccgcctcatgagcctgttggagaaagtgcggctggtgaagaagaaggaagagaaacctgaggaggagcggtcagcagaggagagcaaaccccggtccctgcaggagctggtgtcccacatggtggtgcgctgggcccaagaggacttcgtgcagagccccgagctggtgcgggccatgttcagcctcctgcaccggcagtacgacgggctgggtgagctgctgcgtgccctgccgcgggcgtacaccatctcaccgtcctccgtggaagacaccatgagcctgctcgagtgcctcggccagatccgctcgctgctcatcgtgcagatgggcccccaggaggagaacctcatgatccagagcatcgggaacatcatgaacaacaaagtcttctaccaacacccgaacctgatgagggcgctgggcatgcacgagacggtcatggaggtcatggtcaacgtcctcgggggcggcgagtccaaggagatccgcttccccaagatggtgacaagctgctgccgcttcctctgctatttctgccgaatcagccggcagaaccagcgctccatgtttgaccacctgagctacctgctggagaacagtggcatcggcctgggcatgcagggctccacgcccctggacgtggctgctgcctccgtcattgacaacaatgagctggccttggcattgcaggagcaggacctggaaaaggttgtgtcctacctggcaggctgtggcctccagagctgccccatgcttgtggccaaagggtacccagacattggctggaacccctgtggtggagagcgctacctggacttcctgcgctttgctgtcttcgtcaacggcgagagcgtggaggagaacgccaatgtggtggtgcggctgctcatccggaagcctgagtgcttcggacccgccctgcggggtgagggtggctcagggctgctggctgccatcgaagaggccatccgcatctccgaggaccctgcgagggatggcccaggcatccgcagggaccggcggcgcgagcactttggtgaggaaccgcctgaagaaaaccgggtgcacctgggacacgccatcatgtccttctatgccgccttgatcgacctgctcggacgctgtgcaccagagatgcatctaatccaagccggcaagggtgaggccctgcggatccgcgccatcctccgctcccttgtgcccttggaggaccttgtgggcatcatcagcctcccactgcagattcccaccctgggcaaagatggggctctggtgcagccaaagatgtcagcatccttcgtgccggaccacaaggcgtccatggtgctcttcctggaccgtgtgtatggcatcgagaaccaggacttcttgctgcacgtgctggacgtggggttcctgcccgacatgagggcagccgcctcgctggacacggccactttcagcaccaccgagatggcgctggccgtgaaccgctacctgtgcctggccgtgctgccgctcatcaccaagtgtgcgccgctctttgcgggcacagaacaccgcgccatcatggtggactctatgctgcataccgtgtaccgcctgtctcggggtcgttcgctcaccaaggcgcagcgtgacgtcatcgaggactgcctcatgtcgctctgcaggtacatccgcccgtcgatgctgcagcacctgttgcgccgcctggtgttcgacgtgcccatcctcaacgagttcgccaagatgccactcaagctcctcaccaaccactatgagcgctgttggaagtactactgcctacccacgggctgggccaacttcggggtcacctcagaggaggagctgcacctcacacggaaactcttctggggcatctttgactctctggcccataagaaatacgacccggagctgtaccgcatggccatgccttgtctgtgcgccattgccggggctctgccccccgactatgtggatgcctcatactcatctaaggcagagaaaaaggccacagtggatgctgaaggcaactttgatccccggcctgtggagaccctcaatgtgatcatcccggagaagctggactccttcattaacaagtttgcggagtacacacacgagaagtgggccttcgacaagatccagaacaactggtcctatggagagaacatagacgaggagctgaagacccaccccatgctgaggccctacaagaccttttcagagaaggacaaagagatttaccgctggcccatcaaggagtccctgaaggccatgattgcctgggaatggacgatagagaaggccagggagggtgaggaggagaagacggaaaagaaaaaaacgcggaagatatcacaaagtgcccagacctatgatcctcgagaaggctacaaccctcagccccccgaccttagtgctgttaccctgtcccgggagctgcaggccatggcagaacaactggcagaaaattaccacaacacgtggggacggaagaagaagcaggagctggaagccaaaggcggtgggacccaccccctgctggtcccctacgacacgctcacggccaaggagaaggcacgagatcgagagaaggcccaggagctactgaaattcctgcagatgaatggctacgcggttacaagaggccttaaggacatggaactggactcgtcttccattgaaaagcggtttgcctttggcttcctgcagcagctgctgcgctggatggacatttctcaggagttcattgcccacctggaggctgtggtcagcagtgggcgagtggaaaagtccccacatgaacaggagattaaattctttgccaagatcctgctccctttgatcaaccagtacttcaccaaccactgcctctatttcttgtccactccggctaaagtgctgggcagcggtggccacgcctctaacaaggagaaggaaatgatcaccagcctcttctgcaaacttgctgctctcgtccgccaccgagtctctctctttgggacagacgccccagctgtggtcaactgtcttcacatcctggcccgctccctggatgccaggacagtgatgaagtcaggccctgagatcgtgaaggctggcctccgctccttcttcgagagtgcctcggaggacatcgagaagatggtggagaacctgcggctgggcaaggtgtcgcaggcgcgcacccaggtgaaaggcgtgggccagaacctcacctacaccactgtggcactgctgccggtcctcaccaccctcttccagcacatcgcccagcaccagttcggagatgacgtcatcctggacgacgtccaggtctcttgctaccgaacgctgtgcagtatctactccctgggaaccaccaagaacacttatgtggaaaagcttcggccagccctcggggagtgcctggcccgtctggcagcagccatgccggtggcgttcctggagccgcagctgaacgagtacaacgcctgctccgtgtacaccaccaagtctccgcgggagcgggccatcctggggctccccaacagtgtggaggagatgtgtcccgacatcccggtgctggagcggctcatggcagacattggggggctggccgagtcaggtgcccgctacacagagatgccgcatgtcatcgagatcacgctgcccatgctatgcagctacctgccccgatggtgggagcgcgggcccgaggcacccccttccgccctgcccgccggcgcccccccaccctgcacagctgtcacctctgaccacctcaactccctgctggggaatatcctgagaatcatcgtcaacaacctgggcattgacgaggcctcctggatgaagcggctggctgtgttcgcacagcccattgtgagccgtgcacggccggagctcctgcagtcccacttcatcccaactatcgggcggctgcgcaagagggcagggaaggtggtgtccgaggaggagcagctgcgcctggaggccaaggcggaggcccaggagggcgagctgctggtgcgggacgagttctctgtgctctgccgggacctctacgccctgtatccgctgctcatccgctacgtggacaacaacagggcgcagtggctgacggagccgaatcccagcgcggaggagctgttcaggatggtgggcgagatcttcatctactggtccaagtcccacaacttcaagcgcgaggagcagaactttgtggtccagaatgagatcaacaacatgtccttcctgactgctgacaacaaaagcaaaatggctaaggcgggagatatacagtccggtggctcggaccaggaacgcaccaagaagaagcgccggggggaccggtactctgtgcagacgtcactgatcgtggccacactgaagaagatgctgcccatcggcctgaatatgtgtgcgcccaccgaccaagacctcatcacgctggccaagacccgttacgccctgaaagacacagatgaggaggtccgggaatttctgcacaacaaccttcaccttcagggaaaggtcgaaggctccccgtctctgcgctggcagatggctctgtaccggggcgtcccgggtcgcgaggaggacgccgatgaccccgagaaaatcgtgcgcagagtccaggaagtgtcagccgtgctctactacctggaccagaccgagcacccttacaagtctaagaaggccgtgtggcacaagcttttgtccaaacagcgccggcgggcagtcgtggcctgtttccgtatgacgcccctgtacaacctgcccacgcaccgggcatgtaacatgttcctggagagctacaaggctgcatggatcctgactgaagaccacagttttgaggaccgcatgatagatgacctttcaaaagctggggagcaggaggaggaggaggaagaggtggaagagaagaagccagaccccctgcaccagttggtcctgcacttcagccgcactgccctgacggaaaagagcaaactggatgaggattacctgtacatggcctatgctgatatcatggcaaagagctgccacctggaggagggaggggagaacggtgaagctgaagaggaggttgaggtctcctttgaggagaaacagatggagaagcagaggctcttgtaccagcaagcacggctgcacacccggggggcggccgagatggtgctgcagatgatcagtgcctgcaaaggagagacaggtgccatggtgtcctccaccctgaagctgggcatctccatcctcaatggaggcaatgctgaggtccagcagaaaatgctggattatcttaaggacaagaaggaagttggcttcttccagagtatccaggcactgatgcaaacatgcagcgtcctggatctcaatgcctttgagagacaaaacaaggccgaggggctgggcatggtgaatgaggatggcactgtcatcaatcgccagaacggagagaaggtcatggcggatgatgaattcacacaagacctgttccgattcctacaattgctctgtgaggggcacaataatgatttccagaactacctacggacacagacagggaacacgaccactattaacatcatcatttgcactgtggactacctcctgcggctgcaggaatccatcagcgacttctactggtactactcgggcaaggatgtcattgaagagcagggcaagaggaacttctccaaagccatgtcggtggctaagcaggtgttcaacagcctcactgagtacatccagggtccctgcaccgggaaccagcagagcctggcgcacagtcgcctatgggacgcagtggtgggattcctgcacgtgttcgcccacatgatgatgaagctcgctcaggactcaagccagatcgagctgctgaaggagctgctggatctgcagaaggacatggtggtgatgttgctgtcgctactagaagggaacgtggtgaacggcatgatcgcccggcagatggtggacatgctcgtggaatcctcatccaatgtggagatgatcctcaagttcttcgacatgttcctgaaactcaaggacattgtgggctctgaagccttccaggactacgtaacggatccccgtggcctcatctccaagaaggacttccagaaggccatggacagccagaagcagttcagcggtccagaaatccagttcctgctttcgtgctccgaagcggatgagaacgaaatgatcaactgcgaagagttcgccaaccgcttccaggagccagcacgcgacatcggcttcaacgtggcggtgctgctgaccaacctgtcggagcatgtgccgcatgaccctcgcctgcacaacttcctggagctggccgagagcatccttgagtacttccgcccctacctgggccgcatcgagatcatgggcgcgtcacgccgcatcgagcgcatctacttcgagatctcagagaccaaccgcgcccagtgggagatgccccaggtgaaggagtccaagcgccagttcatcttcgacgtggtgaacgagggcggcgaggctgagaagatggagctcttcgtgagtttctgcgaggacaccatcttcgagatgcagatcgccgcgcagatctcggagcccgagggcgagccggagaccgacgaggacgagggcgcgggcgcggcggaggcgggcgcggaaggcgcggaggagggcgcggcggggctcgagggcacggcggccacggcggcggcgggggcgacggcgcgggttgtggcggccgcaggccgggccctgcgaggcctcagctaccgcagcctgcggcggcgcgtgcggcggctgcggcggcttacggcccgcgaggcggccaccgcagtggcggcgctgctctgggcagcagtgacgcgcgctggggccgctggcgcgggggcggcggcgggcgcgctgggcctgctctggggctcgctgttcggcggcggcctggtggagggcgccaagaaggtgacggtgaccgagctcctggcaggcatgcccgaccccaccagcgacgaggtgcacggcgagcagccggccgggccgggcggagacgcagacggcgagggtgccagcgagggcgctggagacgccgcggagggcgctggagacgaggaggaggcggtgcacgaggccgggccgggcggtgccgacggggcggtggccgtgaccgatgggggccccttccggcccgaaggggctggcggtctcggggacatgggggacacgacgcctgcggaaccgcccacacccgagggctctcccatcctcaagaggaaattgggggtggatggagtggaggaggagctcccgccagagccagagcccgagccggaaccagagctggagccggagaaagccgatgccgagaatggggagaaggaagaagttcccgagcccacaccagagccccccaagaagcaagcacctccctcaccccctccaaagaaggaggaagctggaggcgaattctggggagaactggaggtgcagagggtgaagttcctgaactacctgtcccggaacttttacaccctgcggttccttgccctcttcttggcatttgccatcaacttcatcttgctgttttataaggtctcagactctccaccaggggaggacgacatggaaggctcagctgctggggatgtgtcaggtgcaggctctggtggcagctctggctggggcttgggggccggagaggaggcagagggcgatgaggatgagaacatggtgtactacttcctggaggaaagcacaggctacatggaacccgccctgcggtgtctgagcctcctgcatacactggtggcctttctctgcatcattggctataattgtctcaaggtgcccctggtaatctttaagcgggagaaggagctggcccggaagctggagtttgatggcctgtacatcacggagcagcctgaggacgatgacgtgaaggggcagtgggaccgactggtgctcaacacgccgtctttccctagcaactactgggacaagtttgtcaagcgcaaggtcctggacaaacatggggacatctacgggcgggagcggattgctgagctactgggcatggacctggccacactagagatcacagcccacaatgagcgcaagcccaacccgccgccagggctgctgacctggctcatgtccatcgatgtcaagtaccagatctggaagttcggggtcatcttcacagacaactccttcctgtacctgggctggtatatggtgatgtccctcttgggacactacaacaacttcttctttgctgcccatctcctggacatcgccatgggggtcaagacgctgcgcaccatcctgtcctctgtcacccacaatgggaaacagctggtgatgaccgtgggccttctggcggtggtcgtctacctgtacaccgtggtggccttcaacttcttccgcaagttctacaacaagagcgaggatgaggatgaacctgacatgaagtgtgatgacatgatgacgtgttacctgtttcacatgtacgtgggtgtccgggctggcggaggcattggggacgagatcgaggaccccgcgggtgacgaatacgagctctacagggtggtcttcgacatcaccttcttcttcttcgtcatcgtcatcctgttggccatcatccagggtctgatcatcgacgcttttggtgagctccgagaccaacaagagcaagtgaaggaggatatggagaccaagtgcttcatctgtggaatcggcagtgactactttgatacgacaccgcatggcttcgagactcacacgctggaggagcacaacctggccaattacatgtttttcctgatgtatttgataaacaaggatgagacagaacacacgggtcaggagtcttatgtctggaagatgtaccaagagagatgttgggatttcttcccagctggtgattgtttccgtaagcagtatgaggaccagcttagctgacacacccccagctggccctccacccccacctcaagtgccttattctcacagcaagccccttagtccccaagcccctccccctaaggcagctgggggagaggtgacctagtac

SEQ ID NO: 13688 - DNA, 3381 bp, Homo sapiens
cgcaaagaaatggctcaaaagcttcagctctttctgtgccctgggagctgagatgcacgtcagtggccttgccagcgtggccaattctctgctgactgccagaaaaaagaggccaggaagaaagaggaaagagaagagatcgctcaggggtgagaccatgcccttcatcttttcttttccctaatctcctctgcttgtgtccacccacactctccccacctggcaaaattgttcaaaattgctgtggagtttacctcagtttcctctttcagtctgtggtgtgtggtccatcctcttgctgagcacattgaaaggaactggctatctttgatctcttcctccagatcagagtcaaggaatgtgtttataatggacacttcatccaaagaaaatatccagttgttctgcaaaacttcagtgcaacctgttggaaggccttcttttaaaacagaatatccctcctcagaagaaaagcaaccatgctgtggtgaactaaaggtgttcttgtgtgccttgtcttttgtttactttgccaaagcattggcagaaggctatctgaagagcaccatcactcagatagagagaaggtttgatatcccttcttcactggtgggagttattgatggtagttttgaaattgggaatctcttagttataacatttgttagctactttggagccaaacttcacaggccaaaaataattggagcagggtgtgtaatcatgggagttggaacactgctcattgcaatgcctcagttcttcatggagcagtacaaatatgagagatattctccttcctccaattccactctcagcatctctccgtgtctcctagagtcaagcagtcaattaccagtttcagttatggaaaaatcaaaatccaaaataagtaacgaatgtgaagtggacactagctcttccatgtggatttatgttttcctgggcaatcttcttcgtggaataggagaaactcccattcagcctttgggcattgcctacctggatgattttgccagtgaagacaatgcagctttctatattgggtgtgtgcagacggttgcaattataggaccaatctttggtttcctgttaggctcattatgtgccaaactatatgttgacattggctttgtaaacctagatcacataaccattaccccaaaagatccccagtgggtaggagcctggtggcttggctatctaatagcaggaatcataagtcttcttgcagctgtgcctttctggtatttaccaaagagtttaccaagatcccaaagtagagaggattctaattcttcctctgagaaatccaagtttattatagatgatcacacagactaccaaacaccccagggagaaaatgcaaaaataatggaaatggcaagagattttcttccatcactgaagaatctttttggaaacccagtatacttcctatatttatgtacaagcactgttcagttcaattctctgttcggcatggtgacgtacaaaccaaagtacattgagcagcagtatggacagtcatcctccagggccaactttgtgatcgggctcatcaacattccagcagtggcccttggaatattctctggggggatagttatgaaaaaattcagaatcagtgtgtgtggagctgcaaaactctacttgggatcatctgtctttggttacctcctatttctttccctgtttgcactgggctgtgaaaattctgatgtggcaggactaactgtctcctaccaaggaaccaaacctgtctcttatcatgaacgagctctcttttcagattgcaactcaagatgcaaatgttcagagacaaaatgggaacccatgtgcggtgaaaatggaatcacatatgtatcagcttgtcttgctggttgtcaaacctccaacaggagtggaaaaaatattatattttacaactgcacttgtgtgggaattgcagcttctaaatccggaaattcctcaggcatagtgggaagatgtcagaaagacaatggatgtccccaaatgtttctgtatttccttgtaatttcagtcatcacatcctatactttatccctaggtggcatacctggatacatattacttctgaggtgcattaagccacagcttaagtcttttgccttgggtatctacacattagcaataagagttcttgcaggaatcccagctccagtgtattttggagttttgattgatacttcatgcctcaaatggggatttaaaagatgtggaagtagaggatcatgcagattatatgattcaaatgtcttcagacatatatatttgggactaactgtgatactgggcacagtgtcaattctcctaagcattgcagtacttttcattttaaagaaaaattatgtttcaaaacacagaagttttataaccaagagagaaagaacaatggtgtctacaagattccaaaaggaaaattacactacaagtgatcatctgctacaacccaactactggccaggcaaggaaactcaactttagaaacatgatgactggaagtcatgtcttctaattggttgacattttgcaaacaaataaattgtaatcaaaagagctctaaatttgtaatttctttctcctttcaaaaaatgtctactttgttttggtcctaggcattaggtaatataactgataatatactgaaatatataatggaagatgcagatgataaaactaattttgaactttttaatttatataaattattttatatcatttacttatttcactttattttgctttgtgctcattgatatatattagctgtactcctagaagaacaattgtctctattgtcacacatggttatatttaaagtaatttctgaactgtgtaatgtgtctagagtaagcaaatactgctaacaattaactcataccttgggttccttcaagtattactcctatagtattttctcccatagctgtcttcatctgtgtattttaataatgatcttaggatggagcagaacatggagaggaagatttcattttaagctcctccttttccttgaaatacaataatttatatagaaatgtgtagcagcaaattatattggggattagaattttgaattaatagctctcctactattaatttacatgtgctttttgtgtggcgctataagtgactatggttgtaaagtaataaaattgatgttaacatgcccaattattgttcttttatgaattcaatgaatttaaaactattgttaaatataatactgccccactttaatatatgtaagcaacttcctacttatacacgacgtgttcctaaaacatgtttgaaaggtgaatttctgaaagtctcccataaatgtaggtgttacaacaggaaaaaaaaaaaaaaaaa

SEQ ID NO: 13689 - DNA, 942 bp, Homo sapiens
atggaggggaaaaatctgaccagcatctcagaatgtttcctcctggggttctctgagcagctggaggagcagaagcccctctttgggtccttcctgttcatgtacttggtcacggtggcaggcaacctcctcatcattctagtcatcattactgacactcaactccatacccccatgtacttctttctagccaacctctcccttgcagatgcctgctttgtgtccaccacagtccctaagatgctggcaaacatacagatccagagtcaggccatctcctactcagggtgtctactacagttgtattttttcatgttatttgtgatgctggaggcattcctcttggcggtcatggcctatgactgctacgtggccatatgccacccacttcattacattctgatcatgagccctgggctctgcatcttcctcgtgtctgcatcctggatcatgaatgccctccactcccttctacacacacttctgatgaacagcctgtccttctgcgcaaaccatgagatcccacacttcttctgtgacatcaatcccctcctgagtctgtcctgcacagaccccttcaccaatgagctggtgatcttcatcactgggggtctcacaggactcatttgtgtgctttgcctgattatctcttacacgaacgttttctcgaccatcctgaagatcccatcagctcaggggaagcggaaagccttttccacctgcagctctcatctctccgtggtctctctcttctttgggacttctttttgtgttgatttcagttctccctcaacccactcggcccagaaggacacagttgcatcagtgatgtacacagtggtaactccaatgttgaatccctttatctacagtttgaggaaccaagaaataaagtcttccctgagaaagttaatctgggttcggaaaattcattccccttag

SEQ ID NO: 13690 - DNA, 7913 bp, Homo sapiens
ccttagccccgtgggccccacggagtgagcggcatgcagcacccccgggcctgtccagtgtcctctggcctgctgccctgcacccccagaaggccctgacgccctggggcacttctgctctgcacaggaccacgcgggggtttgccatggtgacataaaggggcgcggaggaaggaaggagcgtgaccagcctgtggactgcgcccctggctgggaggaaggactgggggcccagatcctccactcccagtgccccacaagggcgtcgcttcctaagtctctgtgaatttgttggtcagtggacgattctcgtgtctcctcctgtgtggggccttggggtagccagggcaggccgggcctccggtggccaaggtctcggaggccaggatgcctgccctggcatgcctccggaggctgtgtcggcacgtgtccccgcaggctgtccttttcctgctgttcatcttctgcctgttcagcgttttcatctcggcctactacctatatggctggaagcgaggcctggagccctcggcggatgcccccgagcctgactgcggggacccgccgcctgtggcccccagtcgcctgctgccactcaagcctgtgcaggcagccaccccttcccgcacagacccgttggtgctggtctttgtggagagcctctactcgcaactgggccaggaggtggtggccatcctggagtccagccgcttcaaataccgcacagagattgcgccgggcaagggtgacatgcccacgctcactgacaagggccgtggccgcttcgccctcatcatctatgagaacatcctcaagtatgtcaacctggacgcctggaaccgggagctgctggacaagtactgtgtggcctacggcgtgggcatcattggcttcttcaaggccaatgagaacagcctgctgagtgcgcagctcaagggcttccccctgttcctgcactcaaacctgggcctgaaggactgcagcatcaaccccaagtccccgctgctctacgtgacgcgacctagcgaggtggagaaaggtgtgctccccggcgaggactggacggttttccagtcaaatcactccacctatgagccagtgctgctggccaagacgcgctcgtctgagtccatcccacacctgggcgcagacgccggcctgcatgctgcactgcacgccactgtggtccaggacctgggcctgcacgacggcatccagcgcgtgctgtttggcaacaacctgaacttctggctgcacaagcttgtcttcgtggatgccgtggccttcctcacggggaagcgcctctccctgccattggaccgctacatcctggtggacattgatgacatcttcgtgggcaaggagggcacacgcatgaaggtggaggacgtgaaggccctgtttgacacacagaacgaactacgcgcacacatcccaaacttcaccttcaacctgggctactcagggaaattcttccacacaggtaccaatgctgaggacgctggggatgatctgctgctgtcgtatgtgaaggagttctggtggttcccccacatgtggagccacatgcagccccaccttttccacaaccagtccgtgttggccgagcagatggccttgaacaagaagttcgctgtcgagcatggcattcccacagacatggggtatgcagtggcgccccaccactcgggcgtgtaccccgtgcacgtgcagctgtacgaggcttggaagcaggtgtggagcatccgcgtgaccagcacggaggagtacccccacctgaagccagcccgctaccgccgtggcttcatccacaatggcatcatggttctcccacggcagacctgcggcctcttcacacacaccatcttctacaacgagtaccctggcggctccagtgagctggacaagatcatcaacgggggcgagctcttcctcaccgtgctcctcaatcctatcagcatcttcatgacgcacctgtccaactatgggaatgaccgcctgggcctgtacaccttcaagcacctggtgcgcttcctgcactcctggacgaacctccggctgcagacactgccccctgtgcagttggcgcagaagtacttccagatcttctccgaggagaaggacccgctctggcaggacccctgcgaggacaaacgtcacaaagacatctggtccaaggagaagacgtgtgaccgcttcccaaagctcctcatcatcggcccccagaaaacaggcaccactgccctctacctgttcctgggcatgcaccctgacctaagcagcaactaccccagctctgagacctttgaggagatccagttttttaatggccacaactatcacaaaggcatcgactggtacatggagttcttccccatcccttccaacaccacctccgacttctactttgagaaaagcgccaactactttgattcagaagtggcgccccggcgggcagcagccctcttgcccaaagccaaggtcctgaccatcctcatcaaccccgcggaccgggcctattcctggtaccagcaccagcgagcccatgacgacccagtggccctaaagtacaccttccatgaggtgattaccgccggctctgacgcatcctcgaagctgcgtgccctccagaaccgctgcctggtccctggctggtacgccacccacatcgagcgctggctcagtgcctatcacgccaaccagattctggtcttggatggcaaactgcttcgcacagaacctgccaaagtgatggacatggtgcagaagttccttggggtgaccaacaccattgactaccacaaaaccttggcgtttgatccaaagaaaggattttggtgccaactgcttgaaggaggaaaaaccaagtgtctgggcaaaagcaagggccggaaatatcccgagatggacttggattcccgagccttcctgaaggactattaccgggaccacaacatcgagctctccaagctgctgtataagatgggccagacacttcccacttggctacgagaggacctccagaacaccaggtagccgtggccaccacagccagactgaacgtttgtgaaagctgggacatcccaccacacgctgagccagacctgcagagtgggaagctggaccagggcagctgcgcacttatgagcaatactctgtggaggtctggtggggctgggggagcacccaggcggatctgcaagcacctcggagcacccaccgctgggtctgcggcctaagggacctccctcgccagcagaggtccattccgttcccagctgctcctggggaggccgcttcctggtaggagggagtccacgagactcttttctgtccctcactgtgttccgccgactgtcccctctcgtcacccatcactccctgcttccgcagggcgcccctcagtattcgctgccatatgtccctgtcctccaggctgtaggggaggagagcctggccgggggagacagactggacatttccctgtttcgagccaggctcttccaaggggccagctgggtccccggagtcagtcctaggctggatgggagggtggccccctcaagaggactcccagcctccacatctggttcctaccttcacatctcaccctcccgttctggggaagaatttctggttcctacagtatccactccatcctcaaggcttcccgcagggccttggggcactgccttgccatcgggcccagttctccgggccccacctgcacccctttcttccccctgggatatgatgtgtggtgtttcctgtggtaaaagactgaggcaggccaggggtctgccagtaacatgttcccatgtacagacacggtccccacaccctcccagcctcaggcccaggcagacatgggcgagctggtgagactgccagccacggctttgcttagccacctgtggccgagggctctcagagacccccttaacctcccaaatactaagaagctaaaatattttaatattttgtttttttttttcttggtgccagagtttataccctgggtgctggggtcgcactgtgttatatatatatatatatatatataatgtgtatatatatatattctattttttttggttgggttcgtttttaattcagtcctacaaaatggtggtaagccccagtctcaggggtcaccctgtcttagagctagagatgaggtggcagggagggaggctgtgtcctcagtggcctggggctgagcagaccttaggaagggaccctccccagtgccgtggctgctctggggctaccccaggtgaacagaggtggtgagatgcgcagggaagaccagctctctccaggacatcgggctgcgtgaagtccagtgaccctgaggggattttggccaaaggaaacagccagggctgggctaggagagctagggtcaaaagctgccccacccactctccctcacatggtgctaggctgggagctgccctgagagctgggatgcccaccaaggcccacagaactgtctccaggcccttgtagacagtgggatctctgggctgatttctggttggggtctgctcctaccccaccccatttaacaatgtgaagtgactgaggctggggtgcctctccctggccccctccaactgccaaattctgcttccctctgaaccccaggaaatactttctggagaggcttgtcttgttcagaagactctagcatcttggggctggaaggtcctttgacgggtatgaaacaggtccagaaaggggaggtggcctgcttggccgacgtcatggagccagctgggagcagggctgagcgttgaacccgaggctcccggttccaagtcccatcgtgctcctcttccaatgccacactgcctctgagcccatccttggaccctactctgtgccaggttcctgtcccttcctccgtcacagcatggtcattccaggatatgggacaaaccactccttcccagccagggtgcctttgagccttctcattccgaggtctgcgtttgcatccctgtcgtgttctccctcgaggggtccttccccagcctgtgggggcctgggtctgttctgagctgattcccttttctccagttctctgctgggatgaagaaagttggacactcagtgggaccagctgcaggtggtttcactgtgtacacagcagtgtccccatcatgcctctcaatggggcctgcaagcctgggaacttgggcatcgttgggccagcaggatgagcagcaaagagtctgaggacagggtggcatgtctgcttgtgtgctcatgaagacatgcccacgccatggagccaggggcttacagagaggggcagtgacttccagagtcccatccgtcagtgaggggactgggctgcgggatgggtgaggatcttacagctcccaggttcggaaatctaccctctaggcctggaggcctctctcgcagagcatggaaggcaggagaggtgggctggcctagggcaggagctccacttctctctgcctctggctatgggaaggagcaggcggttggaaatcctgtgacaacagagatcttctggatttttgcctggacccttctgcaagcctggagactggacctgccacatgttccaagtctgtctgcctaggtcactgctgccacttctcctcccactaacagacctttcttgaagacccactaggtccagacactgccgggacttgcaggtatggggggtagaaggagaggcagataagctgcctggggggctgttagctaatgggtacaaggacaccccctcccgagaagagaagccacagatgagtgggccagcgaggccagtcttcaatgtccactaattcactctaagcatttggccaaaaaaaggagagagaaataactgaaattgttcaggtggctccatcgtctattctgtggtcccctccatgagcctttgccccagggtgggtgcaggtgcgagtgtcacctgcagctgcctcagtcattcagagttccagagccttctgtggtggagcatcctgctgcttggaggatgagtctgaagtttaaaaatgggccttttctgagcccccctgatgagcagtcagtgcttctgggcccagctaaggaagccatctgttcccagcagaggagagctgctgcgctgacctgcagaggttggtggtcccagcacagagctgtgcccatgggcttgttagtgggaaaagcaaatacaacaatgttttaccaaacatttaattatgaatgcccactccccagcatctagatctaaaattattaacattttgccacattctttttctctctctgtgtatgtatatgttttctctgtcctaatttaaaagtacattgcaaacatcatgaaacttgatccctgaaagcttcagcctgcatctcctaagagttagggcattgtcctacacgttggcccagtatcacagccaagacgagaagtcatttcccagcgatgtctgctatctaatctgtattcaaatccccccaattgtctcccaggtaacttatgtgtctggttttggaatcagcatccagtcacggtgcacacattgcattttctaactatgtttttaaaacctctttgaatgctgaaaggtcttccctcagctcactttgagtttttaaatgacattgtttttgaggccctaggcctgctgtctttttgaagccccacattctgaatttgtcagattgtttgctcatggtgtcgcataaccacttcttctatcccctgtactttcaaggataatttaggctacatgagattttgccttttgtgctgacttgacagcttcacttctgcctaagatgcgcctccactgtcacctgtaccaagtgccaaaacagcagaggggccagttagagcaagagctctgggggggccggaaagtctccctggagaaggccgtaatatctgggccttggaaggaaggacacagggctctggaaggaggaggctgcatgcctgaaggctgggccttcgaccctggggatgggccacagggcaccaaacacatcatatgtctctctctttctattttggggtcccagggttttcatttcctggagacccgtggtctgtgtgcactggagcagagccaggctctcagttgcagcagggaaaagcctacatggggaactgcctcccgcaagctgtggtgtgagaagagccctggctggcagcaggagctgtgaagtttcatcccagccgggtgcatttagtagctgcctgaccatcttcctcccaggccctcagtttcttcatctgtagaatgagcagataggggccacagcagggattttcacacatcaaaggaggcagcctctgctctagttgatgtgaggatgagggggcggcctagaccccctgctgcccaggccgttgaggcaacactgggttcctggcttgacagctgtgggctggctgcccttgccagctcagacggctggcgagttttcagcttccctaagggactggcatagggttttgtggggtcaatgccaggaacctgggggaaactggatgcgttttatcctaagaagttcatccctcctgctcttactgtttccggccctggaggagaatgagggaggagagggttttctatgactgtgttagcttttattattagcaagagggctccttttgtaatttgtgcatgaaattcatgtcatttcctgggagaggagagggccgactggagagggtggggggcacactggggaagcaggcagaggtttccttcccttgtaggggggtggggggagtggggagagggggggctatccagttcgcctgatgagggctctcgaaccagccgttttgggttgtgttaaaggtgagaccttcctccattaatgtacaatctcgaactaactgctaataaagtggggttctgtttgta

SEQ ID NO: 13691 - DNA, 5644 bp, Homo sapiens
aggagagagggagaagagagcgcgagagagggtgagtgtgtgtgagtgcatgggagggtgctgaatattccgagacactgggaccacagcggcagctccgctgaaaactgcattcagccagtcctccggacttctggagcggggacagggcgcagggcatcagcagccaccagcaggacctgggaaatagggattcttctgcctccacttcaggttttagcagcttggtgctaaattgctgtctcaaaatgcagaggatctaatttgcagaggaaaacagccaaagaaggaagaggaggaaaaggaaaaaaaaaggggtatattgtggatgctctacttttcttggaaatgcaaaagattatgcatatttctgtcctcctttctcctgttttatggggactgatttttggtgtctcttctaacagcatacagataggggggctatttcctaggggcgccgatcaagaatacagtgcatttcgagtagggatggttcagttttccacttcggagttcagactgacaccccacatcgacaatttggaggtggcaaacagcttcgcagtcactaatgctttctgctcccagttttcgagaggagtctatgctatttttggattttatgacaagaagtctgtaaataccatcacatcattttgcggaacactccacgtctccttcatcactcccagcttcccaacagatggcacacatccatttgtcattcagatgagacccgacctcaaaggagctctccttagcttgattgaatactatcaatgggacaagtttgcatacctctatgacagtgacagaggcttatcaacactgcaagctgtgctggattctgctgctgaaaagaaatggcaagtgactgctatcaatgtgggaaacattaacaatgacaagaaagatgagatgtaccgatcactttttcaagatctggagttaaaaaaggaacggcgtgtaattctggactgtgaaagggataaagtaaacgacattgtagaccaggttattaccattggaaaacatgttaaagggtaccactacatcattgcaaatctgggatttactgatggagacctattaaaaatccagtttggaggtgcaaatgtctctggatttcagatagtggactatgatgattcgttggtatctaaatttatagaaagatggtcaacactggaagaaaaagaataccctggagctcacacaacaacaattaagtatacttctgctctgacctatgatgccgttcaagtgatgactgaagccttccgcaacctaaggaagcaaagaattgaaatctcccgaagggggaatgcaggagactgtctggcaaacccagcagtgccctggggacaaggtgtagaaatagaaagggccctcaaacaggttcaggttgaaggtctctcaggaaatataaagtttgaccagaatggaaaaagaataaactatacaattaacatcatggagctcaaaactaatgggccccggaagattggctactggagtgaagtggacaaaatggttgttacccttactgagctcccttctggaaatgacacctctgggcttgagaataagactgttgttgtcaccacaattttggaatctccgtatgttatgatgaagaaaaatcatgaaatgcttgaaggcaatgagcgctatgagggctactgtgttgacctggctgcagaaatcgccaaacattgtgggttcaagtacaagttgacaattgttggtgatggcaagtatggggccagggatgcagacacgaaaatttggaatgggatggttggagaacttgtatatgggaaagctgatattgcaattgctccattaactattacccttgtgagagaagaggtgattgacttctcaaagcccttcatgagcctcgggatatctatcatgatcaagaagcctcagaagtccaaaccaggagtgttttcctttcttgatcctttagcctatgagatctggatgtgcattgtttttgcctacattggggtcagtgtagttttattcctggtcagcagatttagcccctacgagtggcacactgaggagtttgaagatggaagagaaacacaaagtagtgaatcaactaatgaatttgggatttttaatagtctctggttttccttgggtgcctttatgcggcaaggatgcgatatttcgccaagatccctctctgggcgcattgttggaggtgtgtggtggttctttaccctgatcataatctcctcctacacggctaacttagctgccttcctgactgtagagaggatggtgtctcccatcgaaagtgctgaggatctttctaagcaaacagaaattgcttatggaacattagactctggctccactaaagagtttttcaggagatctaaaattgcagtgtttgataaaatgtggacctacatgcggagtgcggagccctctgtgtttgtgaggactacggccgaaggggtggctagagtgcggaagtccaaagggaaatatgcctacttgttggagtccacgatgaacgagtacattgagcaaaggaagccttgcgacaccatgaaagttggtggaaacctggattccaaaggctatggcatcgcaacacctaaaggatcctcattaagaaccccagtaaatcttgcagtattgaaactcagtgagcaaggcgtcttagacaagctgaaaaacaaatggtggtacgataaaggtgaatgtggagccaaggactctggaagtaaggaaaagaccagtgccctcagtctgagcaacgttgctggagtattctacatccttgtcgggggccttggtttggcaatgctggtggctttgattgagttctgttacaagtcaagggccgaggcgaaacgaatgaaggtggcaaagaatgcacagaatattaacccatcttcctcgcagaattcacagaattttgcaacttataaggaaggttacaacgtatatggcatcgaaagtgttaaaatttaggggatgaccttgaatgatgccatgaggaacaaggcaaggctgtcaattacaggaagtactggagaaaatggacgtgttatgactccagaatttcccaaagcagtgcatgctgtcccttacgtgagtcctggcatgggaatgaatgtcagtgtgactgatctctcgtgattgataagaaccttttgagtgccttacacaatggttttcttgtgtgtttattgtcaaagtggtgagaggcatccagtatcttgaagacttttctttcagccaagaattcttaaatatgtggagttcatcttgaattgtaaggaatgattaattaaaacacaacatctttttctactcgagttacagacaaagcgtggtggacatgcacagctaacatggaagtactataatttacctgaagtctttgtacagacaacaaacctgtttctgcagccactattgttagtctcttgattcataatgacttaagcacacttgacatcaactgcatcaagatgtgacatgttttataaaaaaaggaaaaaaaacatttaaaactaaaaaatatttttaggtattttcacaaacaaactggcttttaaataaatttgcttccatattggttgaataagacaaaaacaattaaactgagtgggaagtgaataaaaaaaggctttaggtatcgattccatatttttcaaagccaaatatgtaaatgctaaggaaagtaaacaaagaggagattccaatcttgtaatttaatattgttattaaaactttaatgtatcctattctttaacatttggtgttaatataaaattacttggcaatgcttgacatttgaaataaacatttttctattgttttattgcaagtggtccaattaattttgcttagctacagtttggtcataaatcaagtgagtttaaagacactaccaagttgttaggtgcccagagaaaatttctcccttttaaaaaggccaggtgatttttcaaatgtaatcttgcccccaaagtaatatctgaatatctttttgacatgtctaaatatatatatatataaagaaatatttgttaacacaaaagcatttgatctatgtagataaatgctaatagatttaaaaagctaatattaacaaataccagaatacgtgaagttccatttttaaagtgtttgagcttacagaagagaaacattcattttaaatgaagtaaaaaatgccttgaaagtaattctttagatagttgcccattgattaaattccaaaaactaaatatgtttttagctttaaaattataaaagctgtcataaactttatatattatgaattttaaaatatgtttgagtctcctgcaatatagtttcatcccattgacatcaattaaaaataaccctaatatattatttttatatttattcctcaggtggaatggctattttaatatgcccagtgtggataaaatgtcacatttctgtaacttttgactaaagagcctatatttatctagttaatgaatttaaaggatctatctttcccttcataaaatacctcttatttccattaaagccccccaagtttaattaatttaggattttgaatgattattgacatccaatagttatttttaatatttgtattcttgttatttctggaagaaagcctttgtgtagcacttggtattttgcaaagtgcttttaaaacattcttacttaccgtatttcatagaagggaaggaaaaatgtaaggtttaacagtaagcacttgcattgaacatggaggcatgtggtatcatgatattcttcactaaatttagctgtccctaatcacagatcctaaggtaatataatataattttagtgcatttctcctcatcaggaatgctggaggtgcattttaagttttaataataagtgctagaatgaccaaattgcagactaattgtttccatattgtacttaaaatgagtttttaaaagtgaaaaagaaatgactatatacaatcaatgctatttattgtacctctgggcctactcttctaaaaattgtagcttatcgatttttctctgtcaagcttgaactaatgtaaataattgaaataatgtaaagttatattttcatgtttttatagatacaacatgacaagaatacataatgtaagagtatttcaactatggataatgttgattggataatgcacatctcagttacaagcagtactcatagtttaatatccatgtaacggtgcatcaatatattgctatataaatatgtctgtgtgcatataagtgaaaagtggtcaaacaagagtgatgacagctgtctaaaggtttttttattcattttatataaaaactgttatggaaagaccaaaatgtttatgaactattcttatgtaaatttacaattgtcctttactgtacttttttgtttacagtatagtaccttattttctgctgtgttaagtgggtgtcaaactccaagaagacatacactttctataacttctattgaagatattggaatttccaatttttcatgtgtactatgtcagaaaatgctttcgattttatttttaaatctaacatcggatggcttttccggagtgttgtaaaaacttcaatcatacataaaacatgttcttacaaaaggcaaa

SEQ ID NO: 13692 - DNA, 3824 bp, Homo sapiens
gcggcgcggagggaggtgagcggcgcgcgcggagccggcgggcgaggaggaggactgcacagaggccccgcccccgccgccgcgagccggctcttcgccgcctccgaacccgctcactttgcctctcgcctctggacggcggcggggcggccgccggattcgcggccgcagggagcgccggagacggggagctattccgccccggcggctccattcggcgcccgcagccctcagggggtcggccccgcggcttgggagagggcaccgcggcctcggtgtgcgcagccctcgggcgcgagggtcggcggcgcggacacagccgcgttcccagccggtggggctcagcgctggcgccggcgaggactccccggccacccgcaggtaccgccgggcggagggcgcgctactagcagcgccggagatactcgagcccagggacccccgggccagcggagggcaggagcggagccccgagggagcgcgggccccgacggcgcgctcccccgtcagccacgggcaggcaggccccgcgtggcggcttggggtggggggctgcagcggggccctcgggccgaaagtcccccgggcggccagccatgaccttcgggcgcagcggggcggcctcggtggtgctgaacgtgggcggcgcccggtattcgctgtcccgggagctgctgaaggacttcccgctgcgccgcgtgagccggctgcacggctgccgctccgagcgcgacgtgctcgaggtgtgcgacgactacgaccgcgagcgcaacgagtacttcttcgaccggcactcggaggccttcggcttcatcctgctctacgtgcgcggccacggcaagctgcgcttcgcgccgcggatgtgcgagctctccttctacaacgagatgatctactggggcctggagggcgcgcacctcgagtactgctgccagcgccgcctcgacgaccgcatgtccgacacctacaccttctactcggccgacgagccgggcgtgctgggccgcgacgaggcgcgccccggcggggccgaggcggctccctccaggcgctggctggagcgcatgcggcggaccttcgaggagcccacgtcgtcgctggccgcgcagatcctggctagcgtgtcggtggtgttcgtgatcgtgtccatggtggtgctgtgcgccagcacgttgcccgactggcgcaacgcagccgccgacaaccgcagcctggatgaccggagcaggtactccgccggccctgggagggagccctccgggataattgaagctatctgcataggttggttcactgccgagtgcatcgtgaggttcattgtctccaaaaacaagtgtgagtttgtcaagagacccctgaacatcattgatttactggcaatcacgccgtattacatctctgtgttgatgacagtgtttacaggcgagaactctcaactccagagggctggagtcaccttgagggtacttagaatgatgaggattttttgggtgattaagcttgcccgtcacttcattggtcttcagacactcggtttgactctcaaacgttgctaccgagagatggttatgttacttgtcttcatttgtgttgccatggcaatctttagtgcactttctcagcttcttgaacatgggctggacctggaaacatccaacaaggactttaccagcattcctgctgcctgctggtgggtgattatctctatgactacagttggctatggagatatgtatcctatcacagtgcctggaagaattcttggaggagtttgtgttgtcagtggaattgttctattggcattacctatcacttttatctaccatagctttgtgcagtgttatcatgagctcaagtttagatctgctaggtatagtaggagcctctccactgaattcctgaattaatgcattgcaaatcaattcttgcatacacttcatagaaagactttgatgctgcttcatatttatgtgtttcttgctgggtgagcactgcagtggcattgtcatcatcttggtagggtaaaaattatccttcccagccgaagggataaaacagtttacttgttatggagtaaatagaattgagactgcaaaggaagaataatgactcctagagtaaactttaggacccggttttatttagacttgttttcccgtttccttgaatgattacacatttttaaaaaatacattatttgaacattttaaaacagaaaggtactattttccaaatgtttttccatcttatgaattcagaagaagcttggaacttatagtgttttttgtttgagagtaacattttcatttctaaatgttttataatttctcatatcaatgtcagaagtatcctggaaacatatgtcacatgcgggaactgtttaacaaatactttaaaaatttggccaaaatttaaactgtataatggagctagatacaagcaagaatagtatttgaaagacttttccagcatacttctcaattctttgctttatttttgtgccaattattcaccttatcgtgccgcttcatggaagcttgagtatgttctcccttttccattttggatttatctctttactgtaatgactcaaaaggtatttaagaattgacgagagcttgtgttgtttagcatcttactggataatatttgaattcattgctgttcctaggtgataactgtcctaatatttagatgtccaaacaagaatacttccaacataaaaattataataggaataatttgagatgactcaatattacaacctcttcttctcttaacctcctcccccaaacactagaggtttaataagacttatcagatgaaaggatatttatatagccttttagtagcaaagtcatacttacgtgttgtcactggattatcataaaagggagaaattaaatattactgtactcttagttgctgtgtagctaagtcaattttaagccagtaaaagcgatggatacataatgatttgatctgatctttaactattgtgaatcacagctacaccaaaactcttcttgtaagaatactgactaatatgccatgttaatctggctagattattaggactagataatgtaaaagtgatgattgtttagtaactaaattttagcaacagaaattagaattttgctttttcaaccagttaccataaagaagttagtgtatatataaacacaaataattagtgacagattcataaaaaattgaatgttgtacacagtaattttgtcagaggtagagaagacagggattgggaagtggtgggtgatggaggacctggatatatttatcaaataaagggttaccagaagtgttcattaaaggaattttagccatcatctagttcaaacctcaactattacaggtagaaaatcagggcaggagagaatataattgtgaaggagtcagggctaacacctggatctccagaaacctagcccagcaggttaatcttcacacatctctgggttctgagaaaagcctggaaaaatcacacttctttgtcattgtcatgctgaggtaataatagcaaaactgttttctttcccttaatttcctttcctaagcttatgtaatagtttggccattaaatatcttgccctattttccctattactgctagtatgctacttcttacatacccaaaagaaattcagttatttattgtatatttattgtattctaatataattgaaataaatggcatggatttattttttcttaactatttggattaaagctttgtggttcatgcaaacaatgtgcagatgatagcacctccatattactaataaaaatatgataaccatcaa

SEQ ID NO: 13693 - DNA, 3791 bp, Homo sapiens
gcggcgcggagggaggtgagcggcgcgcgcggagccggcgggcgaggaggaggactgcacagaggccccgcccccgccgccgcgagccggctcttcgccgcctccgaacccgctcactttgcctctcgcctctggacggcggcggggcggccgccggattcgcggccgcagggagcgccggagacggggagctattccgccccggcggctccattcggcgcccgcagccctcagggggtcggccccgcggcttgggagagggcaccgcggcctcggtgtgcgcagccctcgggcgcgagggtcggcggcgcggacacagccgcgttcccagccggtggggctcagcgctggcgccggcgaggactccccggccacccgcaggtaccgccgggcggagggcgcgctactagcagcgccggagatactcgagcccagggacccccgggccagcggagggcaggagcggagccccgagggagcgcgggccccgacggcgcgctcccccgtcagccacgggcaggcaggccccgcgtggcggcttggggtggggggctgcagcggggccctcgggccgaaagtcccccgggcggccagccatgaccttcgggcgcagcggggcggcctcggtggtgctgaacgtgggcggcgcccggtattcgctgtcccgggagctgctgaaggacttcccgctgcgccgcgtgagccggctgcacggctgccgctccgagcgcgacgtgctcgaggtgtgcgacgactacgaccgcgagcgcaacgagtacttcttcgaccggcactcggaggccttcggcttcatcctgctctacgtgcgcggccacggcaagctgcgcttcgcgccgcggatgtgcgagctctccttctacaacgagatgatctactggggcctggagggcgcgcacctcgagtactgctgccagcgccgcctcgacgaccgcatgtccgacacctacaccttctactcggccgacgagccgggcgtgctgggccgcgacgaggcgcgccccggcggggccgaggcggctccctccaggcgctggctggagcgcatgcggcggaccttcgaggagcccacgtcgtcgctggccgcgcagatcctggctagcgtgtcggtggtgttcgtgatcgtgtccatggtggtgctgtgcgccagcacgttgcccgactggcgcaacgcagccgccgacaaccgcagcctggatgaccggagcaggataattgaagctatctgcataggttggttcactgccgagtgcatcgtgaggttcattgtctccaaaaacaagtgtgagtttgtcaagagacccctgaacatcattgatttactggcaatcacgccgtattacatctctgtgttgatgacagtgtttacaggcgagaactctcaactccagagggctggagtcaccttgagggtacttagaatgatgaggattttttgggtgattaagcttgcccgtcacttcattggtcttcagacactcggtttgactctcaaacgttgctaccgagagatggttatgttacttgtcttcatttgtgttgccatggcaatctttagtgcactttctcagcttcttgaacatgggctggacctggaaacatccaacaaggactttaccagcattcctgctgcctgctggtgggtgattatctctatgactacagttggctatggagatatgtatcctatcacagtgcctggaagaattcttggaggagtttgtgttgtcagtggaattgttctattggcattacctatcacttttatctaccatagctttgtgcagtgttatcatgagctcaagtttagatctgctaggtatagtaggagcctctccactgaattcctgaattaatgcattgcaaatcaattcttgcatacacttcatagaaagactttgatgctgcttcatatttatgtgtttcttgctgggtgagcactgcagtggcattgtcatcatcttggtagggtaaaaattatccttcccagccgaagggataaaacagtttacttgttatggagtaaatagaattgagactgcaaaggaagaataatgactcctagagtaaactttaggacccggttttatttagacttgttttcccgtttccttgaatgattacacatttttaaaaaatacattatttgaacattttaaaacagaaaggtactattttccaaatgtttttccatcttatgaattcagaagaagcttggaacttatagtgttttttgtttgagagtaacattttcatttctaaatgttttataatttctcatatcaatgtcagaagtatcctggaaacatatgtcacatgcgggaactgtttaacaaatactttaaaaatttggccaaaatttaaactgtataatggagctagatacaagcaagaatagtatttgaaagacttttccagcatacttctcaattctttgctttatttttgtgccaattattcaccttatcgtgccgcttcatggaagcttgagtatgttctcccttttccattttggatttatctctttactgtaatgactcaaaaggtatttaagaattgacgagagcttgtgttgtttagcatcttactggataatatttgaattcattgctgttcctaggtgataactgtcctaatatttagatgtccaaacaagaatacttccaacataaaaattataataggaataatttgagatgactcaatattacaacctcttcttctcttaacctcctcccccaaacactagaggtttaataagacttatcagatgaaaggatatttatatagccttttagtagcaaagtcatacttacgtgttgtcactggattatcataaaagggagaaattaaatattactgtactcttagttgctgtgtagctaagtcaattttaagccagtaaaagcgatggatacataatgatttgatctgatctttaactattgtgaatcacagctacaccaaaactcttcttgtaagaatactgactaatatgccatgttaatctggctagattattaggactagataatgtaaaagtgatgattgtttagtaactaaattttagcaacagaaattagaattttgctttttcaaccagttaccataaagaagttagtgtatatataaacacaaataattagtgacagattcataaaaaattgaatgttgtacacagtaattttgtcagaggtagagaagacagggattgggaagtggtgggtgatggaggacctggatatatttatcaaataaagggttaccagaagtgttcattaaaggaattttagccatcatctagttcaaacctcaactattacaggtagaaaatcagggcaggagagaatataattgtgaaggagtcagggctaacacctggatctccagaaacctagcccagcaggttaatcttcacacatctctgggttctgagaaaagcctggaaaaatcacacttctttgtcattgtcatgctgaggtaataatagcaaaactgttttctttcccttaatttcctttcctaagcttatgtaatagtttggccattaaatatcttgccctattttccctattactgctagtatgctacttcttacatacccaaaagaaattcagttatttattgtatatttattgtattctaatataattgaaataaatggcatggatttattttttcttaactatttggattaaagctttgtggttcatgcaaacaatgtgcagatgatagcacctccatattactaataaaaatatgataaccatcaa

SEQ ID NO: 13694 - DNA, 3942 bp, Homo sapiens
gggtgattcagcgcccggcgaggcggaagcggccgcaagaggaggaggggagagcccgtccgcgcctgggctcccggggtggcacgagcccgcggccggagtgcgaggcggaggcgaggaggccgcggggacgggaggcgaggccggccgggcccccgaagccatggagaacgcgcacaccaagacggtggaggaggtgctgggccacttcggcgtcaacgagagtacggggctgagcctggaacaggtcaagaagcttaaggagagatggggctccaacgagttaccggctgaagaaggaaaaaccttgctggaacttgtgattgagcagtttgaagacttgctagttaggattttattactggcagcatgtatatcttttgttttggcttggtttgaagaaggtgaagaaacaattacagcctttgtagaaccttttgtaattttactcatattagtagccaatgcaattgtgggtgtatggcaggaaagaaatgctgaaaatgccatcgaagcccttaaggaatatgagcctgaaatgggcaaagtgtatcgacaggacagaaagagtgtgcagcggattaaagctaaagacatagttcctggtgatattgtagaaattgctgttggtgacaaagttcctgctgatataaggttaacttccatcaaatctaccacactaagagttgaccagtcaattctcacaggtgaatctgtctctgtcatcaagcacactgatcccgtccctgacccacgagctgtcaaccaagataaaaagaacatgctgttttctggtacaaacattgctgctgggaaagctatgggagtggtggtagcaactggagttaacaccgaaattggcaagatccgggatgaaatggtggcaacagaacaggagagaacaccccttcagcaaaaactagatgaatttggggaacagctttccaaagtcatctcccttatttgcattgcagtctggatcataaatattgggcacttcaatgacccggttcatggagggtcctggatcagaggtgctatttactactttaaaattgcagtggccctggctgtagcagccattcctgaaggtctgcctgcagtcatcaccacctgcctggctcttggaactcgcagaatggcaaagaaaaatgccattgttcgaagcctcccgtctgtggaaacccttggttgtacttctgttatctgctcagacaagactggtacacttacaacaaaccagatgtcagtctgcaggatgttcattctggacagagtggaaggtgatacttgttcccttaatgagtttaccataactggatcaacttatgcacctattggagaagtgcataaagatgataaaccagtgaattgtcaccagtatgatggtctggtagaattagcaacaatttgtgctctttgtaatgactctgctttggattacaatgaggcaaagggtgtgtatgaaaaagttggagaagctacagagactgctctcacttgcctagtagagaagatgaatgtatttgataccgaattgaagggtctttctaaaatagaacgtgcaaatgcctgcaactcagtcattaaacagctgatgaaaaaggaattcactctagagttttcacgtgacagaaagtcaatgtcggtttactgtacaccaaataaaccaagcaggacatcaatgagcaagatgtttgtgaagggtgctcctgaaggtgtcattgacaggtgcacccacattcgagttggaagtactaaggttcctatgacctctggagtcaaacagaagatcatgtctgtcattcgagagtggggtagtggcagcgacacactgcgatgcctggccctggccactcatgacaacccactgagaagagaagaaatgcaccttgaggactctgccaactttattaaatatgagaccaatctgaccttcgttggctgcgtgggcatgctggatcctccgagaatcgaggtggcctcctccgtgaagctgtgccggcaagcaggcatccgggtcatcatgatcactggggacaacaagggcactgctgtggccatctgtcgccgcatcggcatcttcgggcaggatgaggacgtgacgtcaaaagctttcacaggccgggagtttgatgaactcaacccctccgcccagcgagacgcctgcctgaacgcccgctgttttgctcgagttgaaccctcccacaagtctaaaatcgtagaatttcttcagtcttttgatgagattacagctatgactggcgatggcgtgaacgatgctcctgctctgaagaaagccgagattggcattgctatgggctctggcactgcggtggctaaaaccgcctctgagatggtcctggcggatgacaacttctccaccattgtggctgccgttgaggaggggcgggcaatctacaacaacatgaaacagttcatccgctacctcatctcgtccaacgtcggggaagttgtctgtattttcctgacagcagcccttggatttcccgaggctttgattcctgttcagctgctctgggtcaatctggtgacagatggcctgcctgccactgcactggggttcaaccctcctgatctggacatcatgaataaacctccccggaacccaaaggaaccattgatcagcgggtggctctttttccgttacttggctattggctgttacgtcggcgctgctaccgtgggtgctgctgcatggtggttcattgctgctgacggtggtccaagagtgtccttctaccagctgagtcatttcctacagtgtaaagaggacaacccggactttgaaggcgtggattgtgcaatctttgaatccccatacccgatgacaatggcgctctctgttctagtaactatagaaatgtgtaacgccctcaacagcttgtccgaaaaccagtccttgctgaggatgcccccctgggagaacatctggctcgtgggctccatctgcctgtccatgtcactccacttcctgatcctctatgtcgaacccttgccactcatcttccagatcacaccgctgaacgtgacccagtggctgatggtgctgaaaatctccttgcccgtgattctcatggatgagacgctcaagtttgtggcccgcaactacctggaacctgcaatactggagtaaccgcttcctaaaccattttgcagaaatgtaagggtgttcggttgcgtgcatgtgcgtttttagcaacacatctaccaaccctgtgcatgactgatgttggggaaaaagaaaagtaaaaaacttcccaactcactttgtgttatgtggaggaaatgtgtattaccaatggggttgttagcttttaaatcaaaatactgattacagatgtacaatttagcttaatcagaaagcctctccagagaagtttggtttctttgctgcaagaggaatgaggctctgtaaccttatctaagaacttggaagccgtcagccaagtcgccacatttctctgcaaaatgtcatagcttatataaatgtacagtattcaattgtaatgcatgccttcggttgtaagtagccagatccctctccagtgacattggaacatgctactttttaattggccctgtacagtttgcttatttataaattcattaaaaacactacaggtgttgaatggttaaaatgtaggcctccagttcattttcagttattttctgagtgtgcagacagctatttcgcactgtattaaatgtaacttatttaatgaaatcagaagcagtagacagatgttggtgcaatacaaatattgtgatgcatttatcttaataaaatgctaaatgtcaatttatcactgcgcatgtttgactttagactgtaaatagagatcagtttgtttctttctgtgctggtaacaatgagcgtcgcacagacatggtttcaggtaaataaatctattctatgat

SEQ ID NO: 13695 - DNA, 3570 bp, Homo sapiens
ggccggctgctcaagtgggacgggggtcagagctttgtggagggaagaaaaacctggagggggcaggagagtaaaaagaagaaacccaggcagacaggcagttggacacactgaggaagaccccccacgagtgggaaccccctggaaggaacacaccggccccggcccccaggaagggagcacaatggaggccgctcatgctaaaaccacggaggaatgtttggcctattttggggtgagtgagaccacgggcctcaccccggaccaagttaagcggaatctggagaaatacggcctcaatgagctccctgctgaggaagggaagaccctgtgggagctggtgatagagcagtttgaagacctcctggtgcggattctcctcctggccgcatgcatttccttcgtgctggcctggtttgaggaaggtgaagagaccatcactgcctttgttgaaccctttgtcatcctcttgatcctcattgccaatgccatcgtgggggtttggcaggagcggaacgcagagaacgccatcgaggccctgaaggagtatgagccagagatggggaaggtctaccgggctgaccgcaagtcagtgcaaaggatcaaggctcgggacatcgtccctggggacatcgtggaggtggctgtgggggacaaagtccctgcagacatccgaatcctcgccatcaaatccaccacgctgcgggttgaccagtccatcctgacaggcgagtctgtatctgtcatcaaacacacggagcccgttcctgacccccgagctgtcaaccaggacaagaagaacatgcttttctcgggcaccaacattgcagccggcaaggccttgggcatcgtggccaccaccggtgtgggcaccgagattgggaagatccgagaccaaatggctgccacagaacaggacaagacccccttgcagcagaagctggatgagtttggggagcagctctccaaggtcatctccctcatctgtgtggctgtctggcttatcaacattggccacttcaacgaccccgtccatgggggctcctggttccgcggggccatctactactttaagattgccgtggccttggctgtggctgccatccccgaaggtcttcctgcagtcatcaccacctgcctggccctgggtacccgtcggatggcaaagaagaatgccattgtaagaagcttgccctccgtagagaccctgggctgcacctctgtcatctgttccgacaagacaggcaccctcaccaccaaccagatgtctgtctgcaagatgtttatcattgacaaggtggatggggacatctgcctcctgaatgagttctccatcaccggctccacttacgctccagagggagaggtcttgaagaatgataagccagtccggccagggcagtatgacgggctggtggagctggccaccatctgtgccctctgcaatgactcctccttggacttcaacgaggccaaaggtgtctatgagaaggtcggcgaggccaccgagacagcactcaccaccctggtggagaagatgaatgtgttcaacacggatgtgagaagcctctcgaaggtggagagagccaacgcctgcaactcggtgatccgccagctaatgaagaaggaattcaccctggagttctcccgagacagaaagtccatgtctgtctattgctccccagccaaatcttcccgggctgctgtgggcaacaagatgtttgtcaagggtgcccctgagggcgtcatcgaccgctgtaactatgtgcgagttggcaccacccgggtgccactgacggggccggtgaaggaaaagatcatggcggtgatcaaggagtggggcactggccgggacaccctgcgctgcttggccctggccacccgggacacccccccgaagcgagaggaaatggtcctggatgactctgccaggttcctggagtatgagacggacctgacattcgtgggtgtagtgggcatgctggaccctccgcgcaaggaggtcacgggctccatccagctgtgccgtgacgccgggatccgggtgatcatgatcactggggacaacaagggcacagccattgccatctgccggcgaattggcatctttggggagaacgaggaggtggccgatcgcgcctacacgggccgagagttcgacgacctgcccctggctgaacagcgggaagcctgccgacgtgcctgctgcttcgcccgtgtggagccctcgcacaagtccaagattgtggagtacctgcagtcctacgatgagatcacagccatgacaggtgatggcgtcaatgacgcccctgccctgaagaaggctgagattggcattgccatgggatctggcactgccgtggccaagactgcctctgagatggtgctggctgacgacaacttctccaccatcgtagctgctgtggaggagggccgcgccatctacaacaacatgaagcagttcatccgctacctcatttcctccaacgtgggcgaggtggtctgtatcttcctgaccgctgccctggggctgcctgaggccctgatcccggtgcagctgctatgggtgaacttggtgaccgacgggctcccagccacagccctgggcttcaacccaccagacctggacatcatggaccgccccccccggagccccaaggagcccctcatcagtggctggctcttcttccgctacatggcaatcgggggctatgtgggtgcagccaccgtgggagcagctgcctggtggttcctgtacgctgaggatgggcctcatgtcaactacagccagctgactcacttcatgcagtgcaccgaggacaacacccactttgagggcatagactgtgaggtcttcgaggcccccgagcccatgaccatggccctgtccgtgctggtgaccatcgagatgtgcaatgcactgaacagcctgtccgagaaccagtccctgctgcggatgccaccctgggtgaacatctggctgctgggctccatctgcctctccatgtccctgcacttcctcatcctctatgttgaccccctgccgatgatcttcaagctccgggccctggacctcacccagtggctcatggtcctcaagatctcactgccagtcattgggctcgacgaaatcctcaagttcgttgctcggaactacctagagggataactgttccccctcctccatctctgagcccgtgtcacagatccagaagatgaaagaaggaagtgagcatccttttgctctgtcctccccaccccgatagtgacacatcttcaggcagagctgtggcacagacccccgtcctgtcccccacacccgtgtcatgtgtctgtttataaacatgtccccttccctttccttccccctcggccacccgcctccctctcaaccttgtaaattccccttcccaaccccgaggggcttgcagggacaaggcgaccgactgcgctgagctgcttatttattgaaaataaacgacggaaaagtctggccttgcctctgtgcaagcttggaggcctgggtcgccgctgtgaaaaaaaaaaaaaaaaaaaaaaaaaaaaaaaaaa

SEQ ID NO: 13696 - DNA, 4205 bp, Homo sapiens
gggtgattcagcgcccggcgaggcggaagcggccgcaagaggaggaggggagagcccgtccgcgcctgggctcccggggtggcacgagcccgcggccggagtgcgaggcggaggcgaggaggccgcggggacgggaggcgaggccggccgggcccccgaagccatggagaacgcgcacaccaagacggtggaggaggtgctgggccacttcggcgtcaacgagagtacggggctgagcctggaacaggtcaagaagcttaaggagagatggggctccaacgagttaccggctgaagaaggaaaaaccttgctggaacttgtgattgagcagtttgaagacttgctagttaggattttattactggcagcatgtatatcttttgttttggcttggtttgaagaaggtgaagaaacaattacagcctttgtagaaccttttgtaattttactcatattagtagccaatgcaattgtgggtgtatggcaggaaagaaatgctgaaaatgccatcgaagcccttaaggaatatgagcctgaaatgggcaaagtgtatcgacaggacagaaagagtgtgcagcggattaaagctaaagacatagttcctggtgatattgtagaaattgctgttggtgacaaagttcctgctgatataaggttaacttccatcaaatctaccacactaagagttgaccagtcaattctcacaggtgaatctgtctctgtcatcaagcacactgatcccgtccctgacccacgagctgtcaaccaagataaaaagaacatgctgttttctggtacaaacattgctgctgggaaagctatgggagtggtggtagcaactggagttaacaccgaaattggcaagatccgggatgaaatggtggcaacagaacaggagagaacaccccttcagcaaaaactagatgaatttggggaacagctttccaaagtcatctcccttatttgcattgcagtctggatcataaatattgggcacttcaatgacccggttcatggagggtcctggatcagaggtgctatttactactttaaaattgcagtggccctggctgtagcagccattcctgaaggtctgcctgcagtcatcaccacctgcctggctcttggaactcgcagaatggcaaagaaaaatgccattgttcgaagcctcccgtctgtggaaacccttggttgtacttctgttatctgctcagacaagactggtacacttacaacaaaccagatgtcagtctgcaggatgttcattctggacagagtggaaggtgatacttgttcccttaatgagtttaccataactggatcaacttatgcacctattggagaagtgcataaagatgataaaccagtgaattgtcaccagtatgatggtctggtagaattagcaacaatttgtgctctttgtaatgactctgctttggattacaatgaggcaaagggtgtgtatgaaaaagttggagaagctacagagactgctctcacttgcctagtagagaagatgaatgtatttgataccgaattgaagggtctttctaaaatagaacgtgcaaatgcctgcaactcagtcattaaacagctgatgaaaaaggaattcactctagagttttcacgtgacagaaagtcaatgtcggtttactgtacaccaaataaaccaagcaggacatcaatgagcaagatgtttgtgaagggtgctcctgaaggtgtcattgacaggtgcacccacattcgagttggaagtactaaggttcctatgacctctggagtcaaacagaagatcatgtctgtcattcgagagtggggtagtggcagcgacacactgcgatgcctggccctggccactcatgacaacccactgagaagagaagaaatgcaccttgaggactctgccaactttattaaatatgagaccaatctgaccttcgttggctgcgtgggcatgctggatcctccgagaatcgaggtggcctcctccgtgaagctgtgccggcaagcaggcatccgggtcatcatgatcactggggacaacaagggcactgctgtggccatctgtcgccgcatcggcatcttcgggcaggatgaggacgtgacgtcaaaagctttcacaggccgggagtttgatgaactcaacccctccgcccagcgagacgcctgcctgaacgcccgctgttttgctcgagttgaaccctcccacaagtctaaaatcgtagaatttcttcagtcttttgatgagattacagctatgactggcgatggcgtgaacgatgctcctgctctgaagaaagccgagattggcattgctatgggctctggcactgcggtggctaaaaccgcctctgagatggtcctggcggatgacaacttctccaccattgtggctgccgttgaggaggggcgggcaatctacaacaacatgaaacagttcatccgctacctcatctcgtccaacgtcggggaagttgtctgtattttcctgacagcagcccttggatttcccgaggctttgattcctgttcagctgctctgggtcaatctggtgacagatggcctgcctgccactgcactggggttcaaccctcctgatctggacatcatgaataaacctccccggaacccaaaggaaccattgatcagcgggtggctctttttccgttacttggctattggctgttacgtcggcgctgctaccgtgggtgctgctgcatggtggttcattgctgctgacggtggtccaagagtgtccttctaccagctgagtcatttcctacagtgtaaagaggacaacccggactttgaaggcgtggattgtgcaatctttgaatccccatacccgatgacaatggcgctctctgttctagtaactatagaaatgtgtaacgccctcaacagcttgtccgaaaaccagtccttgctgaggatgcccccctgggagaacatctggctcgtgggctccatctgcctgtccatgtcactccacttcctgatcctctatgtcgaacccttgccactcatcttccagatcacaccgctgaacgtgacccagtggctgatggtgctgaaaatctccttgcccgtgattctcatggatgagacgctcaagtttgtggcccgcaactacctggaacctggtaaagagtgtgtgcagcctgccaccaaatcctgctcgttctcggcatgcaccgatgggatttcctggccgtttgtgctgctcataatgcccctggtgatctgggtctatagcacagacactaactttagcgatatgttctggtcttgactgacagttttccataaagaagatgtttaacttaatcaattaatttttttattgtttaaagcaactgtctatttctgctgaattttcacatgaacatactggctggtgatggaggtttcatactctagattttgttttgctttttctgactccagtggggcaagattttccttttttatacacataattaaagtgtccattgacatgtacagagaactaacactattttatgcaaatatttttttgtagatgaaaaagcatgtacagtgttctgtttaatactcatccttgtataaaaaaaatagttgagccagcagacattgtcagcaaattaattggcagcagattttaggaaatgaatgtgtgtggttttttttctaaaactaaatagcatgtattgtgtcttttgcatgatgatccggatttaatttgatatcacagtctaatttttattcataagccaatttttctgcactgagcagagtcttgctacctcagtcagtattgttttggtttgctacttccctcacccactttggcctccgttcaccccaccccaccccacctctccccaccttacccccgccccgcttggcttcttctttaggattgtgatggttcgttctgtttacatcagttttaacgagaggtatgcctgtactcgcttgtgcagaaaacattgttccagattcaatcgactgggtttatgtcccttcacatagtttttaaggttatttatttaaatgtctaatgtattttattgtaacagacattgttttgccaacattgcctatttcagtggcacgtcatctagttttaaaaaaataaaacattttaaatggacagagaaaaaaaaaaaaaaaaaaaaaaaaaaaaaaaaaaaaaaaaaaaaaaaaaaaaaaaaaaaaaaaaa

SEQ ID NO: 13697 - DNA, 3528 bp, Homo sapiens
ggccggctgctcaagtgggacgggggtcagagctttgtggagggaagaaaaacctggagggggcaggagagtaaaaagaagaaacccaggcagacaggcagttggacacactgaggaagaccccccacgagtgggaaccccctggaaggaacacaccggccccggcccccaggaagggagcacaatggaggccgctcatgctaaaaccacggaggaatgtttggcctattttggggtgagtgagaccacgggcctcaccccggaccaagttaagcggaatctggagaaatacggcctcaatgagctccctgctgaggaagggaagaccctgtgggagctggtgatagagcagtttgaagacctcctggtgcggattctcctcctggccgcatgcatttccttcgtgctggcctggtttgaggaaggtgaagagaccatcactgcctttgttgaaccctttgtcatcctcttgatcctcattgccaatgccatcgtgggggtttggcaggagcggaacgcagagaacgccatcgaggccctgaaggagtatgagccagagatggggaaggtctaccgggctgaccgcaagtcagtgcaaaggatcaaggctcgggacatcgtccctggggacatcgtggaggtggctgtgggggacaaagtccctgcagacatccgaatcctcgccatcaaatccaccacgctgcgggttgaccagtccatcctgacaggcgagtctgtatctgtcatcaaacacacggagcccgttcctgacccccgagctgtcaaccaggacaagaagaacatgcttttctcgggcaccaacattgcagccggcaaggccttgggcatcgtggccaccaccggtgtgggcaccgagattgggaagatccgagaccaaatggctgccacagaacaggacaagacccccttgcagcagaagctggatgagtttggggagcagctctccaaggtcatctccctcatctgtgtggctgtctggcttatcaacattggccacttcaacgaccccgtccatgggggctcctggttccgcggggccatctactactttaagattgccgtggccttggctgtggctgccatccccgaaggtcttcctgcagtcatcaccacctgcctggccctgggtacccgtcggatggcaaagaagaatgccattgtaagaagcttgccctccgtagagaccctgggctgcacctctgtcatctgttccgacaagacaggcaccctcaccaccaaccagatgtctgtctgcaagatgtttatcattgacaaggtggatggggacatctgcctcctgaatgagttctccatcaccggctccacttacgctccagagggagaggtcttgaagaatgataagccagtccggccagggcagtatgacgggctggtggagctggccaccatctgtgccctctgcaatgactcctccttggacttcaacgaggccaaaggtgtctatgagaaggtcggcgaggccaccgagacagcactcaccaccctggtggagaagatgaatgtgttcaacacggatgtgagaagcctctcgaaggtggagagagccaacgcctgcaactcggtgatccgccagctaatgaagaaggaattcaccctggagttctcccgagacagaaagtccatgtctgtctattgctccccagccaaatcttcccgggctgctgtgggcaacaagatgtttgtcaagggtgcccctgagggcgtcatcgaccgctgtaactatgtgcgagttggcaccacccgggtgccactgacggggccggtgaaggaaaagatcatggcggtgatcaaggagtggggcactggccgggacaccctgcgctgcttggccctggccacccgggacacccccccgaagcgagaggaaatggtcctggatgactctgccaggttcctggagtatgagacggacctgacattcgtgggtgtagtgggcatgctggaccctccgcgcaaggaggtcacgggctccatccagctgtgccgtgacgccgggatccgggtgatcatgatcactggggacaacaagggcacagccattgccatctgccggcgaattggcatctttggggagaacgaggaggtggccgatcgcgcctacacgggccgagagttcgacgacctgcccctggctgaacagcgggaagcctgccgacgtgcctgctgcttcgcccgtgtggagccctcgcacaagtccaagattgtggagtacctgcagtcctacgatgagatcacagccatgacaggtgatggcgtcaatgacgcccctgccctgaagaaggctgagattggcattgccatgggatctggcactgccgtggccaagactgcctctgagatggtgctggctgacgacaacttctccaccatcgtagctgctgtggaggagggccgcgccatctacaacaacatgaagcagttcatccgctacctcatttcctccaacgtgggcgaggtggtctgtatcttcctgaccgctgccctggggctgcctgaggccctgatcccggtgcagctgctatgggtgaacttggtgaccgacgggctcccagccacagccctgggcttcaacccaccagacctggacatcatggaccgccccccccggagccccaaggagcccctcatcagtggctggctcttcttccgctacatggcaatcgggggctatgtgggtgcagccaccgtgggagcagctgcctggtggttcctgtacgctgaggatgggcctcatgtcaactacagccagctgactcacttcatgcagtgcaccgaggacaacacccactttgagggcatagactgtgaggtcttcgaggcccccgagcccatgaccatggccctgtccgtgctggtgaccatcgagatgtgcaatgcactgaacagcctgtccgagaaccagtccctgctgcggatgccaccctgggtgaacatctggctgctgggctccatctgcctctccatgtccctgcacttcctcatcctctatgttgaccccctgccgatgatcttcaagctccgggccctggacctcacccagtggctcatggtcctcaagatctcactgccagtcattgggctcgacgaaatcctcaagttcgttgctcggaactacctagaggatccagaagatgaaagaaggaagtgagcatccttttgctctgtcctccccaccccgatagtgacacatcttcaggcagagctgtggcacagacccccgtcctgtcccccacacccgtgtcatgtgtctgtttataaacatgtccccttccctttccttccccctcggccacccgcctccctctcaaccttgtaaattccccttcccaaccccgaggggcttgcagggacaaggcgaccgactgcgctgagctgcttatttattgaaaataaacgacggaaaagtctggccttgcctctgtgcaagcttggaggcctgggtcgccgctgtgaaaaaaaaaaaaaaaaaaaaaaaaaaaaaaaaaa

SEQ ID NO: 13698 - DNA, 8052 bp, Homo sapiens
agagaggacttatctccagcatctagcactacagagcagaggctgtgtggagaatggctgaaaaatcagaattggttgtagaagcagttttctttctggttgtgagtatgagcccggcagacaccatgagcgctgttgcaggggagtcggcctgtgcttgacacatgtgtttcccattgatagctggagacagcccagtagctgtgagtcggtctgacaaagccatattgaagtacggagtacggtttcaaagcagtcagaaaaagaacgggaatgctgttcaggaaattcttcaggcatgggcagggacttggctgcagttctgcagttggaaaatctgactggggcagcttctgagcgcaggctgggcctgcacacactcagcgggccgagtggccacctccttcagagctgctcagcacgccctgggatcgcgggcggttttcatcggccggtttgtgaaacggacaagagagagacattactgccgggagtgttgagtgaagggaccaggtggagatgatgcctcaggagcagtacactcaccaccggagcaccatgcctggctctgtggggccacaggtatacaaggtggggatttatggctggcggaaacgatgcctgtatttctttgtcctgctcctcatgattttaatactggtgaacttggccatgaccatctggattctcaaagtcatgaacttcacaattgatggaatgggaaacctgaggatcacagaaaaaggtctaaagctagaaggagactctgaattcttacaacctctctacgccaaagaaatccagtcccgaccaggtaatgccctgtacttcaagtctgccagaaatgttacagtgaacattctcaatgaccagactaaagtgctaactcagcttataacaggtccaaaagccgtagaagcttatggtaaaaaatttgaggtaaaaactgtttctggaaaattgctcttctctgcagacaataatgaagtggtagtaggagctgaaagattacgagttttaggagcggagggcacagtgttccctaaatctatagaaacacctaatgtcagggcagaccccttcaaagaactaaggttggagtccccaacccggtctctagtgatggaggccccaaaaggagtggaaatcaatgcagaagctggcaatatggaagccacctgcaggacagagctgagactggaatccaaagatggagagattaagttagatgctgcgaaaatcaggctacctagactgcctcatggatcctacacgcctacaggaacgaggcagaaggtcttcgagatctgcgtctgcgccaatgggagattattcctgtctcaggcaggagctgggtccacttgtcagataaacacaagtgtctgcctctgaaagactatccatagtggacattgttggcagcataaaggccttttttggctttagacactggctgccagctatttttactagaacacagaaagcctatcaaagaccttgtgtgtatgtgtacgtgtgtgtgcgtgcttgagtgtgttcgcgtgtgtgggtggatataaatatatataaatatatataaataaatatatatatcctctgtataaaatgaggtttcagtacaaaaggaaccatgggtgaccctgcgatatccactgtcattttccatcccatccccaccacctgagtgacagaaatctaaacacacatccgtcccaacattccccagaccattcagaatcacacagcgtattaaacactgacagaatcttcatctagatattcgagtagcagcatatcttctcttttagtgtcattacgagggagtgatggcgggaatctcagtcgcactcaagctctgagacctttgtatcaaaaataggcatttgatttcctgttttagctttagtaaggctggctaacttccccctcttcaagctaggaactggcaatgctgtagaagtcagccgtaggaattcaaaatggctggcctaccttggctaccagacatattggggtttttgtagttgaatgaatgaggaggatgaatttcagcaaattttgaactgctcacccaacttctgctatcttgctccctccaaactcacagattctcctacagtcaaattaggagctgtaaatcagcacaaaataagataacagctgttcctcagtgagctggaagctacttaatggcctgatgggcaatgaacaaacgggtgatatgtctctgtttaagggaaaaatggcttaaaagctgttctgttctcacttctgactttaaccaaaagatttcaacccacaatgatcaggtcaatcaaaatccctaagagcagaactcctaccccaaaagaagcctggaagtctaattaagagtagcataaggaacctaattatgtttaccatgtttcttgggattggtgggaaatgtcaaaacatgccctttatttttaaaggcattcacaaactctctgactttgttcttcttatatattttttcagtgccgggatattcatattcctaaagccactattgtgttttctctaagaagcactacatgccaccagaattgtgcactgaaagataatacaaactgagtgtctttatgagaatcactgtgtcccctgaggcccagcagtacctgcttccctgtatgtggaagcagcacctcattcccgccatcagctacctctcatcaccccaccttcatcatcatgctccagggtcaccctggccagctcttgtgctgggacaggggattacaccatctctgttcaaagagggggaaatgtgcctatgccttaagtcaatgcactcagcaaggagaagcacatcttatttatcttgttacctatagtttactttgggtgattggaggggaatgacttagttatgactggacatcttaaaagctgatagacaagccaaatggctggcagatgatgtggatttcaaagagcccagaatgaactcatcactggcttagacagtcctggatgccatttggaaagtagtggccctgcaagcctaaatgaagtagtatttgtaggcctgggtggcatttggatttttcttttccctcaacaaggttttactttttcttactttacaagcaagggaagttttgtgataggagagaaataaaagatttgatattttttgagatgacactcaagcatcaggctgagatttgcacacatgggatgtaaaagcaagctgtgtgttgcttagtcacttacttagaagtagatggtgggggacagcggcgtgggtcctagcctggccagtgatgctgctggcgtccagaccccagactcactccaagcactcttgttcaatatctcatgcagaagagttgggctggtcactcttaggggtgagaccccgtgattggttggtttgtagcactaaggtctaaaaaggaaaaccataaaagacatcagattacgctggatcagtataattaatattccatagggccatgttgccagaatctgtatgtatcaatacagggtttttccaagccaggaaacgccctccttggctactaggagcacctatcccatatcattcagataaacaatgatagctacaaagtcatttgtggctagataggttaagacaggtgattttttaaagtagactgtctttgcattttgccatctgaagttcattaatctttagatgacaaaaaagcaaaaagttcccagaacgtttttgcttagattttgttctaatcaccacgtgaaggaatgagattagcaccacaagtttcatgccaataaaagagactggtgtgatcccacatgcaaaatttaatcctaagggtagtgagatcacaaacagaataaaaataagagcaatcaaccatataaatcaagtacctattgggaacagacataacattcaatttttcatttatgctaagtgaccacagtatacaaagtaataagcaggaaatttgatatgggttaaattatgcattttgttcagattttggaaattggtatgcattataagtttctcaatgtacatctttttatcccaacaccctcaaactagaatatttgtcagtggtcaagagaaaaaattttacctgaattcttgggggccggcggggagcttttacattaaaaatctactaacgcctactttttaaaaaatgagattctttctaatctttatatatgacattttctagacaatcgcacctttgggtatattaaacagctggtatcataacaaagaatccaaatgaaccttcaatatactagaagttctagtaggttaatattgttcagaagatttttacaaattaaaaactgatttccaaatatgttcaacatttacttctatttgatatctgctcaagaagtcatagaagtcttgggaaactattcgagtatcacagaggttttcaaaagcccttatggtgacatctacctaggtaaaagcctgacatgtggctttataattgttatgttacccaagggataaacttgaactggctttgaacatcctttaggtcattttctctttggataattttcatcgcatatccggcaactatagaccaaagtttgcttaaggtttgaccctagagcagaggtgggcaaactatgacctggaaaccaaatctgacttaccaccttttcctgtagttaaagttttattgtcacatagccacatacattcatttacatgttttctgattttacactacagcagcaggatggagtagttgtgtcagagactatgtatcccacaaagcatagattacttactatttagtcctttacaggcaaagtttcctcacccctgacctagaggtttttgtggtatgcattggatatagcaggaaagaaagcacatttccaaacagcagggagtaagcttacatttctgtgtaggtttgggaatatagttacttggcaaagtctttcaggaaggaagcccttccttatgttacatgtggaaagcctgccttccaagacatgtggaagtaattgatccacctgccagagaaacacaggctcagaggatgcctgggaacagggaggatgggattagtggaagcttaatggaaaaggaaagttatgatcctccaagacccttaattgatagaccataccaggttctgcaggtcagcatcattgtgtaatgagagtgaagtaggggaccctgtggttcaaccttagaatctgtttcctgtaggctctttctgctgtctatattcattaaagttttccacttcaccctcccatagtctagagggatgcccattccatggtcctccagagaatagttttgacttaacatgtctgtttagcccacatcacgtcagttatcaacaccgccactgtgcttactgttcctacagccacaccaggcttgaagagttagtgagaccaacaaataattggaagtattggaaaaagcaaaatacatggggacaaaaaaaatacagtgaaattctttttatcaaactgatgctgtgagaaaccagatgaatgccagtttggctttatttctaagaatctgggtcttcattctctggtgtagaaggaatgcaaaaaactataacaacaacaacaaaaacatattttgaaaagacatattctgacatctctgcttgtgtgtggtaaggcaggttcctatcagacatttatccctttggtcaagatcccttttgctcatccagggtttcatactcaatatcgcttaaaaaaaaaaaagtatcagctagggatgactctggaagtatgagtatcatggtggggaggaaggaattttttttaaatgtaaatgacccccatttaccagaccctaatcaaagtcacttaagggaatccctcagccttttatttggaaacagttgaaataaactggcagcagctagatcagagtatcttgctttattttataaaggccaaaggtagtatgaagtttggaccaaaaaggtaaatagatccattccagcacctgatactgatttttcaaggctctatgaaaggtcaaaaatttcattaaacaagaccagttctccctcttccccctgtcccaagaaatcttaggcatgaaaaggataaggaaacagctcctggaatgatacatttgcatagtgccctagtagcaggttgggaaaaagttataatataagaaacaaccttcgaaaacaggccttttatctcaaagataaaatgtctttcttgtggtctttcatcactatctccgtggtggaaggttcccctagttccaacatatttccattaaaatagtcaaagccacggcattgggatgtcagatgcctctctttctttgtggtaatcggaatttaaaattatacagttgcctctgaatttctcatgcacaaagccaaaccactgataagagataaagcagtctgaagcctgctgcttcagccagcacagcacaccacacacgctcgcactttcaaaagcaatgtgatttctatggttcttaaaagctttcttcataagggagtccctgaaatttctcaaggcaggtttgaatggcaaagggaaaataattacttgtgggaggtcctccttttgagtattgttagagcatacatgtaaaagaaaataacctttttggggcaactcatgctcacacatgctgttttctttggttctccccctaccttccttttgtagatattgacagaataggaggaaatgagcatccttatttgagaaagagcaagaatgtcatgagcccttgatgcaatagtaagtgtgatgtcatcatacagtgttaatgatgctatcaaatccatcaataaacagtctcaaaccttccaacaacagtgctcactgctgctcctcaacttcagcccagcaagcagtaatatcatcacccattttgagatatgcaggtggaatagaacaaagaaacagccactgtaatcgagaagcatgtttactgtctaaatccacctgttgcagtaggaagccagagtggggttccaaatgcctcattaagtatgtggacagcctcactagtaagtgagtgaatttggcttcatcactgaacattagctaaggtcagcttaataacacaaatatgaggccgacttctttgcgagaagagaaaagaaaacatctgcttgatttaaaatccaccccacatgcctagagttgtctaatagtccctcactttccaatggcttcacatcctacttctacatttggggttttttggtgaaatcagagatagctcaggatttcataaaacgagaaactccaaactggtctattaggttccatgggaacacttgtagccaaaggattgtctgagggcaggaagacgacacttgtcaacaaggaagacagtgtttctttagttcccatattcatctaattcatggggttctaacattttggggggccatagattcttttgacaatctgagccaatctatgaaacttctccccaaaaagaaccaccccacaaaatcttgcaaaacgtaagagattttcctggatctgaagctacccgaagacatgggaagagttgtattctattattcaattttaagaatatttattaatattcactgagctattgctagccactgtgctaaacattttacatacattctcctatttcatcctcaaaacaatcctttgagttgggttttaatatagttccaatattcggatgtgaaaactgaggcttatagtggctaagaaacttgcccaaagccactacctagaaaatggcagagctggaatgtaggtttaactcctgaccactatgctataaagtcaccacatgtcaaactaattttcaagttgttgggacatgtcccctactaggttttaaactagatcttccttggtagatgaagctatagaacttctattttccctgctttctgtagtctctcacagtgacagcatctatactaaagtatagatacctaaggggaaaatatagaaagcctgcctgaataatagaatctagaacaacaacaaaaatattaattttttctgtgtatgcttaggtcaagcttaaaaaaaaaaaaaaaa

SEQ ID NO: 13699 - DNA, 1576 bp, Homo sapiens
agagaggacttatctccagcatctagcactacagagcagaggctgtgtggagaatggctgaaaaatcagaattggttgtagaagcagttttctttctggttgtgagtatgagcccggcagacaccatgagcgctgttgcaggggagtcggcctgtgcttgacacatgtgtttcccattgatagctggagacagcccagtagctgtgagtcggtctgacaaagccatattgaagtacggagtacggtttcaaagcagtcagaaaaagaacgggaatgctgttcaggaaattcttcaggcatgggcagggacttggctgcagttctgcagttggaaaatctgactggggcagcttctgagcgcaggctgggcctgcacacactcagcgggccgagtggccacctccttcagagctgctcagcacgccctgggatcgcgggcggttttcatcggccggtttgtgaaacggacaagagagagacattactgccgggagtgttgagtgaagggaccaggtggagatgatgcctcaggagcagtacactcaccaccggagcaccatgcctggctctgtggggccacaggtatacaaggtggggatttatggctggcggaaacgatgcctgtatttctttgtcctgctcctcatgattttaatactggtgaacttggccatgaccatctggattctcaaagtcatgaacttcacaattgatggaatgggaaacctgaggatcacagaaaaaggtctaaagctagaaggagactctgaattcttacaacctctctacgccaaagaaatccagtcccgaccaggtaatgccctgtacttcaagtctgccagaaatgttacagtgaacattctcaatgaccagactaaagtgctaactcagcttataacaggtccaaaagccgtagaagcttatggtaaaaaatttgaggtaaaaactgtttctggaaaattgctcttctctgcagacaataatgaagtggtagtaggagctgaaagattacgagttttaggagcggagggcacagtgttccctaaatctatagaaacacctaatgtcagggcagaccccttcaaagaactaaggttggagtccccaacccggtctctagtgatggaggccccaaaaggagtggaaatcaatgcagaagctggcaatatggaagccacctgcaggacagagctgagactggaatccaaagatggagaggtgagggatgagaaggacagaagttcaaagagctacagcttcaacaggccaacccttcccataactggttgacctcggagttggatcctacagtgtatcaacaaaaggagccaagcaggttttatttctgaaacaattaattgagcagcatgattataagccaaacccacaatccatcaaagtgatgatttcttatttgtaaaatgcagagataatggcatgtattccaagtacagaattatatgaccatgaaaatgaatgctattttcaaattctctcttgtcaccttaaaataagattttgttagccaacataattaagctgtatatattatacacatctggctcaagatgaaaaa

SEQ ID NO: 13700 - DNA, 7660 bp, Homo sapiens
atgaggcctgggcccgctctcctccttctgggcgtgggcctgagcctgagcgtcggccgcctcccgctgccgccggttcctcgcggggcacaagccgccgtctccggggcgcccggtggcctcctcaggggcgccccgggcctcggggtgcgcggcggccgcgccctcctcagtctgcggcccagcgcggtgcgggcgggcggcgctgtcctgagcggccgcggcagcctctgcttcccccatggcgggaccgggcggcgctggtactgcctcgacttgcgcgtcctgctcagcgcccaacgcctgccctggccggccgcgcccgcgctcgcgctcgtcgacctgcagctctccgcgcgcggcggccgcctctccctgacgtggtccgtgcggctgccgcgctcgcccgggcgcctggcctgggccttccgcctgcggctgctcggacccggcgccgcccgcccggcctcccccgcggcccgcgtctccccgcgctccgccgcgccaggcccgcggccccagcagggcttcgtggcccgcaccgagtgccccacagacggccccgcgcgcgtgatgttgcaggccgtcaactcgtccagccacagagccgtcgagtcgtccgtgtcctgtcagataaacgcctgcgtcatccagcgcgtgaggatcaacacggaccagaagggcgcccccgtgcgcctgagcatgcaggcggaggccaccatcaacgcctcggtgcagctggactgcccggccgcgcgcgccatcgcccagtactggcaggtgttctccgtgcccgccgtgggtcaggcgcccgactggacgcagcccttggatctgccccagctcgagatcaggaacagccccttgttcattcacatccccaataattcgttacagtggggagtgtatgtgtttaatttcacggtgtccatcaccacagggaaccccaagatgcccgaggtgaaagactcggacgccgtctatgtctggatcgtcaggagttccctgcaggcggtgatgcttggcgatgccaacataacagctaatttcacagagcagctgattctggacgggtccacgtcctcggacccagatgcggacagcccgttacagggactccagttcttttggtactgtaccacagatcccagaaactacggtggggatcgaataatcctggggagcaaggaagtctgtcaccccgagcaggccaatctgaaatggccctgggcctcgggccctgtactgacacttttgccagaaacacttaaaggcgaccacgtgtatttcttcagaatggtgattcggaaggactctaggacagcgttttctgataagagggtccacgtgctccaaggaccaaaagccatagcacacatcacatgtatcgaaaattgtgagagaaacttcattgtctctgatagattttctttgttcctaaattgcacaaattgtgcaagccgtgatttctataaatggtcaattttgtcttcttcaggtggtgagatgctatttgattggatgggggaaactgtaacaggaaggaatggtgcttatctgtctataaaagcttttgcttttcggcattttttggaagctgagttttcgatttctctgtatctagcatgttggagtggagtgacctcggtcttcaggcattcttttattattaaccatggccctcagatcggagaatgcaaaattaatccagctaaaggaattgcacttattactaaatttgttgtccagtgtagtaattttagggataagcacgtccctcttacatataaaataattgtttctgatttgcacagtgttggtgaaatcagttcagtaaaagagaacaccctggggaccatcctgtacttggggcctcagtccacagtacccccttcctttctccctgttggtatgttggctagtcaatatggcttgaagatatatgcccaggtctatgattctctaggagctttttctcaggtgactttgcatgccaccgcacaggctcccactgacaaaaattcatcaaagacagtgttgaatcagttactcagtttcaccgtgggaccaagttcattgctgtctactttgattcaaaagaaggattttttacctgcaggttacttactgtatatagtagcttccgttttgaataacatgaaaactgaattacctctccgagatgacagagtcaatctccgaaaacacctcatcgatcagtctttccttcttcctgtaagcactttggtagaaattggccaggtagtcatgactattaccaaattaacccagaaaccctctgaattcacttgggatgctcagaaacgtgccaccatgagggtatggcaagcaaatcaagccctacaagagtatcagcaaaaagataaacgctttcgatctgaacaaatagaaatcgtgagtactggaatactaatgagtttgtctaatattcttaaaatgacttctcctcaccaagtagttaaagatcctttctatgtaatagaatctctatcagacacaatactggctaataaagtgccagggaacaaaaccacctcaatgagaacccccaatttcaacatgtatgtcaagaaagttgaaaagtggggtatcaaccagctcttcagaaatgagaaacactgcagaaattgtttttatccaacactcaatgtgagcagtgttcctggtctgtctgcaaatggtcccatttctacaatgttttgtgatttcacaaatgacctctttccttggttaaatgatcaggaaaacacttcggtggaggtgtctggattcagaatgacaggagttgcagataacggtagtgtgctagagatcacacctgatgtagcggaagtgtaccttgtcaggaaaaacttgacctttgcagcttttaatctcacagtgggacccaacagcgaggttgatgggtccttgaagaagacgacaggtgggtttagctttcaagtggacagcacagtgcttagggaggttctggtccacatagtaacagaagtgatggtgctgttcacagtgttggtgtacacaggcagtcagatcactcccacagcgctggtcgccaccttcctggtgcctcatgacatccctccatttgccagccagagtgccctgtttgacccagcctgcacagtgaagaaggcccgtgtagtctgcctccctgtgtccctgctgcaactcatagctcagcacagccactctccccactgtactgtatccatagttctgcaggcacctcgttttgtcatgaagctcaatgacaagctagtgagaatttctattttcagcgtccagtgcttggacatgtatgggatccagagtgaatggagagagggttattgcattcttggtgagaagaccagctggtatgaggtgcactgcatctgcaagaatgtagtaagggctaggcggcagctgggcacaatcggactcacgggcattcacctgcatacccactatgtgatggccaaggtgattgtgatccctaatcctgtggatctacggttaaacatcatcaagagccttcaccaaaaccccgtgaccctcttcactgtgcttttcattattctcttatacgtgggcctagctttttgggctttatacagggatgaaatggaccagcatcttcgggggcatgtgatagttctaccagataatgatccttatgataatttatgctacttggtgactatttttacaggaagtcgttgggggtctgggaccagggccaatgtctttgtgcaacttagaggaactgtgagtaccagcgacgtgcattgtttaagccatccacatttcacaactctctaccgaggtagcatcaacactttcctcctaacgacaaaaagtgacttgggggacatccattccatccgtgtgtggcacaacaacgagggtcgatcgcctagctggtatttaagtagaatcaaagtggaaaatctgtttagcaggcacatttggctgttcatatgccagaaatggctttctgttgataccactttggacagaacatttcacgttacccatccagatgagcgtctgactagaaaagactttttctttatagatgtgagtagtaatctccggaaaaaccacatgtggttctctatttttgctagtgttgttgctaaaacattcaataggctccagagattgtcctgttgtttagcaatgttgcttagctctcttctttgtaacattatgttctttaatctaaatagacaagaacaaactgagtcaagagagaggaaatacatgagatcaatgatgataggaattgaaagtgtcttaattacaatccctgtgcaattattaataacttttttgttcacctgttcccagaggaaacctcaagcggatctaaaggaggtatctcctcaaaagcatcctctaatgtcagaagcaagtgagcactgggaagaatacttgagaaagtggcatgcttacgaaactgctaaggtgcaccccagggaggttgcaaaacctgcatctaaaggaaagcccaggcttccaaaggcttctcctaaggcaacctccaaacccaagcacaggcataggaaagcacaaatcaagaccccggagaccctcgggccaaatacaaattccaataacaacatagaagatgatcaggatgtccattccgaacagcacccttcccaaaaggatctccagcagcttaagaaaaagccccggatcgtcctaccttggtggtgtgtttatgttgcatggtttttggtttttgctacttctagcatatcctcattcttcattgtattttatggactgacttacggctatgacaagtcaatagaatggctctttgcatctttttgttcattctgtcagtcagttcttctggtgcagccatctaaaattatactcctgtcaggcttcagaacgaataaacccaagtattgcaaaaacctttcatggtcaaccaagtataaatatactgagatcaggttggatggaatgcgtatgcatccagaagaaatgcagaggatacatgaccagatcgtccgaatccgaggcacgaggatgtaccaaccccttacagaagatgaaatcagaatattcaaaagaaagaagaggatcaagagaagagcactcctgtttctgagttacattctaactcactttatctttctagcccttctgttgatccttatcgtcttactacgtcacactgactgcttttactataaccagtttattcgtgatcggttctctatggatcttgctactgtgactaagctggaagacatctatagatggctaaacagcgtgctgttgcctttgttacacaatgacctgaatccaacatttcttcctgaaagctcgtctaaaatccttggccttccattgatgaggcaagtgagagcaaaatctagtgaaaaaatgtgtctacctgccgaaaagtttgtgcaaaacagcatcagaagagaaattcattgtcaccccaaatatggcattgacccagaagacacaaaaaactattctggcttttggaatgaagttgataagcaggctatagatgagagtaccaatggatttacttataagcctcaaggaacgcaatggctatattattcctatggactactacacacctatggatctggaggatatgcactctatttttttccagaacagcagcggtttaattccacactgaggctcaaagaacttcaagaaagcaattggctggatgagaagacatgggctgtggttttggaattaacaacttttaatccagatataaatctgttctgtagcatttcggtcatatttgaagtctctcagttaggagttgtcaacacaagcatatctctgcactctttttcacttgctgattttgacagaaaagcttcagcagaaatctacttgtatgtggccattctcatttttttcttagcctacgttgttgatgagggttgtatcattatgcaagaaagagcctcctatgtgagaagtgtgtataatttgctcaactttgctttaaagtgcatatttactgtgttgattgtgctctttctcaggaaacatttcctggccactggcataattcggttttacttgtcgaacccagaagacttcattccctttcatgcagtttctcaggtagatcacattatgaggataattttgggtttcctgttatttctgacaattttgaagaccctcaggtattccagattcttctacgatgtgcgcctggctcagagggccatccaggctgccctccctggcatctgccacatggcatttgttgtgtccgtgtatttcttcgtatacatggcttttggttacctggtgtttggtcagcatgaatggaactacagtaacttgattcattccactcagacagtattttcctattgtgtctcagctttccagaacactgaattttccaataacaggattctgggggtcctgttcctctcatctttcatgctggtgatgatctgcgtcttgatcaacttatttcaggctgtaattctgtctgcatatgaggaaatgaagcagcccgtgtatgaggagccatcggatgaagtggaagcaatgacctatttgtgccgtaagctgagaaccatgttcagctttctgacctcgcaatctaaggccaaagatgagcctgagttctttattgacatgctgtatgggcagccagagaagaacagccaccgttatctggggctgaagaccagaaacatcaacgggaagaaaatggtttaccttgttgtttgatgaatgatggtttcatgagtcacaagcaagcgttcccccaactgctgagtctgtgggattaaggggattagggagtgtcagtggcctagtcatgctttctactcatgtccttcacaaggcacatcccctacatttggaagaatccccaatcttgtcctctgctcttgggagtgtaaaagttgggagtgtagtgtagcatctggggagacagcaggatcacagtgtgggattcctggactgatttccctttagaggggagttatgtgactccccgtacaagggcaaccctgtttctttggtgcctgcagtttagagaaggcagagccactggttttgagaaccagatttgagagagggacctggccagggtggagcattgtctgggtgtttctgcgcttgacccatgctggaagctaatggcctgttgctcctgacagagccccaaactcctcggcctcactgggaggcccctttgtagaccagggctcccctcctcttgttccccctgggcttagggcctcgtggggagttccaggacttgcttcatgcttgagaatgcagatgtggtgcttctcatttattcttaaagctactggtagttaaagtaaaattcagtaacattttctgaccaagagacatgttttgttaaacaacaaaaaggtacatatgggttcacattgaaatatgtctatatgctgaatatagcaacatatgcatctaagatttgggcatttggttattaatagcgtgctggactattcaggaataaggaaaatgtggtttatcacttaagagaaacaagggctggtagctgtactattttcactcagaagcatgttcatttatgtagatgccactttaagctttatcagaattaaatgtgagatttcttctttga

SEQ ID NO: 13701 - DNA, 2485 bp, Homo sapiens
agaatacggtgagaaattccaggagcacagaagtcagcgggcatctcctggagacaggcagacatttggtctcagcagccatgcccaaagtcatgaaggatgttgtgcaccccttggggggagaggagcctagcatggcgagagctgtggttcgcagcgtgggaggctttaccctgggcttgtctttagccacggcctacgggcttctggagctactggtggaaggccacagcccctggggttgcctggtgggcaccctcactttggctgccttccttagcctgggcatgggattctctcgccaggtccgagccactgtcctcctgctgctgcctcaggccttctccaggcagggccggacactactgttggtggctgcttttgggttggtgcttcaagggccttgtgccaacactctacgcaacttcacccgggccagcgaggctgtagcctgtggggcagagctggccctgaaccagaccgccgaagtgctacagagggccaagcaacctcttgtcagtgccctgaacaagattaaagctattgcccggaagaccaaagaggtggctgaccgggtccgcaagttctttcggtcaatcatggatggtgtgaaacacatagccagggctctccggaatgtgtggcagtggctcctgcacatcggcgatgtgtgcaactcggaactgggcaacccttacctgaagtgtgcacgggttttcgatgatgccaaggacagctgcatgatggtcataccacaagcctaccacctgtgttacgtgctcatgcccttcaaactggcgctctgtggacttgccagcctggtccaggtgttctgcgtcatccctaagtacattcaacccttcttgcgccagaccatcggcacccccgtgattcagttgctcaaccgggtgcgtcaggagtttgagttcaacatgacagccacccaccacttctctgtggatctcaatgcctctcggagcctgtcccaggtagccatggacctccacgaggctgtcagcatgaagctgcaccgtgtccgagaggccctggctctgatgggcttcaccacgcctctgctgcttgtgcttctctacctccaagccctattttaccggtattgttacctgaactgggaccattatgacaatatctacatcactagccgattcctgcgcatggaggctgtgcgctccacggcagggctgcccacagtgctaccgctcagtgctcacgaggccaggcgctacatcccaccgggctccatcttcttgtcccaatgggagaagtttttttacattctggagaccttcaaccttatccgacacctcctcctcgtgctgttcctagtcttcctagactatgctgtcttctgggtgcttgacctggcccggcaccagctgcagggggagattgtggcccgcagtcctgtgttggtgtctctaaccgtggaaggtactggctacgctgggaatatttatcgtgacctggtgtcagcatttgatgtcctgcagcaaggcaacatcagtattttgtcccggcgttgtctccttcgtccctcggagcctgacagcactggctacatagtcattggcgtcatgtatggcctatgcttcttcatcaccctgtttggcagctatgtcagccggctgcggcgagtcatctgtgcctcctactacccatcccgggagcaggagaggatctcctacctgtacaatgtacttctgagccgccgaaccaatctgttggctgccctgcaccgatcagtgaggcggcgggcggctgaccagggccacagaagtgccttcctagtgctggccagtcggtgcccctgcctaggtccatttgtcagccacttttggctgcatcaggcctactgcctgggctgtgggcagccccaggatgagggagacatggagaacactgtgtcctgcagtacccccggctgccaaggatttatatgcaagtggcattgcagcagctccctagtgtgcaccccttgacaaggatggttcatccaggtctctactgcctcacttgcttccgcctcctggacaatacctgctccgtgtgtgcatctcccctctcctaccagggggacctggacctggagctggactccagcgatgaggagggccctcagctatggctggctgcagctcaaaggaaggaccctgagcaggcatggttattgcagcaacagctccaagaagtgctcggcaggagcctctcaatggagtccacttccgagtccagtgacctggatgaggagaaggggcctcagcagaggaagcacgggcagcagcccttacctgaagcccatcagcctgtcagcattctcaccagccctgagccccacagaccacctgagacatcctccgccactaaaggagcccccactccagcttcagaaccctcagtccctctctcacctccctctcttcctgatccttcccacccaccccccaaataaaccaaaagtggacac

SEQ ID NO: 13702 - DNA, 1681 bp, Homo sapiens
tgcctgtatgtctgaggctgggtttgaagcctccagcgtgtttggagttaatccccattaggttggactccgcccctttctcccaaaggtaaagcaaggttttcaggcatcactgcaaagggcagctagtattcccatccttgtctaacaagctgtaaggagaagttgtttctgagatctgagcctgaagagagggaacaagtcagtcagccttcgtggtcagaagagaaacctgtgaccatgaggagcagcctgaccatggtgggaaccctctgggccttcctgtcccttgttactgctgtgaccagttctaccagttacttcctaccttactggctctttggatcccagatggggaagccagtgtcattcagcacattccggaggtgcaactaccctgtgcggggagagggacacagtctgatcatggtggaagaatgtgggcgctatgccagcttcaatgccatcccaagcctggcctggcagatgtgcacagtggtgacaggtgccggctgtgctctgctgctcctggtggcactagctgctgtcctgggttgctgcatggaggagctcatctccagaatgatgggacgttgcatgggagcagcgcagtttgttggagggctgctgataagctcaggctgtgccttataccctttaggatggaatagcccggagataatgcaaacatgtgggaatgtctccaatcaatttcagttaggtacctgtcggcttggctgggcctattactgtgctggaggtggagcagctgcagccatgttgatctgcacctggctctcttgctttgctggaagaaaccccaagcctgtcatattggtggagagcatcatgaggaataccaattcttatgctatggagcttgaccattgcctcaaaccttgagctttgaaagaagattggagagggtgggaaaggggaggagggagccctgaaaagaggtactaaggattaggccatttgtcatctgactgtcattagcatagcctagtgtttgcatgctttttaaactaattgtcgttcattttcacttatctttaagccagtaggtcactggctgtttataaaattcatcagaggaaacattctcagacatttacccaactggcaagtcgtgctaacccgaagacccaaagtacccctttatgcaaaataggatccaaagctaaggctgggtaagaatagttgtgcagggagggagcacgagatgggcagagctggttcctaccactccattcacacagttcatcagttcattcccaagtatttattgtcacccccaaacatctctggagtactactgctcaatttttgtgtcgttatcaggagtataccttggctcttccttttttttctcctgcttccccccgcaccttgtggggaagcttcaggggagcgggggagggtgattcccagtggtggggaaaacattaatcaaggatacttgcatttagcctggagccccttcctcattatgctttagaatattcataggagttccatttgtattctggctgggtgatgagcaaaaaaaatatatagtagcaaatattctctcatcctttagagataaagaaatggtgttcatcaaatgtactgagaatagactagcatttgtggggcactcaataaatttaaattcatggtgacagtgaaaaaaaaa

SEQ ID NO: 13703 - DNA, 1750 bp, Homo sapiens
ggggtggagctgaggggtggagctgaggctggagggaggaaggtgtggggggacccaggggtcctgtctccaagcctggttgctcttacgcgaaaagttgggacactgaggtgtcacagcttctcttttgaaatggagaggaggtaggagggtgaggtccatccaggtagacacagacacacacagagaccacagcttcctgtaacatttccgagtgtcgaattccatctcccggtctagaggtttttcttcttggtccttcctgagacctcttggctcccaagagcctcttgatcggggcaggaatgagggtgccccagggtgcgagagtcgtggatccctgaaaagaggaggctgctccccctctttcttccccccacctccagatttcctcatctgcccacaccttccggtgggcggggacgtgtatggacaaatttgcgggctggggaccatggaagtggaggaaatctacaagcaccaggaagtcaagatgcaagcaccagccttcagggacaagaaacagggggtctcagccaagaatcaaggtgcccatgacccagactatgagaatatcaccttggccttcaaaaatcaggaccatgcaaagggtggtcattcacgacccacgagccaagtcccagcccagtgcaggccgccctcagactccacccaggtcccctgctggttgtacagagccatcctgagcctgtacatcctcctggccctggcctttgtcctctgcatcatcctgtcagccttcatcatggtgaagaatgctgagatgtccaaggagctgctgggctttaaaagggagctttggaatgtctcaaactccgtacaagcatgcgaagagagacagaagagaggctgggattccgttcagcagagcatcaccatggtcaggagcaagattgatagattagagacgacattagcaggcataaaaaacgttgacacaaaggtacagaaaatcttggaggtgctgcagaaaatgccacagtcctcacctcaataaatgagaggacattgtggcagccaaagccacaacttggaagatggggctgcacctgccaacgaagacgggaaatgaccccccccccagcctagtgtgaacctgcccctcgtcccacgtatagaaaaacctcgagtcatggtgaatgagtgtctcggagttgctcgtgtgtgtgtacacctgcgtgcgtgtgtgtgcgtgtgtgcgcgtgtgttcgtgtgtgtgcgtgtgtgcgtgcgcgtgtgtgtgcattttgcaaagggtggacatttcagtgtatctcccagaaaggtgatgaatgaataggactgagagtcacagtgaatgtggcatgcatgcctgtgtcatgtgacatatgtgagtctcggcatgtcacggtgggtggctgtgtctgagcacctccagcagatgtcactctgagtgtgggtgttggtgacatgcattgcacgggcctgtctccctgtttgtgtaaacatactagagtatactgcggcgtgttttctgtctacccatgtcatggtgggggagatttatctccgtacatgtgggtgtcgccatgtgtgccctgtcactatctgtggctgggtgaacggctgtgtcattatgagtgtgccgagttatgccaccctgtgtgctcagggcacatgcacacagacatttatctctgcactcacattttgtgacttatgaagataaataaagtcaagggaaaaaaaaaaaaaaaaaaaaaaaaaa

SEQ ID NO: 13704 - DNA, 1013 bp, Homo sapiens
gacaggcatcccccaggtgggaggaggggctgtcctggctctgacctggatatcagatccagagctgagggggaggtgcagggtcaggaggggaggggttctgttctgagtttcccctggccaaggctgcagacaagggacgcagacaatcggcacattgtgagcaggggctgcaggatggaaccagcaagctgctgtgctgagcgccccaaacctgggcctacaggggtgaagaccaagccctcctgcgggggctggagagccgtgggcctgctcctgctgctgctgctgctggtgctggccgctgtggggattgtggctggagggcttcttggctctgctcagggccctcccaagccaaggctgcagacgctgcgaatgaccctcccgagcccccacatgccccggcccaaccaaaccatcctggtggacgtggcccggaacgcggcgaccatcacagtgaccccacctcagagcaaccacagctgggcggtgctgttcgacgggcagagcggctgcatctgttaccgccctgaggagcaccaggtctgcttcctccgcctgatggaggacagtgatcgggagaccctgcggctgctggtggatacctccaaggtccaagaggcttgggtccccagccaggacacccaccacacccaggagctgctggcagtgcaggggagcctcgaagtggaccccgcccaggcgggggctttggtgcagcgcctgtgcatgaggacccccatctactgggcccggcgagcagaggggccccggagacagcggctgatttatctctgcatcgacatctgcttcccgagcaacatctgcgtgtcggtctgcttttattacctcccagactgagcccccgacctggcccagcctggcccgtccccaatccagtgggctggccaggccacctgcaccagggaggacagctgctggcagggactaataaacccttccacctggcaaaaaaaaaaaaaaaaaaaaaaaaaaaaaaaaaaaaaaaa

SEQ ID NO: 13705 - DNA, 6132 bp, Homo sapiens
aattggaagcaaatgacatcacagcaggtcagagaaaaagggttgagcggcaggcacccagagtagtaggtctttggcattaggagcttgagcccagacggccctagcagggaccccagcgcccgagagaccatgcagaggtcgcctctggaaaaggccagcgttgtctccaaactttttttcagctggaccagaccaattttgaggaaaggatacagacagcgcctggaattgtcagacatataccaaatcccttctgttgattctgctgacaatctatctgaaaaattggaaagagaatgggatagagagctggcttcaaagaaaaatcctaaactcattaatgcccttcggcgatgttttttctggagatttatgttctatggaatctttttatatttaggggaagtcaccaaagcagtacagcctctcttactgggaagaatcatagcttcctatgacccggataacaaggaggaacgctctatcgcgatttatctaggcataggcttatgccttctctttattgtgaggacactgctcctacacccagccatttttggccttcatcacattggaatgcagatgagaatagctatgtttagtttgatttataagaagactttaaagctgtcaagccgtgttctagataaaataagtattggacaacttgttagtctcctttccaacaacctgaacaaatttgatgaaggacttgcattggcacatttcgtgtggatcgctcctttgcaagtggcactcctcatggggctaatctgggagttgttacaggcgtctgccttctgtggacttggtttcctgatagtccttgccctttttcaggctgggctagggagaatgatgatgaagtacagagatcagagagctgggaagatcagtgaaagacttgtgattacctcagaaatgattgaaaatatccaatctgttaaggcatactgctgggaagaagcaatggaaaaaatgattgaaaacttaagacaaacagaactgaaactgactcggaaggcagcctatgtgagatacttcaatagctcagccttcttcttctcagggttctttgtggtgtttttatctgtgcttccctatgcactaatcaaaggaatcatcctccggaaaatattcaccaccatctcattctgcattgttctgcgcatggcggtcactcggcaatttccctgggctgtacaaacatggtatgactctcttggagcaataaacaaaatacaggatttcttacaaaagcaagaatataagacattggaatataacttaacgactacagaagtagtgatggagaatgtaacagccttctgggaggagggatttggggaattatttgagaaagcaaaacaaaacaataacaatagaaaaacttctaatggtgatgacagcctcttcttcagtaatttctcacttcttggtactcctgtcctgaaagatattaatttcaagatagaaagaggacagttgttggcggttgctggatccactggagcaggcaagacttcacttctaatggtgattatgggagaactggagccttcagagggtaaaattaagcacagtggaagaatttcattctgttctcagttttcctggattatgcctggcaccattaaagaaaatatcatctttggtgtttcctatgatgaatatagatacagaagcgtcatcaaagcatgccaactagaagaggacatctccaagtttgcagagaaagacaatatagttcttggagaaggtggaatcacactgagtggaggtcaacgagcaagaatttctttagcaagagcagtatacaaagatgctgatttgtatttattagactctccttttggatacctagatgttttaacagaaaaagaaatatttgaaagctgtgtctgtaaactgatggctaacaaaactaggattttggtcacttctaaaatggaacatttaaagaaagctgacaaaatattaattttgcatgaaggtagcagctatttttatgggacattttcagaactccaaaatctacagccagactttagctcaaaactcatgggatgtgattctttcgaccaatttagtgcagaaagaagaaattcaatcctaactgagaccttacaccgtttctcattagaaggagatgctcctgtctcctggacagaaacaaaaaaacaatcttttaaacagactggagagtttggggaaaaaaggaagaattctattctcaatccaatcaactctatacgaaaattttccattgtgcaaaagactcccttacaaatgaatggcatcgaagaggattctgatgagcctttagagagaaggctgtccttagtaccagattctgagcagggagaggcgatactgcctcgcatcagcgtgatcagcactggccccacgcttcaggcacgaaggaggcagtctgtcctgaacctgatgacacactcagttaaccaaggtcagaacattcaccgaaagacaacagcatccacacgaaaagtgtcactggcccctcaggcaaacttgactgaactggatatatattcaagaaggttatctcaagaaactggcttggaaataagtgaagaaattaacgaagaagacttaaaggagtgcttttttgatgatatggagagcataccagcagtgactacatggaacacataccttcgatatattactgtccacaagagcttaatttttgtgctaatttggtgcttagtaatttttctggcagaggtggctgcttctttggttgtgctgtggctccttggaaacactcctcttcaagacaaagggaatagtactcatagtagaaataacagctatgcagtgattatcaccagcaccagttcgtattatgtgttttacatttacgtgggagtagccgacactttgcttgctatgggattcttcagaggtctaccactggtgcatactctaatcacagtgtcgaaaattttacaccacaaaatgttacattctgttcttcaagcacctatgtcaaccctcaacacgttgaaagcaggtgggattcttaatagattctccaaagatatagcaattttggatgaccttctgcctcttaccatatttgacttcatccagttgttattaattgtgattggagctatagcagttgtcgcagttttacaaccctacatctttgttgcaacagtgccagtgatagtggcttttattatgttgagagcatatttcctccaaacctcacagcaactcaaacaactggaatctgaaggcaggagtccaattttcactcatcttgttacaagcttaaaaggactatggacacttcgtgccttcggacggcagccttactttgaaactctgttccacaaagctctgaatttacatactgccaactggttcttgtacctgtcaacactgcgctggttccaaatgagaatagaaatgatttttgtcatcttcttcattgctgttaccttcatttccattttaacaacaggagaaggagaaggaagagttggtattatcctgactttagccatgaatatcatgagtacattgcagtgggctgtaaactccagcatagatgtggatagcttgatgcgatctgtgagccgagtctttaagttcattgacatgccaacagaaggtaaacctaccaagtcaaccaaaccatacaagaatggccaactctcgaaagttatgattattgagaattcacacgtgaagaaagatgacatctggccctcagggggccaaatgactgtcaaagatctcacagcaaaatacacagaaggtggaaatgccatattagagaacatttccttctcaataagtcctggccagagggtgggcctcttgggaagaactggatcagggaagagtactttgttatcagcttttttgagactactgaacactgaaggagaaatccagatcgatggtgtgtcttgggattcaataactttgcaacagtggaggaaagcctttggagtgataccacagaaagtatttattttttctggaacatttagaaaaaacttggatccctatgaacagtggagtgatcaagaaatatggaaagttgcagatgaggttgggctcagatctgtgatagaacagtttcctgggaagcttgactttgtccttgtggatgggggctgtgtcctaagccatggccacaagcagttgatgtgcttggctagatctgttctcagtaaggcgaagatcttgctgcttgatgaacccagtgctcatttggatccagtaacataccaaataattagaagaactctaaaacaagcatttgctgattgcacagtaattctctgtgaacacaggatagaagcaatgctggaatgccaacaatttttggtcatagaagagaacaaagtgcggcagtacgattccatccagaaactgctgaacgagaggagcctcttccggcaagccatcagcccctccgacagggtgaagctctttccccaccggaactcaagcaagtgcaagtctaagccccagattgctgctctgaaagaggagacagaagaagaggtgcaagatacaaggctttagagagcagcataaatgttgacatgggacatttgctcatggaattggagctcgtgggacagtcacctcatggaattggagctcgtggaacagttacctctgcctcagaaaacaaggatgaattaagtttttttttaaaaaagaaacatttggtaaggggaattgaggacactgatatgggtcttgataaatggcttcctggcaatagtcaaattgtgtgaaaggtacttcaaatccttgaagatttaccacttgtgttttgcaagccagattttcctgaaaacccttgccatgtgctagtaattggaaaggcagctctaaatgtcaatcagcctagttgatcagcttattgtctagtgaaactcgttaatttgtagtgttggagaagaactgaaatcatacttcttagggttatgattaagtaatgataactggaaacttcagcggtttatataagcttgtattcctttttctctcctctccccatgatgtttagaaacacaactatattgtttgctaagcattccaactatctcatttccaagcaagtattagaataccacaggaaccacaagactgcacatcaaaatatgccccattcaacatctagtgagcagtcaggaaagagaacttccagatcctggaaatcagggttagtattgtccaggtctaccaaaaatctcaatatttcagataatcacaatacatcccttacctgggaaagggctgttataatctttcacaggggacaggatggttcccttgatgaagaagttgatatgccttttcccaactccagaaagtgacaagctcacagacctttgaactagagtttagctggaaaagtatgttagtgcaaattgtcacaggacagcccttctttccacagaagctccaggtagagggtgtgtaagtagataggccatgggcactgtgggtagacacacatgaagtccaagcatttagatgtataggttgatggtggtatgttttcaggctagatgtatgtacttcatgctgtctacactaagagagaatgagagacacactgaagaagcaccaatcatgaattagttttatatgcttctgttttataattttgtgaagcaaaattttttctctaggaaatatttattttaataatgtttcaaacatatataacaatgctgtattttaaaagaatgattatgaattacatttgtataaaataatttttatatttgaaatattgactttttatggcactagtatttctatgaaatattatgttaaaactgggacaggggagaacctagggtgatattaaccaggggccatgaatcaccttttggtctggagggaagccttggggctgatgcagttgttgcccacagctgtatgattcccagccagcacagcctcttagatgcagttctgaagaagatggtaccaccagtctgactgtttccatcaagggtacactgccttctcaactccaaactgactcttaagaagactgcattatatttattactgtaagaaaatatcacttgtcaataaaatccatacatttgtgtgaaa

SEQ ID NO: 13706 - DNA, 7318 bp, Homo sapiens
ctggctcttaacggcgtttatgtcctttgctgtctgaggggcctcagctctgaccaatctggtcttcgtgtggtcattagcatgggcttcgtgagacagatacagcttttgctctggaagaactggaccctgcggaaaaggcaaaagattcgctttgtggtggaactcgtgtggcctttatctttatttctggtcttgatctggttaaggaatgccaacccgctctacagccatcatgaatgccatttccccaacaaggcgatgccctcagcaggaatgctgccgtggctccaggggatcttctgcaatgtgaacaatccctgttttcaaagccccaccccaggagaatctcctggaattgtgtcaaactataacaactccatcttggcaagggtatatcgagattttcaagaactcctcatgaatgcaccagagagccagcaccttggccgtatttggacagagctacacatcttgtcccaattcatggacaccctccggactcacccggagagaattgcaggaagaggaatacgaataagggatatcttgaaagatgaagaaacactgacactatttctcattaaaaacatcggcctgtctgactcagtggtctaccttctgatcaactctcaagtccgtccagagcagttcgctcatggagtcccggacctggcgctgaaggacatcgcctgcagcgaggccctcctggagcgcttcatcatcttcagccagagacgcggggcaaagacggtgcgctatgccctgtgctccctctcccagggcaccctacagtggatagaagacactctgtatgccaacgtggacttcttcaagctcttccgtgtgcttcccacactcctagacagccgttctcaaggtatcaatctgagatcttggggaggaatattatctgatatgtcaccaagaattcaagagtttatccatcggccgagtatgcaggacttgctgtgggtgaccaggcccctcatgcagaatggtggtccagagacctttacaaagctgatgggcatcctgtctgacctcctgtgtggctaccccgagggaggtggctctcgggtgctctccttcaactggtatgaagacaataactataaggcctttctggggattgactccacaaggaaggatcctatctattcttatgacagaagaacaacatccttttgtaatgcattgatccagagcctggagtcaaatcctttaaccaaaatcgcttggagggcggcaaagcctttgctgatgggaaaaatcctgtacactcctgattcacctgcagcacgaaggatactgaagaatgccaactcaacttttgaagaactggaacacgttaggaagttggtcaaagcctgggaagaagtagggccccagatctggtacttctttgacaacagcacacagatgaacatgatcagagataccctggggaacccaacagtaaaagactttttgaataggcagcttggtgaagaaggtattactgctgaagccatcctaaacttcctctacaagggccctcgggaaagccaggctgacgacatggccaacttcgactggagggacatatttaacatcactgatcgcaccctccgcctggtcaatcaatacctggagtgcttggtcctggataagtttgaaagctacaatgatgaaactcagctcacccaacgtgccctctctctactggaggaaaacatgttctgggccggagtggtattccctgacatgtatccctggaccagctctctaccaccccacgtgaagtataagatccgaatggacatagacgtggtggagaaaaccaataagattaaagacaggtattgggattctggtcccagagctgatcccgtggaagatttccggtacatctggggcgggtttgcctatctgcaggacatggttgaacaggggatcacaaggagccaggtgcaggcggaggctccagttggaatctacctccagcagatgccctacccctgcttcgtggacgattctttcatgatcatcctgaaccgctgtttccctatcttcatggtgctggcatggatctactctgtctccatgactgtgaagagcatcgtcttggagaaggagttgcgactgaaggagaccttgaaaaatcagggtgtctccaatgcagtgatttggtgtacctggttcctggacagcttctccatcatgtcgatgagcatcttcctcctgacgatattcatcatgcatggaagaatcctacattacagcgacccattcatcctcttcctgttcttgttggctttctccactgccaccatcatgctgtgctttctgctcagcaccttcttctccaaggccagtctggcagcagcctgtagtggtgtcatctatttcaccctctacctgccacacatcctgtgcttcgcctggcaggaccgcatgaccgctgagctgaagaaggctgtgagcttactgtctccggtggcatttggatttggcactgagtacctggttcgctttgaagagcaaggcctggggctgcagtggagcaacatcgggaacagtcccacggaaggggacgaattcagcttcctgctgtccatgcagatgatgctccttgatgctgcgtgctatggcttactcgcttggtaccttgatcaggtgtttccaggagactatggaaccccacttccttggtactttcttctacaagagtcgtattggcttagcggtgaagggtgttcaaccagagaagaaagagccctggaaaagaccgagcccctaacagaggaaacggaggatccagagcacccagaaggaatacacgactccttctttgaacgtgagcatccagggtgggttcctggggtatgcgtgaagaatctggtaaagatttttgagccctgtggccggccagctgtggaccgtctgaacatcaccttctacgagaaccagatcaccgcattcctgggccacaatggagctgggaaaaccaccaccttgtccatcctgacgggtctgttgccaccaacctctgggactgtgctcgttgggggaagggacattgaaaccagcctggatgcagtccggcagagccttggcatgtgtccacagcacaacatcctgttccaccacctcacggtggctgagcacatgctgttctatgcccagctgaaaggaaagtcccaggaggaggcccagctggagatggaagccatgttggaggacacaggcctccaccacaagcggaatgaagaggctcaggacctatcaggtggcatgcagagaaagctgtcggttgccattgcctttgtgggagatgccaaggtggtgattctggacgaacccacctctggggtggacccttactcgagacgctcaatctgggatctgctcctgaagtatcgctcaggcagaaccatcatcatgcccactcaccacatggacgaggccgaccaccaaggggaccgcattgccatcattgcccagggaaggctctactgctcaggcaccccactcttcctgaagaactgctttggcacaggcttgtacttaaccttggtgcgcaagatgaaaaacatccagagccaaaggaaaggcagtgaggggacctgcagctgctcgtctaagggtttctccaccacgtgtccagcccacgtcgatgacctaactccagaacaagtcctggatggggatgtaaatgagctgatggatgtagttctccaccatgttccagaggcaaagctggtggagtgcattggtcaagaacttatcttccttcttccaaataagaacttcaagcacagagcatatgccagccttttcagagagctggaggagacgctggctgaccttggtctcagcagttttggaatttctgacactcccctggaagagatttttctgaaggtcacggaggattctgattcaggacctctgtttgcgggtggcgctcagcagaaaagagaaaacgtcaacccccgacacccctgcttgggtcccagagagaaggctggacagacaccccaggactccaatgtctgctccccaggggcgccggctgctcacccagagggccagcctcccccagagccagagtgcccaggcccgcagctcaacacggggacacagctggtcctccagcatgtgcaggcgctgctggtcaagagattccaacacaccatccgcagccacaaggacttcctggcgcagatcgtgctcccggctacctttgtgtttttggctctgatgctttctattgttatccttccttttggcgaataccccgctttgacccttcacccctggatatatgggcagcagtacaccttcttcagcatggatgaaccaggcagtgagcagttcacggtacttgcagacgtcctcctgaataagccaggctttggcaaccgctgcctgaaggaagggtggcttccggagtacccctgtggcaactcaacaccctggaagactccttctgtgtccccaaacatcacccagctgttccagaagcagaaatggacacaggtcaacccttcaccatcctgcaggtgcagcaccagggagaagctcaccatgctgccagagtgccccgagggtgccgggggcctcccgcccccccagagaacacagcgcagcacggaaattctacaagacctgacggacaggaacatctccgacttcttggtaaaaacgtatcctgctcttataagaagcagcttaaagagcaaattctgggtcaatgaacagaggtatggaggaatttccattggaggaaagctcccagtcgtccccatcacgggggaagcacttgttgggtttttaagcgaccttggccggatcatgaatgtgagcgggggccctatcactagagaggcctctaaagaaatacctgatttccttaaacatctagaaactgaagacaacattaaggtgtggtttaataacaaaggctggcatgccctggtcagctttctcaatgtggcccacaacgccatcttacgggccagcctgcctaaggacaggagccccgaggagtatggaatcaccgtcattagccaacccctgaacctgaccaaggagcagctctcagagattacagtgctgaccacttcagtggatgctgtggttgccatctgcgtgattttctccatgtccttcgtcccagccagctttgtcctttatttgatccaggagcgggtgaacaaatccaagcacctccagtttatcagtggagtgagccccaccacctactgggtgaccaacttcctctgggacatcatgaattattccgtgagtgctgggctggtggtgggcatcttcatcgggtttcagaagaaagcctacacttctccagaaaaccttcctgcccttgtggcactgctcctgctgtatggatgggcggtcattcccatgatgtacccagcatccttcctgtttgatgtccccagcacagcctatgtggctttatcttgtgctaatctgttcatcggcatcaacagcagtgctattaccttcatcttggaattatttgataataaccggacgctgctcaggttcaacgccgtgctgaggaagctgctcattgtcttcccccacttctgcctgggccggggcctcattgaccttgcactgagccaggctgtgacagatgtctatgcccggtttggtgaggagcactctgcaaatccgttccactgggacctgattgggaagaacctgtttgccatggtggtggaaggggtggtgtacttcctcctgaccctgctggtccagcgccacttcttcctctcccaatggattgccgagcccactaaggagcccattgttgatgaagatgatgatgtggctgaagaaagacaaagaattattactggtggaaataaaactgacatcttaaggctacatgaactaaccaagatttatctgggcacctccagcccagcagtggacaggctgtgtgtcggagttcgccctggagagtgctttggcctcctgggagtgaatggtgccggcaaaacaaccacattcaagatgctcactggggacaccacagtgacctcaggggatgccaccgtagcaggcaagagtattttaaccaatatttctgaagtccatcaaaatatgggctactgtcctcagtttgatgcaatcgatgagctgctcacaggacgagaacatctttacctttatgcccggcttcgaggtgtaccagcagaagaaatcgaaaaggttgcaaactggagtattaagagcctgggcctgactgtctacgccgactgcctggctggcacgtacagtgggggcaacaagcggaaactctccacagccatcgcactcattggctgcccaccgctggtgctgctggatgagcccaccacagggatggacccccaggcacgccgcatgctgtggaacgtcatcgtgagcatcatcagaaaagggagggctgtggtcctcacatcccacagcatggaagaatgtgaggcactgtgtacccggctggccatcatggtaaagggcgcctttcgatgtatgggcaccattcagcatctcaagtccaaatttggagatggctatatcgtcacaatgaagatcaaatccccgaaggacgacctgcttcctgacctgaaccctgtggagcagttcttccaggggaacttcccaggcagtgtgcagagggagaggcactacaacatgctccagttccaggtctcctcctcctccctggcgaggatcttccagctcctcctctcccacaaggacagcctgctcatcgaggagtactcagtcacacagaccacactggaccaggtgtttgtaaattttgctaaacagcagactgaaagtcatgacctccctctgcaccctcgagctgctggagccagtcgacaagcccaggactgatctttcacaccgctcgttcctgcagccagaaaggaactctgggcagctggaggcgcaggagcctgtgcccatatggtcatccaaatggactggcccagcgtaaatgaccccactgcagcagaaaacaaacacacgaggagcatgcagcgaattcagaaagaggtctttcagaaggaaaccgaaactgacttgctcacctggaacacctgatggtgaaaccaaacaaatacaaaatccttctccagaccccagaactagaaaccccgggccatcccactagcagctttggcctccatattgctctcatttcaagcagatctgcttttctgcatgtttgtctgtgtgtctgcgttgtgtgtgattttcatggaaaaataaaatgcaaatgcactcatcacaaaaaaaaaaaaaaaaa

SEQ ID NO: 13707 - DNA, 2974 bp, Homo sapiens
cgcccaggaccaggactatcccctgctcaagctgtgattccgagacccctgccaccactactgcattcacggggatcccaggctagtgggactcgacatgggtagcccccagggcagctccctacagcttgggccatctgcacttttcccaaggccctaagtctccgcctctgggctcgttaaggtttggggtgggagctgtgctgtgggaagcaacccggactacacttggcaagcatggcgctactgaaagtcaagtttgaccagaagaagcgggtcaagttggcccaagggctctggctcatgaactggttctccgtgttggctggcatcatcatcttcagcctaggactgttcctgaagattgaactccgaaagaggagcgatgtgatgaataattctgagagccattttgtgcccaactcattgatagggatgggggtgctatcctgtgtcttcaactcgctggctgggaagatctgctacgacgccctggacccagccaagtatgccagatggaagccctggctgaagccgtacctggctatctgtgtcctcttcaacatcatcctcttccttgtggctctctgctgctttctgcttcggggctcgctggagaacaccctgggccaagggctcaagaacggcatgaagtactaccgggacacagacacccctggcaggtgtttcatgaagaagaccatcgacatgctgcagatcgagttcaaatgctgcggcaacaacggttttcgggactggtttgagattcagtggatcagcaatcgctacctggacttttcctccaaagaagtcaaagatcgaatcaagagcaacgtggatgggcggtacctggtggacggcgtccctttcagctgctgcaatcctagctcgccacggccctgcatccagtatcagatcaccaacaactcagcacactacagttacgaccaccagacggaggagctcaacctgtgggtgcgtggctgcagggctgccctgctgagctactacagcagcctcatgaactccatgggtgtcgtcacgctcctcatttggctcttcgaggtgaccattacaattgggctgcgctacctacagacgtcgctggatggtgtgtccaaccccgaggaatctgagagcgagagcgagggctggctgctggagaagagcgtgccggagacctggaaggcctttctggagagtgtgaagaagctgggcaagggcaaccaggtggaagccgagggcgcaggcgcaggccaggccccagaggctggctgagggccctggggcccctcccctcccgaacactgagaaatagtgcactccaagaaacgtggatctccccctcatccaactccgaaagtctgaatctcccaaggagggcaccatcttacagagactctccctgacggtggaatttaagtttagggtccctaaaagcatttgacacacagttgttgaatgactgacccaaaatgtgaatgaagctaatgtgaatgtgagtgaagctcccttcaggcccgctgccctaggatatgccctcctggtgactcgggggctgtctcagacgactagcccaggacccatctttctcacacggatttagtcccaccctatggccactggccgtatctgagggctgctccccttttagaatttacctcttatgagctccatgttgcttcactctatccaaagtgtcacttggtgcataagcacagaaatctgaaaaatggccatgttgtctttttttttttttttttttaatgccaagattgacaggttggccgtttgcttaatgccagaagttgggggaaagttacacttttctaagaataatggactcttaaggcattgagggctctaaacaggattctttaatcatggagcaagagaatttcaaggcaggggattttatcccccaccaaaaacacagtgaaaggcctgcttttgtgtcccattcacatgccctcggtcactgagtctggagtgaaccacgggttgaggaagtcaggctgttggcgtgtcccagcaccacaccatccctaaagtgccaggtgatctcctgtggctcatcggtggaagcagtggggtaggctgctgccctgctgtggaagaggagcaacaatcagacatgagtccaccctttggagaccaggcctcagctcttggtgggcccagggacacccacacaggtggccatcacagccccatggacaacactaattgtccacagcaaagggcaaggaatcctctgggagcttcttccgtttcttcccccaagatacccatcttgaaaaacactatttctggaatgcttctgcatcaaaggagattctttgagatagcccatcttcctgagctagcaaatacaggagttttcactttctttaggaaagagaagctttcaggggaaggagagaatgattttgctgacttcccaagccctggtgaccagaccaaggcagggcccagcataattcctccagttggatgaacattcaagagagctcgttcctacctggctggagaccgaggccagaaggcaaaaaccagaaagggaacagtccataacttacctctgcttctgaccgatggtgtttgggaataggttactttggactgagtttgggttctttgctgtcctaagaactttagtgtagagaaaataagacttctggtgctgctggggtatgttctgggcttaattcccccaagcagaagaccagatccaagatgtttggacaccctgtcagacgttggtcccaagtttaattagatttctgaatctcgttgaggccaaggaatgatccatactgaaaaaatgctgagccagccatctttggcaaaggtccctgagctcttgctatctctcaagagtgctgagaaccacggtgaaagtgctgctctaggcccacaagtgtaactatgctgttaacagctgtcaatagataattaaaattcatactgtatg

SEQ ID NO: 13708 - DNA, 1925 bp, Homo sapiens
ggtccattcgggaattactgcccagcagccgactaagttgcattccttgaatcttcgcagaaaagacaattcttttaatcagagttagtaatgtggacagtacaaaatcgagagagtctggggcttctctctttccctgtgatgattaccatggtctgttgtgcacacagcaccaatgaacccagcaacatgccatacgtgaaagagacagtggacagattgctcaaaggatatgacattcgcttgcggccggacttcggagggccccccgtcgacgttgggatgcggatcgatgtcgccagcatagacatggtctccgaagtgaatatggattatacactcaccatgtatttccagcagtcttggaaagacaaaaggctttcttattctggaatcccactgaacctcaccctagacaatagggtagctgaccaactctgggtaccagacacctactttctgaatgacaagaaatcatttgtgcatggggtcacagtgaaaaatcgaatgattcgactgcatcctgatggaacagttctctatggactccgaatcacaaccacagctgcatgtatgatggatcttcgaagatatccactggatgagcagaactgcaccctggagatcgaaagttatggctataccactgatgacattgaattttactggaatggaggagaaggggcagtcactggtgttaataaaatcgaacttcctcaattttcaattgttgactacaagatggtgtctaagaaggtggagttcacaacaggagcgtatccacgactgtcactaagttttcgtctaaagagaaacattggttacttcattttgcaaacctacatgccttctacactgattacaattctgtcctgggtgtctttttggatcaactatgatgcatctgcagccagagtcgcactaggaatcacgacggtgcttacaatgacaaccatcagcacccacctcagggagaccctgccaaagatcccttatgtcaaagcgattgatatttatctgatgggttgctttgtgtttgtgttcctggctctgctggagtatgcctttgtaaattacatcttctttgggaaaggccctcagaaaaagggagctagcaaacaagaccagagtgccaatgagaagaataaactggagatgaataaagtccaggtcgacgcccacggtaacattctcctcagcaccctggaaatccggaatgagacgagtggctcggaagtgctcacgagcgtgagcgaccccaaggccaccatgtactcctatgacagcgccagcatccagtaccgcaagcccctgagcagccgcgaggcctacgggcgcgccctggaccggcacggggtacccagcaaggggcgcatccgcaggcgtgcctcccagctcaaagtcaagatccccgacttgactgatgtgaattccatagacaagtggtcccgaatgtttttccccatcaccttttctctttttaatgtcgtctattggctttactatgtacactgaggtctgttctaatggttccatttagactactttcctcttctattgttttttaaccttacaggtccccaacagcgatactgctgtttctcgaggtaagagattcagccatccaattggttttaggtcttgcatatcagttttattactgcaccatgtttacttcaaaaagacaaaacaaaaaaaaaattatttttccagtctaccgtggtccaggttatcagctctttaagagctctattaattgccatgtttacaaacaaacacaaagagagaagttagacaggtagatctttagcagtcttttctagtttccctggatttcactgatttattttttagggaaaatgaaaagaggaccttgctgtccgcctgcactgcttcctggtaaactataacaaacttatgctgcc

SEQ ID NO: 13709 - DNA, 3794 bp, Homo sapiens
atgcccaccatgcggaggaccgtgtcggagatccgctcgcgcgccgaaggttatgagaagacagatgatgtttcagagaagacctcactggctgaccaggaggaagtaaggactattttcatcaaccagccccagctgacaaaattctgcaataaccatgtcagcactgcaaaatacaacataatcacattccttccaagatttctctactctcagttcagaagagctgctaattcattttttctctttattgcactgctgcagcaaatacctgatgtgtcaccaacaggtcgttatacaacactggttcctctcttatttattttagctgtggcagctatcaaagagataatagaagatattaaacgacataaagctgataatgcagtgaacaagaaacaaacgcaagttttgagaaatggtgcttgggaaattgtccactgggaaaaggtggcagtaggggagatagtgaaagtgaccaatggggaacatctcccagcagatctcatcagtctgtcctcaagtgagccccaagccatgtgctacattgaaacatccaacttagatggtgaaacaaacttgaaaattagacagggcttaccagcaacatcagatatcaaagacgttgacagtttgatgaggatttctggcagaattgagtgtgaaagtccaaacagacatctctacgattttgttggaaacataaggcttgatggacatggcaccgttccactgggagcagatcagattcttcttcgaggagctcagttgagaaatacacagtgggttcatggaatagttgtctacactggacatgacaccaagctgatgcagaattcaacaagtccaccacttaagctctcaaatgtggaacggattacaaatgtacaaattttgattttattttgtatcttaattgccatgtctcttgtctgttctgtgggctcagccatttggaatcgaaggcattctggaaaagactggtatctcaatctaaactatggtggcgctagtaattttggactgaatttcttgaccttcatcatccttttcaacaatctcattcctatcagcttattggttacattagaagttgtgaaatttacccaggcatacttcataaattgggatcttgacatgcactatgaacccacagacactgctgctatggctcgaacatctaatctgaatgaggaacttggccaggttaaatacatattttctgacaaaactggtactctgacatgcaatgtaatgcagtttaagaagtgcaccatagcgggagttgcttatggccatgtccctgaacctgaggattatggctgctctcctgatgaatggcagaactcacagtttggagatgaaaaaacatttagtgattcatcattgctggaaaatctccaaaataatcatccaactgcacctataatatgtgaatttcttacaatgatggcagtctgtcacacagcagtgccagagcgagaaggtgacaagattatttatcaagcagcatctccagatgagggagcattggtcagagcagccaagcaattgaattttgttttcactggaagaacacccgactcggtgattatagattcactggggcaggaagaaagatatgaattgctcaatgtcttggagtttaccagtgctaggaaaagaatgtcagtgattgttcgcactccatctggaaagttacgactctactgcaaaggagctgacactgtaatttatgatcgactggcagagacgtcaaaatacaaagaaattaccctaaaacatttagagcagtttgctacagaagggttaagaactttatgttttgctgtggctgagatttcagagagcgactttcaggagtggcgagcagtctatcagcgagcatctacatctgtgcagaacaggctactcaaactcgaagagagttatgagttgattgaaaagaatcttcagctacttggagcaacagccattgaggataaattacaagatcaagtgcctgaaaccatagaaacgctaatgaaagcagacatcaaaatctggatccttacaggggacaagcaagaaactgccattaacatcggacactcctgcaaactgttgaagaagaacatgggaatgattgttataaatgaaggctctcttgatggaacaagggaaactctcagtcgtcactgtactacccttggtgatgctctccggaaagagaatgattttgctcttataattgatgggaaaaccctcaaatatgccttaacctttggagtacgacagtatttcctggacttagctttgtcatgcaaagctgtcatttgctgtcgggtttctcctcttcaaaaatctgaagttgttgagatggttaagaaacaagtcaaagtcgtaacgcttgcaatcggtgatggagcaaatgatgtcagcatgatacagacagcgcacgttggtgttggtatcagtggcaatgaaggcctgcaggcagctaattcctctgactactccatagctcagttcaaatatttgaagaatttactgatgattcatggtgcctggaactataacagagtctccaagtgcatcttatactgcttctacaagaatatagtgctctatattatcgagatctggtttgcctttgttaatggcttttctggacagatcctctttgaaagatggtgtataggtctctataacgtgatgtttacagcaatgcctcctttaactcttggaatatttgagagatcatgcagaaaagagaacatgttgaagtaccctgaattatacaaaacatctcagaatgccctggacttcaacaccaaggttttctgggttcattgtttaaatggcctcttccactcagttattctgttttggtttccactaaaagcccttcagtatggtactgcatttggaaatgggaaaacctcggattatctgctactgggaaactttgtgtacacttttgtggtgataactgtgtgtttgaaagctggattggagacatcatattggacatggttcagccacatagcgatatgggggagcatcgcactctgggtggtgttttttggaatctactcatctctgtggcctgccattccgatggcccctgatatgtcaggagaggcagccatgttgttcagttctggagtcttttggatgggcttgttattcatccctgtggcatctctgctccttgatgtggtgtacaaggttatcaagaggactgcttttaaaacattggtcgatgaagttcaggagctggaggcaaaatctcaagacccaggagcagttgtacttggaaaaagcctgaccgagagggcgcaactgctcaagaacgtctttaagaagaaccacgtgaacttgtaccgctctgaatccttgcaacaaaatctgctccatgggtatgcgttctctcaagatgaaaatggaatcgtttcacagtctgaagtgataagagcatatgataccacgaaacagaggcccgacgaatggtgatggggagagcctgaaaggcaggctctgttacctctctaaggagagctaccaggttgtcaccgcagtctgctaaccaattccagtctggtccatgaagaggaaaggtagatctgagctcatctcgctgatggacattcagattcatgtatattatagacataagcactgtgcaactgtactgtaacaccatctcttttggatttttttaaggtatttgctaagtctttgtaaacggaaattgaaaatgacctggtatcttgccagagggctttcttaaacggagaataagtcagtattcg

SEQ ID NO: 13710 - DNA, 2835 bp, Homo sapiens
gtacagaagcaaaatcaaacctgctatttcagcactcctgtttttaacttggtgtctttagtgcttggattggtgggatgtttcggaatgggcattgtcgccaattttcaggagttagctgtgccagtggttcatgacgggggcgctcttttggcctttgtctgtggtgtcgtgtacacgctcctacagtccatcatctcttacaaatcatgtccccagtggaacagtctctcgacatgccacatacggatggtcatctctgccgtttcttgcgcagctgtcatccccatgattgtctgtgcttcactaatttccataaccaagctggagtggaatccaagagaaaaggattatgtatatcacgtagtgagtgcgatctgtgaatggacagtggcctttggttttattttctacttcctaactttcatccaagatttccagagtgtcaccctaaggatatccacagaaatcaatggtgatatttgaagaaagaagaattcagtctcactcagtgaatgtcgcaggccatttctaaaagtgctacagaggacagacagggttttgaggccaccctgattattgggatgcatctgcagcacatccaggacttgaatttcattacgagttcctaatagttgtatttctaaagatgtgtttcctagagaatgtacagccttatgacactgtagtgatgtttttataattttctaagtagatttttttatattaacaaattcatatacagaaaaaataaggtgttacaaaaaatggagagctcttatttttgtacagattctgtcgtttttttttatttgtgtgagatttatggaaatacactaaatgagtaattcaggttcagtacatttattacaaagtgaaatcaggggatattcatttgtaaattttattcttagtgaatgaactgtataattttttttatcaggagagcacttataaaattcaatttataaagatcatatacccaaatcataaagatttagttgatacattaacactaagatactctgatttttagcgaactaaacaaagtgcttctactgagaggcctttataccaccatgtacagtaactctaagtgaatacggaagaccttggttttgaaattctgccaccttgtttctccctgctcatgaggtcgcaccttttgctcttgctgctaattgcccattcgtagtgggtgtaatgccaggtggaatggtttcaacaagtcaggtgaaaaccatcctttattgttgctggcacaacttgatatatagtctgactcagaactgaagctcacatctcaaattcatttcatgccagtaaatgtggcaaagagaagaaaggcccaagagcgagacaagaagaatggagaagggggcagccaagaagaacttctgggttcagggtactgtttatttgctccttctcttcatgcctgtggctggatgtcccacaacactataagaaatataagtcaagccctttgtgttaagcaagaactacagactccatcttttcacccaaatcatgaatgaccaataaaaagcaagttattccagaggaagaagcagcccttgaaatgttaaggcttaggcttgaaaggtgaagagcaggaattctctctttcaaatcctagagcataaacccatgtgtggccaagtgagatcagccctcaagggcacatgccaagggcagagcagcccatgtagacagcttcggagggcatgggggtgtagggagttcggggtagctcctcattaactatttgttgggtgagtaaaggggtgaggctcagtggcaggtacctctgcaatgacaagctgcctcccctctatgtgtttagcatatgttattagaacatgtccgacacccctaccgctgccatttgggccctttaataaagccaagtagagaaatctggcaataaaaggcaaatgtaagcatgctttctttaagacgcatcataaatggttttctttaagtgaatggaagagtttgacagagatacacctttgtaagaaaacattaagaatgctggctggctgtggtggctcacacctgtattcccagcactttgggaggcctaggcaggaggattgcttgagcctgggacttcgagaccagactgggaaacatggcaaaatcccatctctacaacaaaaatacaaaaattagccaagtgcggtggtgtgcctgtagtcctagttacttgggaggctgaggtgggagaatcacctgagcccaggaggtggaggctgcagtgagccatgccaatgcactccagtctgggcaacagagtgagaccctgtctcaaaaataaataaataaataaatgaataaagagaatgctaatcatttctgggttcactgcgactcactgtagtgctggggatcccccttgtaacactggaactgaaaggcagtgatgaaagctatgtcaagcattcattattctgaagaggaggagaaatgccacatacctttcccatgggacctgtggtggaatgaatccatacttctgcctcacttcgagcagacttttgttctcggcgctcctcacgatggagtttcatgcttcattttcacatctctctgcacaattagattgggagctccttgagggcagagtacgtgccttaatctttatctttgtaatgccacaatgaacagagtgcctcctggtacactgtaggagcttaagaaatactcactgaatgcatgaatgaatgaatgaacaaatgaaggaatgactaaggatgtttgtagtgctataatatagaatgggatttactctgctttaccagttagtttcataataaacaaatagtctgt

SEQ ID NO: 13711 - DNA, 3920 bp, Homo sapiens
gtgggccgctcccctctgggaggagggctgcccagaggggtgcgggtgtcgctagcggcccctccccgtgtggggccacgtggcgggtgcgggccgagcccgaggggaagaacctggcccgtggggaggtgggggggaccgaaacggcgctgagccgagccgagagctacggggttcggagcagaggcagcggcagcggcagcggcagtaagagggaggggaggaggcaggagggcgcatggggcgccccggcccctccgacagcgcgccccctccggcccggccgcgctgaaagctccccagcgccgcgccttgaacccacgccccggggccatgccggtcatgaaggggttgctggccccgcaaaacaccttcctggacaccatcgccacccgttttgacggaacgcacagcaacttcctgctggccaacgcacagggcacacggggctttcccatcgtctactgctccgacggcttctgcgagctcacaggctacggtcgcaccgaggtcatgcagaagacctgcagctgccgtttcctctacggcccagagaccagtgagccagccctgcagcgtctgcacaaagccctggagggccaccaggagcaccgggctgaaatctgcttctaccgcaaggatggctcagccttttggtgcctcctggacatgatgcccatcaagaatgagatgggggaggtcgtgctgttcctcttttccttcaaggatatcactcagagtggaagcccaggacttggcccccaaggaggccgcggggacagtaatcacgaaaactcccttggtagaaggggagccacctggaaatttcggtctgccagaagacggagccgtactgtcctacaccgactgaccggccactttggccgccggggccagggaggcatgaaggccaataataacgtgtttgagccaaagccatcagtgcccgagtacaaggtggcctccgtgggggggtctcgctgcctcctcctccactacagcgtctccaaggccatctgggacggccttatcctccttgccaccttctacgttgcggtcaccgtcccctacaatgtctgtttctcgggtgacgatgacacccccatcacttcgcgacacacccttgtcagcgacatcgccgtggaaatgctcttcatcctagatatcatcctgaacttccgcaccacctatgtgtcccagtccggccaggtaatctctgctcctcgttccattggcctccactacctggccacctggttcttcatcgaccttattgctgctctgccctttgacctgctttacatcttcaacatcaccgtgacctcgctggtgcacctactgaagacagtgcggctgttgcggctgctgcggctgctgcagaagctggagcggtactctcagtgcagtgctgtggtgctcacgctgctcatgtcggtctttgcgctccttgcccactggatggcctgcatctggtatgtcatcgggcgccgggagatggaggccaatgacccgctgctctgggacattggctggttgcatgagttgggcaagcgtctggaggtgccctatgtcaatggctcggtgggcggcccatcacggcgcagcgcctacatcgcggcactgtacttcactctaagcagcctcaccagtgtgggctttggcaacgtgtgtgccaacaccgacgcggagaagatcttctccatctgcacgatgctcataggcgccctgatgcacgctgtggtgttcgggaacgtgacagccatcatccagcgcatgtactcgcgccgctcgctctaccacagccgcatgaaggacctcaaggacttcatccgtgtgcaccgcctgccgcggccgctcaagcagcgcatgctcgaatacttccagaccacgtgggccgtcaacagcggcatcgacgccaacgagttactgcgtgacttcccagacgagctgagagctgacattgctatgcacctgaatcgggagatcctgcagctgccgttgttcggggcagcgagcaggggctgcctgcgggccctatcgctgcacatcaagacctcgttctgcgctccgggcgagtacctgttgcgccgtggggatgccctgcaggcacattactatgtctgctccggctcgcttgaggtgctccgagacaacatggtgctggccatcctggggaagggggacctgattggagcagatatccctgagccggggcaggagcctgggttgggagcagacccaaacttcgtgctaaagaccagtgctgatgtgaaagctctgacctactgtggcctgcagcagctgagcagccgagggctggctgaggtcctgaggctctatcctgagtatggggctgccttccgggctggcctgccccgggacctcaccttcaacctgcgccagggctctgacaccagtggcctcagccgcttttcccgatcccctcgcctctcccagccccgctcagaaagcctcggctcctcctcagacaagacgctgccatccatcacagaggccgagagtggcgcggagcctgggggtggtcccaggccccgacggcccctcctgctgcccaacctcagcccagcacggcctcggggctccctggtcagccttttgggcgaggagctgcccccattctcagcccttgtctcctctccttccttatccccatccctgtcccctgccctggctggccagggccacagtgcctcccctcacggcccccccaggtgctctgctgcctggaagccccctcagcttctcattcccccactgggaacctttggacctccggacctcagtccccggatagtggatggcattgaggactctggcagcacagctgaggccccttcattccgattcagcaggaggcctgaactgccaaggccccgctcccaggcgccccctacagggaccaggcccagcccagaattggccagtgaggctgaggaggtgaaggaaaaggtttgccggctgaaccaggagatctctcgtctcaatcaggaggtgtctcagcttagccgggagctgcggcacatcatgggcctgctgcaggccaggctgggtcccccaggccacccagcaggctccgcttggaccccagaccctccttgtccacagctgaggccaccatgcctctctccttgtgcgtccagaccaccacccagcctccaggatactacgcttgctgaagttcactgcccagccagtgtggggaccatggagacagggactgcgctcctggacttgagaccttccatattgcccccctacccctcagagcctgaccctctgggaccctctccagtgccagaggcctcacccccaaccccaagcctcttgaggcacagtttccagtccaggtcagacacgttccactgaccctggcccagggcccaggcctgtctggggtgggcgctgccgctcaccactcagggaggacctgggccccttggcttcctgccttggggtcagcagccaccagctggcctggttggctctggatttctggactttttaatgaagcgtggttacctctgacgctattcccttttccaagccttccccaacctccccctctgtgaggggagccacctgagggctgtggaacccagcaggcatgagatgaaccgcagtgcccattgggctgggcagatgagatcctactttctccccaggacctggaggcaggctgtctctcaaggtggtcttttctgctgctagcaactcaaaaatcccaacagcactccctatcctttccctgaccccagaccgctgccaagcctgttctcccccattacaacatggtctcactcagggcctggactgctccaaaactcgcccaggtctccagctctcctctaccccccaacaccctgggctcacttttggataggaaataaactctttatttt

SEQ ID NO: 13712 - DNA, 1014 bp, Homo sapiens
atgctagggagatgttttcctccagacaccaaagagaagcaacagctcagaatgactaaactctgcgatcctgcagaaagtgaattgtcgccatttctcatcaccttaattttagcagttttacttgctgaatacctcattggtatcattgcaaatggtttcatcatggctatacatgcagctgaatgggttcaaaataaggcagtttccacaagtggcaggatcctggttttcctgagtgtatccagaatagctctccaaagcctcatgatgttagaaattaccatcagctcaacctccctaagtttttattctgaagacgctgtatattatgcattcaaaataagttttatattcttaaatttttgtagcctgtggtttgctgcctggctcagtttcttctactttgtgaagattgccaatttctcctacccccttttcctcaaactgaggtggagaattactggattgataccctggcttctgtggctgtccgtgtttatttccttcagtcacagcatgttctgcatcaacatctgcactgtgtattgtaacaattctttccctatccactcctccaactccactaagaaaacatacttgtctgagatcaatgtggtcggtctggcttttttctttaacctggggattgtgactcctctgatcatgttcatcctgacagccaccctgctgatcctctctctcaagagacacaccctacacatgggaagcaatgccacagggtccaacgaccccagcatggaggctcacatgggggccatcaaagctatcagctactttctcattctctacattttcaatgcagttgctctgtttatctacctgtccaacatgtttgacatcaacagtctgtggaataatttgtgccagatcatcatggctgcctaccctgccagccactcaattctactgattcaagataaccctgggctgagaagagcctggagcggcttcagcttcgacttcatctttacccaaaagagtggactctga

SEQ ID NO: 13713 - DNA, 4685 bp, Homo sapiens
gggagcgcggggagcgcgggccggcggcggcgagggaggacgggggcgcagacggccggcgcgcggcgcggctaccatgggcgtgcggtgagcagccgctcgggacgacttcctcggctgcgcggcgctcgcgcggagctccccggccggcggtgcgtccccacggtcaccatgaaagacgacttcgcagaggaggaggaggtgcaatccttcggttacaagcggtttggtattcaggaaggaacacaatgtaccaaatgtaaaaataactgggcactgaagttttctatcatattattatacattttgtgtgccttgctaacaatcacagtagccattttgggatataaagttgtagagaaaatggacaatgtcacaggtggcatggaaacatctcgccaaacctatgatgacaagctcacagcagtggaaagtgacctgaaaaaattaggtgaccaaactgggaagaaagctatcagcaccaactcagaactctccaccttcagatcagacattctagatctccgtcagcaacttcgtgagattacagaaaaaaccagcaagaacaaggatacgctggagaagttacaggcgagcggggatgctctggtggacaggcagagtcaattgaaagaaactttggagaataactctttcctcatcaccactgtaaacaaaaccctccaggcgtataatggctatgtcacgaatctgcagcaagataccagcgtgctccagggcaatctgcagaaccaaatgtattctcataatgtggtcatcatgaacctcaacaacctgaacctgacccaggtgcagcagaggaacctcatcacgaatctgcagcggtctgtggatgacacaagccaggctatccagcgaatcaagaacgactttcaaaatctgcagcaggtttttcttcaagccaagaaggacacggattggctgaaggagaaagtgcagagcttgcagacactggctgccaacaactctgcgttggccaaagccaacaacgacaccctggaggatatgaacagccagctcaactcattcacaggtcagatggagaacatcaccactatctctcaagccaacgagcagaacctgaaagacctgcaggacttacacaaagatgcagagaatagaacagccatcaagttcaaccaactggaggaacgcttccagctctttgagacggatattgtgaacatcattagcaatatcagttacacagcccaccacctgcggacgctgaccagcaatctaaatgaagtcaggaccacttgcacagatacccttaccaaacacacagatgatctgacctccttgaataataccctggccaacatccgtttggattctgtttctctcaggatgcaacaagatttgatgaggtcgaggttagacactgaagtagccaacttatcagtgattatggaagaaatgaagctagtagactccaagcatggtcagctcatcaagaattttacaatactacaaggtccaccgggccccaggggtccaagaggtgacagaggatcccagggaccccctggcccaactggcaacaagggacagaaaggagagaagggggagcctggaccacctggccctgcgggtgagagaggcccaattggaccagctggtccccccggagagcgtggcggcaaaggatctaaaggctcccagggccccaaaggctcccgtggttcccctgggaagcccggccctcagggccccagtggggacccaggccccccgggcccaccaggcaaagagggactccccggccctcagggccctcctggcttccagggacttcagggcaccgttggggagcctggggtgcctggacctcggggactgccaggcttgcctggggtaccaggcatgccaggccccaagggcccccccggccctcctggcccatcaggagcggtggtgcccctggccctgcagaatgagccaaccccggcaccggaggacaatagtaagtccaagccctccctccagccagggggacagggcagtgcatgtgcttgagactgagccaacccccagtgtgtggccccacccatgttatttttgtttttgtttttgttttgagacagggtctcactctgttgcccaggctggagtgcagtggcgtgatctcggctcactgcaacccccacatcccgggttcaagtgattctcctgccttagcctcccaggtagctgggaatacaagcgtgtgcccccacagccagctaatttttgtatttttagtagagaggggtttcacagtgttgggcagggtggtttcaaacttctggcctcaagtgatccacctacctagtttcccaaagtgctgggaatacaggtgtgaaccaccacgttttgtcccccggctgcatattatttaacagcaaaggcatcataggggttggcacaggagccctgctgccagaacaggcctccataccaggcatgtgtctctctctaaacgccattgggttttttagtgctcatttgttttatgtattatgtgtgtatgtatgggacagggtctcactctgtcacccaggctggaatgacgaagtgaagtagtgcaaacatagctcattgcagctttgacctcctgggcttaggtgatcttcccactcagactcctgcgtagctgggaccacaggggtatgccaccacacctggctaattttttattttcctttttgtagaaacagggtcttgctatgttgcccaggctggtcttgaactcctggcctcaagcaaccctcctgcctcagtcttgcaaagtgctgggattccaggtgggagccactgcacctggctcttgcacttgtttatttataggagccagccctcagaagacaaacacaatgcaaaacatttccttcagggaagcctgctggccgccctgagcgctcttccctcgttttacatcctcactctggagatagatgggctccctcggttagctccatcaacatgtggatggaaccctctgctattgatgactacatttaatttctttttgagaaaggtgttagatgttacggtgccttctagtcttttgataattaaacctttggcaaaactcgaatgtttggttagcaaccaagcctatttttctctcctttgacccaaccgctattctacttgattttggtcggtgaggcccgggttatttttgttgatccgtgagcccatttttggtgctgggttctcacatccaagtgttcctgggttccgtatgattccagactgacgctgaacatctgtgcctgccctgcttcttgttgttgcttctgtcatttctgtcattgtgaagacggatccaaacacagaagaacaaagacccagtccaagatccatccagattatgtggtttcggcttgtgctctgcagtccactttgggtcatgcttgctgcgagcacgtccgtgaacgtcagctgtgggcctcgtgcagggacgctcaggctgctcccagcgggaccacagttttggcctctgaaacacagctgaagaaaggcagagtgctttctgtgatcttttaatcaatgttttccacttttgcattcctaggctgcccgcctcactggaagaacttcacagacaaatgctactatttttcagttgagaaagaaatttttgaggatgcaaagcttttctgtgaagacaagtcttcacatcttgttttcataaacactagagaggaacagcaatggataaaaaaacagatggtagggagagagagccactggatcggcctcacagactcagagcgtgaaaatgaatggaagtggctggatgggacatctccagactacaaaaattggaaagctggacagccggataactggggtcatggccatgggccaggagaagactgtgctgggttgatttatgctgggcagtggaacgatttccaatgtgaagacgtcaataacttcatttgcgaaaaagacagggagacagtactgtcatctgcattataacggactgtgatgggatcacatgagcaaattttcagctctcaaaggcaaaggacactcctttctaattgcatcaccttctcatcagattgaaaaaaaaaaagcactgaaaaccaattactgaaaaaaaattgacagctagtgttttttaccatccgtcattacccaaagacttgggaactaaaatgttccccagggtgatatgctgattttcattgtgcacatggactgaatcacatagattctcctccgtcagtaaccgtgcgattatacaaattatgtcttccaaagtatggaacactccaatcagaaaaaggttatcattggtcgttgagttatgggaagaacttaagcatatactgtgtaaacagtgccatacatttctaaaatcccaagtgtaggaaaaatatgcagacatacagatatataggccaactattagtaataatatgaaatatacttaaagagcttttaaaactttgtatttttgtacaaaatatttgtcttttacaatttttttcctttttttttttttgtcattttaccgacataatacatggagccaaagaaaacaataatggtactaataaaaactcctagggtttcctgtcagatttaattctacccagtggcaaagaattttttcaattgtggctttaaaaaaataattaaatatacatgtatatatatat

SEQ ID NO: 13714 - DNA, 3089 bp, Homo sapiens
gggagcgcggggagcgcgggccggcggcggcgagggaggacgggggcgcagacggccggcgcgcggcgcggctaccatgggcgtgcggtgagcagccgctcgggacgacttcctcggctgcgcggcgctcgcgcggagctccccggccggcggtgcgtccccacggtcaccatgaaagacgacttcgcagaggaggaggaggtgcaatccttcggttacaagcggtttggtattcaggaaggaacacaatgtaccaaatgtaaaaataactgggcactgaagttttctatcatattattatacattttgtgtgccttgctaacaatcacagtagccattttgggatataaagttgtagagaaaatggacaatgtcacaggtggcatggaaacatctcgccaaacctatgatgacaagctcacagcagtggaaagtgacctgaaaaaattaggtgaccaaactgggaagaaagctatcagcaccaactcagaactctccaccttcagatcagacattctagatctccgtcagcaacttcgtgagattacagaaaaaaccagcaagaacaaggatacgctggagaagttacaggcgagcggggatgctctggtggacaggcagagtcaattgaaagaaactttggagaataactctttcctcatcaccactgtaaacaaaaccctccaggcgtataatggctatgtcacgaatctgcagcaagataccagcgtgctccagggcaatctgcagaaccaaatgtattctcataatgtggtcatcatgaacctcaacaacctgaacctgacccaggtgcagcagaggaacctcatcacgaatctgcagcggtctgtggatgacacaagccaggctatccagcgaatcaagaacgactttcaaaatctgcagcaggtttttcttcaagccaagaaggacacggattggctgaaggagaaagtgcagagcttgcagacactggctgccaacaactctgcgttggccaaagccaacaacgacaccctggaggatatgaacagccagctcaactcattcacaggtcagatggagaacatcaccactatctctcaagccaacgagcagaacctgaaagacctgcaggacttacacaaagatgcagagaatagaacagccatcaagttcaaccaactggaggaacgcttccagctctttgagacggatattgtgaacatcattagcaatatcagttacacagcccaccacctgcggacgctgaccagcaatctaaatgaagtcaggaccacttgcacagatacccttaccaaacacacagatgatctgacctccttgaataataccctggccaacatccgtttggattctgtttctctcaggatgcaacaagatttgatgaggtcgaggttagacactgaagtagccaacttatcagtgattatggaagaaatgaagctagtagactccaagcatggtcagctcatcaagaattttacaatactacaaggtccaccgggccccaggggtccaagaggtgacagaggatcccagggaccccctggcccaactggcaacaagggacagaaaggagagaagggggagcctggaccacctggccctgcgggtgagagaggcccaattggaccagctggtccccccggagagcgtggcggcaaaggatctaaaggctcccagggccccaaaggctcccgtggttcccctgggaagcccggccctcagggccccagtggggacccaggccccccgggcccaccaggcaaagagggactccccggccctcagggccctcctggcttccagggacttcagggcaccgttggggagcctggggtgcctggacctcggggactgccaggcttgcctggggtaccaggcatgccaggccccaagggcccccccggccctcctggcccatcaggagcggtggtgcccctggccctgcagaatgagccaaccccggcaccggaggacaatggctgcccgcctcactggaagaacttcacagacaaatgctactatttttcagttgagaaagaaatttttgaggatgcaaagcttttctgtgaagacaagtcttcacatcttgttttcataaacactagagaggaacagcaatggataaaaaaacagatggtagggagagagagccactggatcggcctcacagactcagagcgtgaaaatgaatggaagtggctggatgggacatctccagactacaaaaattggaaagctggacagccggataactggggtcatggccatgggccaggagaagactgtgctgggttgatttatgctgggcagtggaacgatttccaatgtgaagacgtcaataacttcatttgcgaaaaagacagggagacagtactgtcatctgcattataacggactgtgatgggatcacatgagcaaattttcagctctcaaaggcaaaggacactcctttctaattgcatcaccttctcatcagattgaaaaaaaaaaagcactgaaaaccaattactgaaaaaaaattgacagctagtgttttttaccatccgtcattacccaaagacttgggaactaaaatgttccccagggtgatatgctgattttcattgtgcacatggactgaatcacatagattctcctccgtcagtaaccgtgcgattatacaaattatgtcttccaaagtatggaacactccaatcagaaaaaggttatcattggtcgttgagttatgggaagaacttaagcatatactgtgtaaacagtgccatacatttctaaaatcccaagtgtaggaaaaatatgcagacatacagatatataggccaactattagtaataatatgaaatatacttaaagagcttttaaaactttgtatttttgtacaaaatatttgtcttttacaatttttttcctttttttttttttgtcattttaccgacataatacatggagccaaagaaaacaataatggtactaataaaaactcctagggtttcctgtcagatttaattctacccagtggcaaagaattttttcaattgtggctttaaaaaaataattaaatatacatgtatatatatat

SEQ ID NO: 13715 - DNA, 9001 bp, Homo sapiens
atggccgaggaggcagcccagaacatttctgatgaccaggaaaggtgtctccaggctgcctgctgcctttcctttggtggtgagctgtctgtgagcactgacaagagctggggtcttcatctgtgcagctgtagccctcctggaggtggattgtgggtcgaggtctatgctaatcatgtgcttcttatgagtgatgggaagtgtggctgtccttggtgtgctctgaatggaaaggcagaagaccgggaatcacagagcccatcctcatcagcttccaggcagaagaacatttggaaaacaactagtgaagcagcgttaagtgttgttaatgaaaaaacacaggctgttgttaatgaaaaaacacaggcgcctctggattgtgataacagtgctgatagaattccccacaaacctttcattataatcgcaagggcctggagcagtggtggccccaggttccatcacaggcggctgtgtgctactgggaccgcagacagcacattctctgctcttctccagctccagggcaccacttctgcagcagctccctgcagcctgaagatggaggcttcctgctgtgtcctgagactgctgtgctgtgcggaggatgtggccacggggctgcttcctgggactgtcacgatggagacccccaccaaggtggccagacccactcagaccagctcccagcgagtgcccctgtggccgatttcacattttcccacttctcccagaagctcccacggccttccgcctggcattcctcgcacccccagcttcacggcatcgcagtctggttctgagatcctctatccccctactcagcatcctcctgtggccatcctagctcgaaattctgataacttcatgaaccctgttcttaattgctccctggaagtggaagctcgggcacctccaaatctgggattccgtgttcatatggcttctggagaggctctctgtctgatgatggatttcggggacagttctggggttgaaatgaggctacacaacatgtctgaggcaatggcggtgactgcctaccaccagtactcaaaaggtattttttttcatcttttacattttcagttggatatgtccacctacaaagaagcagagacacaaaatacaactttaaatgtttacttgtgccaaagtgaaaacagctgcctggaagactcagaccccagtaaccttggatatgagcttatttctgcctttgtcaccaaaggagtctatatgctcaaggctgttatttataacgagtttcatggaaccgaagtggagcttgggccttattatgtggagattggccatgaggccgtgtctgcgttcatgaactccagcagtgtccatgaagatgaagtgcttgtctttgctgactcccaagtgaatcagaaaagcactgtggttatacatcactttccatctattccttcatataacgtgtcctttatttctcagactcaagtgggtgacagccaggcttggcacagcatgactgtctggtataagatgcaatccgtctctgtctacacaaatggaactgtgtttgccacagacacagacattacatttacagctgttaccaaggaaacaatacccctggaatttgagtggtattttggagaggatccaccagtgaggacaacttcaagaagcattaaaaaaagactcagcatcccccaatggtatcgtgtgatggttaaggcttccaacaggatgagcagtgtggtctctgagccccatgtcatcagggtgcagaagaaaattgtggccaatcggctcacgtccccctcctcagctctggtaaatgccagtgtggcctttgagtgctggatcaacttcggcacagatgttgcctacctgtgggactttggggatggcaccgtcagcctggggagcagctccagcagccatgtctacagtagggaaggagaatttacagtggaggtccttgccttcaataatgtcagtgcctccactctaagacagcaacttttcatcgtgtgcgagccctgccagccacccctggtgaagaacatggggcctgggaaagtccagatatggaggtctcagcctgtgaggctgggagtgacgtttgaagctgcagtcttctgtgatatttcccaaggtctttcttacacctggaacttgatggactctgaagggctccctgtctccctccctgctgctgtggacactcacagacagaccctcatcctcccgagccacaccttggagtatgggaactacactgcccttgccaaggttcagattgaaggcagtgtggtgtacagcaactactgtgtgggcctggaggtgcgagcccaggcccctgtcagtgtgatctccgagggcacacacctattcttctccaggaccacctcatcccccattgtcctcagagggacccagtccttcgaccctgacgaccctggggcgactctcaggtatcactgggaatgcgccaccgctggctccccagcacatccctgcttcgactcctccactgcacaccaactggatgccgcggctcccactgtttcctttgaggcacaatggctcagtgacagctatgatcagttccttgtgatgctgagggtctccagtggtggccggaactcttctgagacccgggtgttcctgtccccctaccctgactcggcgttcagattcgtccacatctcctgggtcagctttaaagacaccttcgtcaactggaatgacgaactctctcttcaagctatgtgtgaggactgcagtgaaataccgaatctgtcttattcctgggatctctttttagtcaatgcaacagaaaagaataggatagaagttcccttctgcagagtagtggggctgcttggctcgctgggactcggtgccatttcagagtcatcacagttaaacctgctgcccactgagcctggcactgcagatcctgatgcaacgaccacaccattctcacgggaaccttcacccgtgacccttggccaacctgccacttcagctccaaggggaacccccacagagcccatgactggagtctactggattcctcctgcgggggactctgcagtcctgggggaggctccagaggaaggttcactagacctagagccagggccacagagcaagggatccctgatgactggccgctctgagagaagtcagcccacccacagccctgaccctcacctctctgattttgaagcctattacagtgacattcaagaagcaataccatcgggaggaagacagccagctaaggacaccagctttccaggatcaggacctagcttgagtgccgaggagagccctggagatggggataacctggtggacccctccctgtctgcaggcagagccgagcctgtcctcatgattgactggcccaaggccctgctgggtcgagcagttttccaaggctattcatcctcaggtattacagaacagacagtgacaatcaagccatactctctgagcagtggagagacgtacgtcctgcaagtgtctgtggcttcgaagcatggcttactgggtaaagctcagctgtacttgacagtcaacccggctcctcgggacatggcctgtcaggtgcagccccaccatggtctggaagcacacaccgtcttcagtgtcttctgcatgtctggaaaaccggacttccattatgaatttagttaccagataggaaacacctccaaacacactttgtaccatgggagagacacccagtattattttgtgttgccagctggtgagcacttggacaattacaaagtcatggtttccactgaaatcacagatggcaaaggctccaaggtccagccgtgcactgtggtggtgactgtgctgccccgctaccatggaaatgactgtctgggcgaggacctgtataattccagcctgaaaaacctttctaccctccagctgatggggagttacacagaaatcaggaactacatcactgtgatcaccagaatcctgagtcgtttgtctaaggaggacaaaactgcctcctgcaaccaatggtcacgaatacaggatgcattaatttcttcagtatgcagattggcttttgtagatcaggaagaaatgattggttctgttcttatgttgagggacctcgtgagcttctctaataagctaggctttatgagtgcggttctcatcctcaagtacacccgggcactccttgctcaaggccagttctcggggccatttgtgattgacaaaggagtgaggcttgagctcatcggtctcatatccagagtctgggaagtctctgagcaagaaaactcgaaggaggaagtctatcgacatgaagaaggaattacagtcatctcagatttattgttgggttgtctctctttgaaccatgttagcactgggcagatggagttccggacccttcttcattacaaccttcagagctctgtccagagcctgggatctgtccaggtgcatttacctggtgaccttgctgggcacagtcctgctggggcggagacacagagcccatgctacattagccagctcatactcttcaagaagaacccatatccagggagccaagctcctgggcagattggtggagttgtgggcctcaacctctatacctgctccagcagaagacccatcaacaggcaatggctaaggaaacccgtgatggtcgagtttggggaggaggatggcctggataataggagaaataaaacgacatttgtattacttcgggataaagtgaatctccatcagttcactgagctttccgaaaacccccaggaatctctacagatagaaattgaattttccaaacctgttacaagggcatttcccgtcatgttgctagtaagattctctgagaaacctactccctctgattttcttgtgaagcagatctacttctgggatgagtcaattgtgcagatttatatacctgctgcttctcagaaagatgccagtgtaggctatttatccttattggatgctgactatgacagaaaacctccaaacagatatttagctaaggcagtgaactatacagtacatttccagtggatccgatgcctgttttgggacaagagagagtggaaatctgaacgtttctctccacaaccagggacttctcctgaaaaagtgaactgcagctaccatcgcctcgcggcattcgctctcctaaggagaaagctgaaggccagttttgaagtgagtgacatttccaagctacagagccacccagaaaacttgcttcccagtatttttattatgggttctgtgattctttatggatttttggtcgctaaaagtagacaagtagatcatcatgaaaaaaagaaagctggttacatctttctgcaagaagcttccctgccgggccatcagctatatgcggtcgtcattgacactggcttccgagctccggccaggttgacctcaaaggtgtacattgttttatgtggcgacaatggactgtcagaaaccaaggagctctcctgtccagagaagcccctgtttgaaaggaattccagacacacctttatcctgagcgctcctgcccaactgggcctgctgaggaagatccgcctctggcacgacagccgtgggccttccccaggctggttcatcagccacgtgatggtgaaggagctgcacacgggacagggctggttcttccctgcccagtgctggctgtctgccggcaggcatgatggtcgcgtggagcgggagctcacctgtctgcaagggggactcggcttccggaagcttttctattgcaagttcacagagtacctggaggatttccatgtctggctgtcggtgtacagcaggccctcctccagccgctacctgcacacgccgcgcctcaccgtgtccttctccctgctgtgcgtctacgcgtgtctcactgccctggttgctgctggagggcaagagcagccccacttggacgtcagccccacccttggatccttcagggtgggtctcctgtgtaccctcctggcttctccaggggcccagctcttgtccctgctcttcaggctcagcaaggaagccccggggtctgcccgagtggagccacacagcccacttagaggaggagcacagaccgaggcaccccatggtcctaattcctggggaaggataccagacgcacaggagccacgcaagcaacctgcatcagccattctctctgggagtggcagggcccaaaggaaggcggcaagtgacaatggcacagcttgtccagcccctaagctgcaggttcatggggctgaccacagcaggacttctctgatggggaaaagccactgctgccctccccacactcaagcacccagcagtggtttggagggactaatgccccagtggtcaagggcccttcagccttggtggagctctgcagtgtgggccatttgtgggaccgcttctttggcctgcagtttggggacaggatttctagcctacaggtttggccaggagcaatgtgtgcagtggctgcacctgctgtccctctccgtggtctgctgtattttcatcacccagccacttatggtatgcctcatggccttgggttttgcttggaaaagaagagctgacaaccacttttttactgagtctttatgtgaggctaccagggatctggactctgaattggcagaacgttcctggactcgcctccccttctcttcaagctgcagtattcctgactgtgcaggcgaggttgaaaaagtcttggctgcccgacaacaagctcgccacctgcgctgggcgcatccaccatccaaggcccagctgaggggcaccagacagaggatgaggagagagagtcgcacacgggctgccctgagagacatttccatggacatcctcatgctgcttctgcttttgtgtgtaatatatgggagattttcccaagatgaatactccctcaatcaagctatccggaaagaatttacaagaaatgccagaaactgcttgggtggcctgagaaacatcgctgactggtgggactggagtctgaccacacttctggatggcctgtacccgggaggcaccccgtcagcccgtgtgccgggggctcagcctggagctcttggaggaaaatgctacctaataggcagttccgtaattaggcagctaaaagtttttcctaggcatttatgcaagcctcccaggccattttcagcactcatcgaagactctattcctacatgtagtcccgaagttggaggccctgagaacccctacctgatagacccagagaaccaaaacgtgaccctgaatggtcctgggggctgtgggacaagggaggactgtgtgctcagcctgggcagaacaaggactgaagcccacacagccctgtcccgactcagggccagcatgtggattgaccgcagcaccagggctgtgtctgtgcacttcactctctataaccctccaacccaactcttcaccagcgtgtccctgagagtggagatcctccctacggggagtctcgtcccctcatccctggtggagtcattcagcatcttccgcagcgactcagccctgcagtaccacctcatgcttccccagctggtcttcctggcactcagcctgatccacctctgtgttcaactctaccgtatgatggacaagggcgtcctcagctactggcgaaagccaaggaactggctggagctctccgtggttggagtgagcctcacctactatgcagtttccggccaccttgttactcttgctggagatgtcactaaccagtttcacagaggactttgccgagcatttatggacctcacccttatggcatcatggaatcagagggctcgatggctccggggaatcctcttattcctcttcacattaaaatgcgtctatcttcctggcattcaaaacacaatggcatcctgctcctccatgatgcgccactcactccccagcatctttgtagcagggctggtgggggcactgatgctggccgccctctcccacctgcaccgatttctgctctctatgtgggttctaccacctggcaccttcacagacgccttccccgggctgctgtttcattttcccagaagaagccaaaaagactgcctccttggcctttccaagtctgaccagcgggccatggcttgttactttgggatccttttaatagtctctgccacactgtgttttggaatgctgagaggttttctcatgactttaccccaaaaaagaaaatcttttcaaagtaaatcttttgtgagacttaaagatgtcactgcttatatgtgggaaaaggtcctcacctttctgagactggaaacaccaaagttggaagaggctgagatggttgagaatcacaattactacttggatgaatttgcaaatctgttagacgaacttctgatgaagattaatggtttgtccgacagcctacaactcccccttctggaaaaaacatccaacaacacaggggaggcaaggacagaagagagtcccttagtggacatttctagttaccaagctgctgagccagcagacatcaaggacttctgaggagcctggtaccttgcataggcactatggaccctgttttgcttaacccacccaacagccaattttagcagacatcctagttttgcaggtgagaagagctgaggtacgaagaagttttgttaatttttccagttcacgtaacaagtaaatgggaaaccaggatgaaaatcaaggtttatctgtcatcagactgttactcataatcaccattcggagagttcagatgtgggacaagattctaactccagccttctcccaaatggttaatttgccagttgccctagagttacatattgtcttatttgtttgttttactgaatctgtctgagtattaaaagccttgtatcttgtgaaatttctttcaggtctcataaaagcgatgaaagagaccaggataacattctaatatttaaataagatttttgaagtaaaatccttattttgtaaattt

SEQ ID NO: 13716 - DNA, 3652 bp, Homo sapiens
gggaggggtgcgaggctagccacgcaggcggggccctgggtcattttaaactctcagagtgaacgtcttgataggaccgacaagacgcatgacatgtacttagaaagcttatcttagagccacactgagattggaacccgcaaaatatgccagggaggaaggtgagcaagggacacgacactcacccggagaaacccagcaagcgcagcgaggctgtggggagaccggagccctgcacaccgccgggggaaggtgggccagcgccaccaccgtggagaacagcgcggaggcaccccacgagatgagacggaactgccgtgagatccagcaatgccaactgtgggtctgacccaggagaacggaaagcagggacgtgaacagccctcctcatgttcttgacaccgtcattctcagcagctcagctaaggcacagaggcagccgagcgtctgtcagcggagtcgtggctgagcagaacacgccacacgccacacgccacacgccacacgtgcaggattgctcaagatggaagggcacagtggaatatatatatatatttatatttttggcgagaccctggaggacacactgaatacaatggaataccatcccgcctttgaaaggaagggaaatcctggcacacgctgcaacaggagggagcttgaggacactgtggtgagtggagcacgtgagacacggaaggacacacgctgaagacacgcagagatgcccacccacgtggggaggtgacaggggagcccagcgcacagagacaaagtggaatggaggcctgggggctgggagcaaatgcggagcgagtgcttcctggggcagagtctccgtttgggaagatgagaaggttctgccgacggatgctggcgatggttgcagaagaatgtgaatgtgcccaatgctactgaaaaacggttacaatggaaacgccaccccagtgaccaccactgccccgtgggcctccctgggcctctccgccaagacctgcaacaacgtgtccttcgaagagagcaggatagtcctggtcgtggtgtacagcgcggtgtgcacgctgggggtgccggccaactgcctgactgcgtggctggcgctgctgcaggtactgcagggcaacgtgctggccgtctacctgctctgcctggcactctgcgagctgctgtacacaggcacgctgccactctgggtcatctatatccgcaaccagcaccgctggaccctaggcctgctggcctgcaaggtgaccgcctacatcttcttctgcaacatctacgtcagcatcctcttcctgtgctgcatctcctgcgaccgcttcgtggccgtggtgtacgcgctggagagtcggggccgccgccgccggaggaccgccatcctcatctccgcctgcatcttcatcctcgtcgggatcgttcactacccggtgttccagacggaagacaaggagacctgctttgacatgctgcagatggacagcaggattgccgggtactactacgccaggttcaccgttggctttgccatccctctctccatcatcgccttcaccaaccaccggattttcaggagcatcaagcagagcatgggcttaagcgctgcccagaaggccaaggtgaagcactcggccatcgcggtggttgtcatcttcctagtctgcttcgccccgtaccacctggttctcctcgtcaaagccgctgccttttcctactacagaggagacaggaacgccatgtgcggcttggaggaaaggctgtacacagcctctgtggtgtttctgtgcctgtccacggtgaacggcgtggctgaccccattatctacgtgctggccacggaccattcccgccaagaagtgtccagaatccataaggggtggaaagagtggtccatgaagacagacgtcaccaggctcacccacagcagggacaccgaggagctgcagtcgcccgtggcccttgcagaccactacaccttctccaggcccgtgcacccaccagggtcaccatgccctgcaaagaggctgattgaggagtcctgctgagcccactgtgtggcagggggatggcaggttgggggtcctggggccagcaatgtggttcctgtgcactgagcccaccagccacagtgcccatgtcccctctggaagacaaactaccaatttctcgttcctgaagccactccctccgtgaccactggccccaggctttcccacatggaaggtggctgcatgccaaggggaggagcgacacctccaggcttccgggagcccagagagcatgtggcaggcagtggggcctcttcatcagcagcctgcctggctggctcccttggctgtgggcaggtagcacgcctgctggcagaggtacctggtggctgccctgttcgcatcagtggcgatgactttatttgcggagcatttctgcaagcgttgcctggatgcggtggtgcattgtgggccctctgggctcctgcctcagaatgtcagtgagcaccatgctggaggtcacccagcactgtggcagcgcccaggagggcatagggcagcctaccacctccaagggggcaggcgccctcatctggggttgggtctgtgctgagctggagggcctctagggaaccgtggggcagggtggccagctgctggctcccagagcgcagcccaggcgtcctcaacggggagccccaaatgtccacgcccagaacaacagttggcaggacaggtgtgacacagccacagcagaggcaaggggtgccaggagtccccagcggcatcctcggggagatgctggtgaggggtccgtacagggtggggtccccacccctagccccttactgaggggggagtgcagcagttggcctgcttgtctggcggagaaagccagctccctgcaccctcggggctgagtcagatctgggtctgccgcaaaggccttgcctagaccaggtcacactgatgccctggtttccctatctgtaaaatggggccaatgacacctacctcactgggtcaccatcgagatcaatcctcctccctgccccgacacctcgggcacatcgcatgcactcagagcacagagccgggcagacgcagcacctgcatggggagcccagtgcccggcacagcacaggggcttccagggaggccgcgcagggccgtggggctgagccacgctctcgttttgtcaggcagctatgcagttgctcttccttgtttttgttttgtttttgtttttgtttttaatatttatttttttagagacagggccttgctctgttgcctgggctggagaacagtggcaccatcatagctcactgcagcctcaaactcctgggctcaagcgatcctccccgctcagcctcctgagtagctgggactacaggtgtgcaccaccacacccagccaaaacagccatcctccccttgagagtcatcagaaaaatacattaggaaaatgtgtttagaaataaaagcacaaggcagggcagtgctcacgcctgtcatcccagcactttgggaggccgagacgggaggatcagttgaggtcaggagtttgagaccagcctcggcaacatggcaaaatcttgtctcttttttttggtattaaaaaaatcataaaaataaaagaaataatgcaaaaaaaaaaaaaaaaaa

SEQ ID NO: 13717 - DNA, 2929 bp, Homo sapiens
agccatttgtgaacctggaggcttgacattcgccagcgcagggccccacaagagaaatttcaatgaaaagaaaagccaatggattgtggtcttagaaaagctgcttagatgatgtctgtttcccgtgctatagacacgtggcagagctgtaagtaaatgctcggcactgcatgatgaattggatggctgcagaccggagacaaaaaaaataattgtctcattttcgtggtgatttgcttaactggtgggaccatgccagaacggctagcggaaatgctcttggatctctggactccattaataatattatggattactcttcccccttgcatttacatggctccgatgaatcagtctcaagttttaatgagtggatcccctttggaactaaacagtctgggtgaagaacagcgaattttgaaccgctccaaaagaggctgggtttggaatcaaatgtttgtcctggaagagttttctggacctgaaccgattcttgttggccggctacacacagacctggatcctgggagcaaaaaaatcaagtatatcctatcaggtgatggagctgggaccatatttcaaataaatgatgtaactggagatatccatgctataaaaagacttgaccgggaggaaaaggctgagtataccctaacagctcaagcagtggactgggagacaagcaaacctctggagcctccttctgaatttattattaaagttcaagacatcaatgacaatgcaccagagtttcttaatggaccctatcatgctactgtgccagaaatgtccattttgggtacatctgtcactaacgtcactgcgaccgacgctgatgacccagtttatggaaacagtgcaaagttggtttatagtatattggaagggcagccttatttttccattgagcctgaaacagctattataaaaactgcccttcccaacatggacagagaagccaaggaggagtacctggttgttatccaagccaaagatatgggtggacactctggtggcctgtctgggaccacgacacttacagtgactcttactgatgttaatgacaatcctccaaaatttgcacagagcctgtatcacttctcagtaccggaagatgtggttcttggcactgcaataggaagggtgaaggccaatgatcaggatattggtgaaaatgcacagtcatcatatgatatcatcgatggagatggaacagcactttttgaaatcacttctgatgcccaggcccaggatggcattataaggctaagaaaacctctggactttgagaccaaaaaatcctatacgctaaaggtagaggcagccaatgtccatattgacccacgcttcagtggcagggggccctttaaagacacggcgacagtcaaaatcgtggttgaagatgctgatgagcctccggtcttctcttcaccgacttacctacttgaagttcatgaaaatgctgctctaaactccgtgattgggcaagtgactgctcgtgaccctgatatcacttccagtcctataaggttttccatcgaccggcacactgacctggagaggcagttcaacattaatgcagacgatgggaagataacgctggcaacaccacttgacagagaattaagtgtatggcacaacataacaatcattgctactgaaattaggaaccacagtcagatatcacgagtacctgttgctattaaagtgctggatgtcaatgacaacgcccctgaattcgcatccgaatatgaggcatttttatgtgaaaatggaaaacccggccaagtcattcaaactgttagcgccatggacaaagatgatcccaaaaacggacattatttcttatacagtctccttccagaaatggtcaacaatccgaatttcaccatcaagaaaaatgaagataattccctcagtattttggcaaagcataatggattcaaccgccagaagcaagaagtctatcttttaccaatcataatcagtgatagtggaaatcctccactgagcagcactagcaccttgacaatcagggtctgtggctgcagcaatgacggtgtcgtccagtcttgcaatgtcgaagcttatgtccttccaattggactcagtatgggcgccttaattgccatattagcatgcatcattttgctgttagtcatcgtggtgctgtttgtaactctacggcggcataaaaatgaaccattaattatcaaagatgatgaagacgttcgagaaaacatcattcgctacgatgatgaaggaggaggggaggaggacacagaggcttttgacattgcaactttacaaaatccagatggaattaatggatttttaccccgtaaggatattaaaccagatttgcagtttatgccaaggcaagggcttgctccagttccaaatggtgttgatgtcgatgaatttataaatgtaaggctgcatgaggcagataatgatcccacggccccgccatatgactccattcagatatatggctatgaaggccgagggtcagtggctggctccctcagctccttggagtccaccacatcagactcagaccagaattttgactacctcagtgactggggtccccgctttaagagactgggcgaactctactctgttggtgaaagtgacaaagaaacttgacagtggattataaataaatcactggaactgagcattctgtaatattctagggtcactccccttagatacaaccaatgtggctatttgttttagaggcaagtttagcaccagtcatctataaactcaaccacattttaatgttgaaccaaaaaaagataataaaataaaaaagtatatgttaggaggttataaatcttgtggagtgtgaattaagtatgtggagtgtctagaagtccttggatatttgatatttacctgaccaccacagacaaagatt

SEQ ID NO: 13718 - DNA, 2530 bp, Homo sapiens
acagactagccaagtggctgagacgagtgtggggtgcgtgactctgcctgcgcgcgcgccagccccgcagctctcgccagagccttgggatcaagggagaaagagaaccggcagctggcctcggactctaagcggtgcgcagctccagcccgagcggatcggccctgaacccacaaaggactcctcgctccttcaagcctccaccacctcgcagccggggaggcaactggagcgaaaccagcgacaggttgttagcgacatgagtacagggtctggatcttacccattcaagagtgtattctcagcacccaatgcctggcatatagtttaaatgtttatttgctacttggctactgattagagaacgcaaaatgaataactcaacaaactcctctaacaatagcctggctcttacaagtccttataagacatttgaagtggtgtttattgtcctggtggctggatccctcagtttggtgaccattatcgggaacatcctagtcatggtttccattaaagtcaaccgccacctccagaccgtcaacaattactttttattcagcttggcctgtgctgaccttatcataggtgttttctccatgaacttgtacaccctctacactgtgattggttactggcctttgggacctgtggtgtgtgacctttggctagccctggactatgtggtcagcaatgcctcagttatgaatctgctcatcatcagctttgacaggtacttctgtgtcacaaaacctctgacctacccagtcaagcggaccacaaaaatggcaggtatgatgattgcagctgcctgggtcctctctttcatcctctgggctccagccattctcttctggcagttcattgtaggggtgagaactgtggaggatggggagtgctacattcagtttttttccaatgctgctgtcacctttggtacggctattgcagccttctatttgccagtgatcatcatgactgtgctatattggcacatatcccgagccagcaagagcaggataaagaaggacaagaaggagcctgttgccaaccaagaccccgtttctccaagtctggtacaaggaaggatagtgaagccaaacaataacaacatgcccagcagtgacgatggcctggagcacaacaaaatccagaatggcaaagcccccagggatcctgtgactgaaaactgtgttcagggagaggagaaggagagctccaatgactccacctcagtcagtgctgttgcctctaatatgagagatgatgaaataacccaggatgaaaacacagtttccacttccctgggccattccaaagatgagaactctaagcaaacatgcatcagaattggcaccaagaccccaaaaagtgactcatgtaccccaactaataccaccgtggaggtagtggggtcttcaggtcagaatggagatgaaaagcagaatattgtagcccgcaagattgtgaagatgactaagcagcctgcaaaaaagaagcctcctccttcccgggaaaagaaagtcaccaggacaatcttggctattctgttggctttcatcatcacttgggccccatacaatgtcatggtgctcattaacaccttttgtgcaccttgcatccccaacactgtgtggacaattggttactggctttgttacatcaacagcactatcaaccctgcctgctatgcactttgcaatgccaccttcaagaagacctttaaacaccttctcatgtgtcattataagaacataggcgctacaaggtaaaatatctttgaaaaagatagaaggtgggcaaggggagcttgagaagaataaaagggataaacgagctcctagttttaaaatctctgccattgcactttatagtctgattacaaaacgtgcaattcaggagcccagcagtgacacacttatcacgcctaggctccagtttgcaaaaattgcaccttataaactgtcagtattaggagcaatgagacaatgaaagaaacatgttgggatcgtggatttaagaaactatacactgtttctcataatctcttgaagaagggcttctgattctacaattttatcagtctctgcacaagaggaataaccttgttccttttttgttacttttgttgttgttgttctcatgtgtccttaagagaaggaaatgccacagttacaaggtaaacatggagacttaaacataaagaaataggcactatacaatggggacataaaaaaagaaaatcaaagaaggatgcagaaattgtctccggagtgttaagcatattttattcttttgttacggtcctatttagaggattggaatgtaataaatgcttattttttgcctttctttttcccaccatgaagagaaagcaaacaaacagaaaccccaactaggtcacaccatttttcttcttgttatgccactattttgtacatccctgttctatattgtttatagggaaaacctacaggactttcactaaagctagccagagacagccatgaaaatggacgtttcacccctc

SEQ ID NO: 13719 - DNA, 2872 bp, Homo sapiens
cggcgctgggagacaccggacgcccgctcggctgcgctgcggctcaggcccccgctcgggcccgacccgctcggtcaccgccggctcgggcgcgcacctgccggctgcggccccagggccatgcggaggcccacgaggaggccggcggccacgcgcatcccgtagcccaggtggcccaggtctgcaccgcggcggcctcggcgccatggagcccccgtattcgctgacggcgcactacgatgagttccaagaggtcaagtacgtgagccgctgcggcgcggggggcgcgcgcggggcctccctgcccccgggcttcccgttgggcgctgcgcgcagcgccaccggggcccggtccgggctgccgcgctggaaccggcgcgaggtgtgcctgctgtcggggctggtgttcgccgccggcctctgcgccattctggcggctatgctggccctcaagtacctgggcccggtcgcggccggcggcggcgcctgtcccgagggctgccctgagcgcaaggccttcgcgcgcgccgctcgcttcctggccgccaacctggacgccagcatcgacccatgccaggacttctactcgttcgcctgcggcggttggctgcggcgccacgccatccccgacgacaagctcacctatggcaccatcgcggccatcggcgagcaaaacgaggagcgcctacggcgcctgctggcgcggcccgggggtgggcctggcggcgcggcccagcgcaaggtgcgcgccttcttccgctcgtgcctcgacatgcgcgagatcgagcgactgggcccgcgacccatgctagaggtcatcgaggactgcgggggctgggacctgggcggcgcggaggagcgtccgggggtcgcggcgcgatgggacctcaaccggctgctgtacaaggcgcagggcgtgtacagcgccgccgcgctcttctcgctcacggtcagcctggacgacaggaactcctcgcgctacgtcatccgcattgaccaggatgggctcaccctgccagagaggaccctgtacctcgctcaggatgaggacagtgagaaggtcctggcagcatacagggtgttcatggagcgagtgctcagcctcctgggtgcagacgctgtggaacagaaggcccaagagatcctgcaagtggagcagcagctggccaacatcactgtgtcagagtatgacgacctacggcgagatgtcagctccatgtacaacaaggtgacgctggggcagctgcagaagatcaccccccacttgcggtggaagtggctgctagaccagatcttccaggaggacttctcagaggaagaggaggtggtgctgctggcgacagactacatgcagcaggtgtcgcagctcatccgctccacaccccaccgggtcctgcacaactacctggtgtggcgcgtggtggtggtcctgagtgaacacctgtccccgccattccgtgaggcactgcacgagctggcacaggagatggagggcagcgacaagccacaggagctggcccgggtctgcttgggccaggccaatcgccactttggcatggcgcttggcgccctctttgtacatgagcacttctcagctgccagcaaagccaaggtgcagcagctagtggaagacatcaagtacatcctgggccagcgcctggaggagctggactggatggacgccgagaccagggctgctgctcgggccaagctccagtacatgatggtgatggtcggctacccggacttcctgctgaaacccgatgctgtggacaaggagtatgagtttgaggtccatgagaagacctacttcaagaacatcttgaacagcatccgcttcagcatccagctctcagttaagaagattcggcaggaggtggacaagtccacgtggctgctccccccacaggcgctcaatgcctactatctacccaacaagaaccagatggtgttccccgcgggcatcctgcagcccaccctgtacgaccctgacttcccacagtctctcaactacgggggcatcggcaccatcattggacatgagctgacccacggctacgacgactgggggggccagtatgaccgctcagggaacctgctgcactggtggacggaggcctcctacagccgcttcctgcgaaaggctgagtgcatcgtccgtctctatgacaacttcactgtctacaaccagcgggtgaacgggaaacacacgcttggggagaacatcgcagatatgggcggcctcaagctggcctaccacgcctatcagaagtgggtgcgggagcacggcccagagcacccacttccccggctcaagtacacacatgaccagctcttcttcattgcctttgcccagaactggtgcatcaagcggcggtcgcagtccatctacctgcaggtgctgactgacaagcatgcccctgagcactacagggtgctgggcagtgtgtcccagtttgaggagtttggccgggttttacactgtccaaaggtctcacccatgaaccctgcccacaagtgttccgtgtggtgagcctggctgcccgcctgcacgcccccactgcccccgcacgaatcacctcctgctggctaccggggcaggcatgcacccggtgccagccccgctctgggcaccacctgccttccagcccctccaggacccggtccccctgctgcccctcacttcaggaggggcctggagcagggtgaggctggactttggggggctgtgagggaaatatactggggtccccagattctgctctaagggggccagaccctctgccaggctggattgtacgggccccaccttcgctgtgttcttgctgcaaagtctggtcaataaatcactgcactgttaaaaaaaaaaaaa

SEQ ID NO: 13720 - DNA, 4423 bp, Homo sapiens
gttactagactctggccgggacaagaggctgaggttaaggtcttagagccgatgacttgcagaatggtcacctcacccacttgtaatttcatggtgggaacaggtggaccccctggaatcagaacctctctgaggacatctgtttttgtgtagacacaggttgcaggttagcaggagaacaggcaagccaaatgcaaaggagccacttcagaaatgtgtcacagaaaagtgaaaatgcaacctagtggtaagtgaagaggggaagaagaaagaaaaaggaccagaaccgtgaactgaagggacagggaacagccagacgagagcttcagccatcacgaggatgatttcggaacctggagaaaatgtaagttaaatatatctacactctgatcctatctcaagagagagatattttactcatttcctggttgtgaatgatgggctcttggaagcactgtctttttagcgcgtctcttatctctgccctgatttttgtatttgtttacaatactgagttatgggagaataaacgttttctgagggcagctctgtccaatgcttcactgttagcagaagcctgtcatcagatttttgaggggaaagttttttacccaacagaaaatgcattgaaaactacccttgatgaagctacctgctatgagtacatggttcgaagccactatgtaacagaaacactctctgaagaagaggctgggttccctttagcttacacagtgaccatccacaaagacttcggcacttttgagaggctcttcagggcgatttatatgccccaaaatgtctactgtgtgcacctggatcagaaggcgacggatgcctttaaaggtgcagtgaaacagttactcagctgcttcccaaatgcttttctggcttccaagaaggagtcggttgtctatggggggatctccaggctccaggctgacctgaactgcctggaagaccttgtggcctctgaagttccctggaagtatgtcatcaacacctgcgggcaagactttcccctgaaaaccaacagggaaatagttcagtatctgaagggatttaaagggaaaaatatcacccccggagtgctgcctcctgaccacgctgttggacggactaaatacgtccaccaagaactgttaaaccacaaaaattcctacgtgattaaaacaacaaaattaaaaactcctcctcctcatgacatggtgatttactttggcacggcctacgtggctctcacaagggactttgctaacttcgtcctccaagaccagctcgcacttgacttactctcctggtccaaggacacctacagccccgacgaacatttctgggtgacactcaacaggattcccggtgttcctggctctatgccaaatgcatcctggactggaaacctcagagctataaagtggagtgacatggaagacagacacggaggctgccacggccactatgtacatggtatttgtatctatggaaacggagacttaaagtggctggttaattcaccaagcctgtttgctaacaagtttgagcttaatacctacccccttactgtggaatgcctagaactgaggcatcgcgaaagaaccctcaatcagagtgaaactgcgatacaacccagctggtatttttgagctattcatgagctactcatgactgaagggaaactgcagctgggaagaggagcctgtttttgtgagagacttttgccttcgtaatgttaaccgtttcaggaccacgtttatagcttcaggacctggctacgtaattatacttaaaatatccactggacactgtgaaatacactaacaggatggctgggtagagcaatctgggcactttggccaattttagtcttgctgtttcttgatgctcacctctatattagtttattgttaggatcaatgataaatttaaatgacctcagatctttgcaccagatactcatcatatacaaatgttttagtaaaaaagagaattgtagataatactgtctaggaaaataagaattaggtttctttgaagaaggaatcttttataacaccttaacagtcaccactgtgctcaaccagacagatagtgaaacagctttctgggtaattcaccaatttcctttaaaacataagctacctgaatggagaatacatcttgtttctgagtttcaacactagcatttttggcttactcatggacaaagttctgtatatagtataaagtcattaacaagaaacaggatatgctttaagacagaattcactgtctgttgcttcagtaaaaggacctcggggaataaaacatttctctcttatatgccagaatgtaggctggtccctatgtcatgtcttccattaagaacactaaaaagtccttgcaagaatggagatatgcattcaagagaggtgctatcacatagatctagtctgaagtctggaacactttcctcttctatgacccctctctccccagtattatcttacttgcaaaatggagaccaaattctatcctgtgaggcttttaattgcaccatagtatgctctgagtagctttacactgcctggtactgatagtagtggctcgatttttaagagccttcaattgtagatgaacatctctgttatttatccctcattcatccatccgttcattcattcagccttcaatcaacatctcttgagtgtctattatgtacaggacatgtactgagacaaaaaggaaacataagagctttttcactctaaaaatcttggcaataatgtcaacaccagaaagcctcctctggagaatcttacagagtgattgtagtttaatacaggaacacacagggctgtgtagcatgataccaggcccaggagatcagtaattacaaattaagggttaaatcagagattattcaacagagagggagaaaggaggagacagagggaggacctgttgtgttccagccattctggtattcctttatgtatctaatttcattcaaacctcacaacagtcttgtgaggcccttatataattactcccattttgcagatgaagtaactgaggcttagaaaggttaatagcaccggggaacaatttctctgggtgagaattgggactctgttgctggtcttctcagttcatttcctgaggtggatttactgagagaaggtgaaataaagccatatttagtataccagagaaggtagattttaagaatggtctcagtgttaatactgagaaaaagtcctgtcagttcagaaaaaatgtgaagtctactttagtattcctgtaatactaaaccgttgagtttctaaatatttatttattctaacaaaaagcaattactacaaatggatgacacatttaatgaacacaattttattttttttctgtaactgtgcttgttgaatgtcaatcatatttaaagggaatgactttgaagtaaaaccttttttcttgctactgaaaaaaatggagttgttttgggtggtaaagtgttaaggaatagggacagctggtcacacaaggaactcttgaaggccacatgtgaaaacctgtcacttgcacagaggccagtcccactaaggtgaccagagtgggctccaagcacaaactgccattggctatagatgggactgtgtccccccaaaattcatgtgttggagccttaaccctcaatgtgatggtatttgagatggggcctttggtaagggaagtttagatgaggtcacgagggtaggaccctcatgatgggatgagtccccttacaagacctctggcttgggccgggcgtggtggctcacacctgtaatcccaacactttgggaggccaaggcaggtagatcacttgatgccaggagttccagaccaggctggccgacatggtgaaaccccatctctactaaaaaatataaaaattagccgggctttgtggcatgtgcctgtaatcccagctatttggcaggctgaggcatgagaatcgcttgaacccaggaggtggaggttacagtgagctgagagtgccccactgcactccagcctgggtgacagagcgagactttgtcccaaaacaaaataggtgaggggatagcgaatgcactcagggtcagcagtggagtttaaaaattgtctcttttcaacttatttaaatgacagcacctgagaagaggaaccgttttacactggatgtttctcatgtagaacaagaaatctttctggaattgatgtttacatgtctgttgttggtcatctctcctgtgtcttaaatactttaatgttggaagagcatagtgtttgggctagtgggtttctgacagcccatgggaatgccctgaaactactgtatctgatgtttgttttcgatgaggttccatgttttgttttcttgggaataaattaatatattgttttccaaaaaaaaaaaaaaaaaaaa

SEQ ID NO: 13721 - DNA, 4691 bp, Homo sapiens
agtaagctcttgttttgaaaaacagtggggtggggccaaaaaagcattacaatggagctgggatggatgaggctttcttttatttgagatgtcacttgtgtcacgtttcctgaaacagcacgttggaaaacagaagctattttctatcccgtgggttgcgctggaagagctgagaggccaggctgtggatccttgccacgaacaacaagagagggcaagtccagccgcctgctaggggactagcaggaagcggcacgcctgccagagctcatcacttcaactctggctttcactgcgctcattccctgaatggcagtaaccagggggcgggggtggcatgggaaatgaaagaaagagatatgggaaactaaatctgccgggggaaagagagttaccggagttttagcaaaacagctagcagatgcaaacggggaggcagagggaggagggaaggctgggcttcagcaacctgccacggggatttaaacaaaggaggtttgagagaggcgggatctggctgtaatatcggcacagggacagagacagcagctggactctcgggatgaaacggaatcgattcccagcgtctccaacagggcaggagtgagtggagtatgttgcaaaataagaactcagagaaacgagtgagtttggaaaaaagacttacagattttgacggtctcttgacatttcacccttctttgaggcatgcctttatcaatgcgttacctcttcataatttctgtctctagtgtaattatttttatcgtcttctctgtgttcaattttgggggagatccaagcttccaaaggctaaatatctcagaccctttgaggctgactcaagtttgcacatcttttatcaatggaaaaacacgtttcctgtggaaaaacaaactaatgatccatgagaagtcttcttgcaaggaatacttgacccagagccactacatcacagcccctttatctaaggaagaagctgactttcccttggcatatataatggtcatccatcatcactttgacacctttgcaaggctcttcagggctatttacatgccccaaaatatctactgtgttcatgtggatgaaaaagcaacaactgaatttaaagatgcggtagagcaactattaagctgcttcccaaacgcttttctggcttccaagatggaacccgttgtctatggagggatctccaggctccaggctgacctgaactgcatcagagatctttctgccttcgaggtctcatggaagtacgttatcaacacctgtgggcaagacttccccctgaaaaccaacaaggaaatagttcagtatctgaaaggatttaaaggtaaaaatatcaccccaggggtgctgcccccagctcatgcaattggacggactaaatatgtccaccaagagcacctgggcaaagagctttcctatgtgataagaacaacagcgttgaaaccgcctcccccccataatctcacaatttactttggctctgcctatgtggctctatcaagagagtttgccaactttgttctgcatgacccacgggctgttgatttgctccagtggtccaaggacactttcagtcctgatgagcatttctgggtgacactcaataggattccaggtgttcctggctctatgccaaatgcatcctggactggaaacctcagagctataaagtggagtgacatggaagacagacacggaggctgccacggccactatgtacatggtatttgtatctatggaaacggagacttaaagtggctggttaattcaccaagcctgtttgctaacaagtttgagcttaatacctacccccttactgtggaatgcctagaactgaggcatcgcgaaagaaccctcaatcagagtgaaactgcgatacaacccagctggtatttttgagctattcatgagctactcatgactgaagggaaactgcagctgggaagaggagcctgtttttgtgagagacttttgccttcgtaatgttaaccgtttcaggaccacgtttatagcttcaggacctggctacgtaattatacttaaaatatccactggacactgtgaaatacactaacaggatggctgggtagagcaatctgggcactttggccaattttagtcttgctgtttcttgatgctcacctctatattagtttattgttaggatcaatgataaatttaaatgacctcagatctttgcaccagatactcatcatatacaaatgttttagtaaaaaagagaattgtagataatactgtctaggaaaataagaattaggtttctttgaagaaggaatcttttataacaccttaacagtcaccactgtgctcaaccagacagatagtgaaacagctttctgggtaattcaccaatttcctttaaaacataagctacctgaatggagaatacatcttgtttctgagtttcaacactagcatttttggcttactcatggacaaagttctgtatatagtataaagtcattaacaagaaacaggatatgctttaagacagaattcactgtctgttgcttcagtaaaaggacctcggggaataaaacatttctctcttatatgccagaatgtaggctggtccctatgtcatgtcttccattaagaacactaaaaagtccttgcaagaatggagatatgcattcaagagaggtgctatcacatagatctagtctgaagtctggaacactttcctcttctatgacccctctctccccagtattatcttacttgcaaaatggagaccaaattctatcctgtgaggcttttaattgcaccatagtatgctctgagtagctttacactgcctggtactgatagtagtggctcgatttttaagagccttcaattgtagatgaacatctctgttatttatccctcattcatccatccgttcattcattcagccttcaatcaacatctcttgagtgtctattatgtacaggacatgtactgagacaaaaaggaaacataagagctttttcactctaaaaatcttggcaataatgtcaacaccagaaagcctcctctggagaatcttacagagtgattgtagtttaatacaggaacacacagggctgtgtagcatgataccaggcccaggagatcagtaattacaaattaagggttaaatcagagattattcaacagagagggagaaaggaggagacagagggaggacctgttgtgttccagccattctggtattcctttatgtatctaatttcattcaaacctcacaacagtcttgtgaggcccttatataattactcccattttgcagatgaagtaactgaggcttagaaaggttaatagcaccggggaacaatttctctgggtgagaattgggactctgttgctggtcttctcagttcatttcctgaggtggatttactgagagaaggtgaaataaagccatatttagtataccagagaaggtagattttaagaatggtctcagtgttaatactgagaaaaagtcctgtcagttcagaaaaaatgtgaagtctactttagtattcctgtaatactaaaccgttgagtttctaaatatttatttattctaacaaaaagcaattactacaaatggatgacacatttaatgaacacaattttattttttttctgtaactgtgcttgttgaatgtcaatcatatttaaagggaatgactttgaagtaaaaccttttttcttgctactgaaaaaaatggagttgttttgggtggtaaagtgttaaggaatagggacagctggtcacacaaggaactcttgaaggccacatgtgaaaacctgtcacttgcacagaggccagtcccactaaggtgaccagagtgggctccaagcacaaactgccattggctatagatgggactgtgtccccccaaaattcatgtgttggagccttaaccctcaatgtgatggtatttgagatggggcctttggtaagggaagtttagatgaggtcacgagggtaggaccctcatgatgggatgagtccccttacaagacctctggcttgggccgggcgtggtggctcacacctgtaatcccaacactttgggaggccaaggcaggtagatcacttgatgccaggagttccagaccaggctggccgacatggtgaaaccccatctctactaaaaaatataaaaattagccgggctttgtggcatgtgcctgtaatcccagctatttggcaggctgaggcatgagaatcgcttgaacccaggaggtggaggttacagtgagctgagagtgccccactgcactccagcctgggtgacagagcgagactttgtcccaaaacaaaataggtgaggggatagcgaatgcactcagggtcagcagtggagtttaaaaattgtctcttttcaacttatttaaatgacagcacctgagaagaggaaccgttttacactggatgtttctcatgtagaacaagaaatctttctggaattgatgtttacatgtctgttgttggtcatctctcctgtgtcttaaatactttaatgttggaagagcatagtgtttgggctagtgggtttctgacagcccatgggaatgccctgaaactactgtatctgatgtttgttttcgatgaggttccatgttttgttttcttgggaataaattaatatattgttttccaaaaaaaaaaaaaaaaaaaa

SEQ ID NO: 13722 - DNA, 2818 bp, Homo sapiens
gatcgccgagccggccaccatgcccggcagaccgcgccactaggcgctcctcgcggctcccacccggcggcggcggcggcggcggcggcgtccgcgatggtttcagacgctgaaggattttgcatctgatcgctcggcgtttcaaagaagcagcgatcggagatggatgtctctctttgcccagccaagtgtagtttctggcggattttcttgctgggaagcgtctggctggactatgtgggctccgtgctggcttgccctgcaaattgtgtctgcagcaagactgagatcaattgccggcggccggacgatgggaacctcttccccctcctggaagggcaggattcagggaacagcaatgggaacgccagtatcaacatcacggacatctcaaggaatatcacttccatacacatagagaactggcgcagtcttcacacgctcaacgccgtggacatggagctctacaccggacttcaaaagctgaccatcaagaactcaggacttcggagcattcagcccagagcctttgccaagaacccccatttgcgttatataaacctgtcaagtaaccggctcaccacactctcgtggcagctcttccagacgctgagtcttcgggaattgcagttggagcagaactttttcaactgcagctgtgacatccgctggatgcagctctggcaggagcagggggaggccaagctcaacagccagaacctctactgcatcaacgctgatggctcccagcttcctctcttccgcatgaacatcagtcagtgtgaccttcctgagatcagcgtgagccacgtcaacctgaccgtacgagagggtgacaatgctgttatcacttgcaatggctctggatcaccccttcctgatgtggactggatagtcactgggctgcagtccatcaacactcaccagaccaatctgaactggaccaatgttcatgccatcaacttgacgctggtgaatgtgacgagtgaggacaatggcttcaccctgacgtgcattgcagagaacgtggtgggcatgagcaatgccagtgttgccctcactgtctactatcccccacgtgtggtgagcctggaggagcctgagctgcgcctggagcactgcatcgagtttgtggtgcgtggcaaccccccaccaacgctgcactggctgcacaatgggcagcctctgcgggagtccaagatcatccatgtggaatactaccaagagggagagatttccgagggctgcctgctcttcaacaagcccacccactacaacaatggcaactataccctcattgccaaaaacccactgggcacagccaaccagaccatcaatggccacttcctcaaggagccctttccagagagcacggataactttatcttgtttgacgaagtgagtcccacacctcctatcactgtgacccacaaaccagaagaagacacttttggggtatccatagcagttggacttgctgcttttgcctgtgtcctgttggtggttctcttcgtcatgatcaacaaatatggtcgacggtccaaatttggaatgaagggtcccgtggctgtcatcagtggtgaggaggactcagccagcccactgcaccacatcaaccacggcatcaccacgccctcgtcactggatgccgggcccgacactgtggtcattggcatgactcgcatccctgtcattgagaacccccagtacttccgtcagggacacaactgccacaagccggacacgtatgtgcagcacattaagaggagagacatcgtgctgaagcgagaactgggtgagggagcctttggaaaggtcttcctggccgagtgctacaacctcagcccgaccaaggacaagatgcttgtggctgtgaaggccctgaaggatcccaccctggctgcccggaaggatttccagagggaggccgagctgctcaccaacctgcagcatgagcacattgtcaagttctatggagtgtgcggcgatggggaccccctcatcatggtctttgaatacatgaagcatggagacctgaataagttcctcagggcccatgggccagatgcaatgatccttgtggatggacagccacgccaggccaagggtgagctggggctctcccaaatgctccacattgccagtcagatcgcctcgggtatggtgtacctggcctcccagcactttgtgcaccgagacctggccaccaggaactgcctggttggagcgaatctgctagtgaagattggggacttcggcatgtccagagatgtctacagcacggattattacagggtgggaggacacaccatgctccccattcgctggatgcctcctgaaagcatcatgtaccggaagttcactacagagagtgatgtatggagcttcggggtgatcctctgggagatcttcacctatggaaagcagccatggttccaactctcaaacacggaggtcattgagtgcattacccaaggtcgtgttttggagcggccccgagtctgccccaaagaggtgtacgatgtcatgctggggtgctggcagagggaaccacagcagcggttgaacatcaaggagatctacaaaatcctccatgctttggggaaggccaccccaatctacctggacattcttggctagtggtggctggtggtcatgaattcatactctgttgcctcctctctccctgcctcacatctcccttccacctcacaactccttccatccttgactgaagcgaacatcttcatataaactcaagtgcctgctacacatacaacactgaaaaaaggaaaaaaaaagaaagaaaaaaaaaccc

SEQ ID NO: 13723 - DNA, 3549 bp, Homo sapiens
gtcttcccggcgcccaggcttgggctcatagggagaaaggaagctgcgctgcattctgcgggacgaaccctgctccgcgcgagaatttttttgattccttcttatttggagaaatctccagctgctctgatgatagcctaagaagactgcatgctgcttcctctcgatgccaagccagaccctctcacaacctcggatctcagtccttcatggagacctggtcccagcaggaatggcagtgcaggaaattggcgcccagatggttcttccatgtgaagttgtctcgggctctgggctgacgagagaacacctggtaaccaggttagccctctgtcagtcacccagggcagggcagcatggtgcggattcagaggaggaagcttttggcatcttgcctgtgcgtcacagccaccgtctttctgcttgtcacactccaggtcatggttgagctggggaagtttgaaaggaaggagtttaaaagttccagtttgcaagatggacatacaaaaatggaggaagcacctacgcatcttaattcatttcttaagaaagaaggattgaccttcaacaggaaaagaaaatgggaattggacagctaccccattatgctctggtggtccccgctgacgggggagactgggaggttaggccaatgtggagcagatgcttgtttcttcaccatcaaccggacctacctccatcatcacatgaccaaagcattcctcttctatggtactgactttaacatagatagcttacctctgcctcggaaagcccatcatgactgggctgtttttcatgaagagtccccgaaaaacaattataagctctttcataaaccagtgatcaccttgttcaactacactgccacgttcagcaggcattcccacttgccactaactacccaatacttggagagcattgaagtcctgaagtcactccgatacctagttcctttgcagtccaaaaacaagcttagaaaaagacttgctccgctggtgtatgtacagtcagactgtgacccaccatcagacagggacagctatgttcgcgagctgatgacttacatcgaggtcgattcctatggtgaatgtttacgaaacaaagacctccctcagcagctgaaaaatccagcctctatggatgccgatggcttttataggatcattgcacagtataagtttatcctagcttttgagaatgcagtttgtgatgactacatcactgagaagttctggaggccactgaaactgggggtagtccctgtatattacggatcccccagcatcacagactggcttccaagtaacaaaagtgctattcttgtatcagaattttctcaccccagggaactggcaagttacatcagacgactggattctgatgacagattgtatgaggcctatgtagaatggaagctgaagggtgagatctctaaccagcgacttctgacagctctcagggaacggaaatggggagtgcaagacgtcaaccaggacaattacatcgatgcatttgagtgtatggtgtgcaccaaggtgtgggctaatatcaggcttcaggaaaagggcttaccacccaaaagatgggaggcagaagatacccacctgagttgcccagagcccacagtgtttgctttctcaccactccggactccacctttgagctctttgcgagagatgtggatttccagctttgaacaatccaagaaagaagcccaggcactaaggtggctggttgataggaatcaaaacttttcatctcaagagttttggggcctagtattcaaggactgatttcaaaaatgatcagaatgaaacagactagagccttcttgaggtttattttctaggttgccttaatatttgaacataatagctattctgttgactatccatcaggataataattagttgctgcagtactcataatgagccctttcaaggaatagatgtaaattacccttaggggtagccactatattttttatactaaaaaaggaaatatttcttatggacactggttatcttccatgtccgtgtctgtggacccacatacttactgccttttgtggaaattcacctagagtgagtactttccttgtgcaatggagggagacgatctagctatagattcttgatactcacctcactctcaacagcttattggtatttggcaaacctggtatcctgcagccgagcatgaacatgaaatacattagaacttggcaatgagagatcccatctgttggtttccagggatgtaagtgagtaataaaagctgtttcaagtttatccactatccactcttcaagtgaaaagaacttatgtgtgtctaccttcttctccataccctgagccacctctctcactttctttagttgtgccttgccctatcgcctcccattttcccttcaaagtagaatgtcttgtaaagacacagtaactcctgtgtgttttgattagtgagatgttaccacttaccccttctgctgcgcagaataatattaagaattgctatgcttatgattcaggctggacagcctggacattttgagcagcgcgagagtagaagtgaatacccccaggaactccaattgtgctgaagctgatttgtctgttcgtaggatgatgtgcagcctgtcacagtggcagccacaggcattcagtttgtgggcatttcctgtcatttcggatcctgctatagggaaggttcagctctcctgtctggggcatctactggagcacctcagaagacaaggaggaaaacactggctcatgttttctttccatgtgagggaggggaggtttctagatgatactaaaagcctgttgccactgttgtgtcatgatttccattcttcatcatggaaagccacaagcctcagaaggcagccagaggacaggaagagtctgtgatgctcatgtctgtgtcatggcatgagggggaattgacgagtgcttgcttagcatcagctctcattgtattgaaggctgtgcccttggtgtgcttagcagtgagcagcgtcttcattaggtagctctggctgggctttgtcagccagcgtgtgagaaaggagaaccaaaaccaatacctccttatagaagccagaaggatcacattggatgagagaaggtgtctataactgggttcttcccaatcccagctctttcattaactaaatatgatcttggacatatctcttaacctccatcggccttagtttttgcatccaaaaagaagtgattgggctggtcttggaaggtttttttcttttttttcccctgtgtaacattcttcattgttcatcaacatttaagaaatttaattttgtagatgtttttactaaagagggtaacaaactattttggaactgctgtatgttattcaagggaagcacgctgtttggaggaaggagcatacttaatgggtagtattgaggatgaaagggaatttctctctctgccattttatttgataatattaaagaaataaagactggaaagggggattccttgttaaaggtcagattttaaattgcatataaaa

SEQ ID NO: 13724 - DNA, 2486 bp, Homo sapiens
cacacacaccacctcacaaccacacactgcatgcacacacatacaccacagccacacactgtgcatacacgcacaccccacaacccacatactgcatgcacacacacacacctacaagctgcatgctgcatacacaagtcatacaggagataaactcagagtcccagccccaaatagaccccatctcttgctcagttgctgtcatcctagacctgtttctttcgccacatttctataatctgccagtgtctgcaaggagaagacatggggggttttctacctaaggcagaagggcccgggagccaactccagaaacttctgccctcctttctggtcagagaacaagactgggaccagcacctggacaagcttcatatgctgcagcagaagaggattctagagtctccactgcttcgagcatccaaggaaaatgacctgtctgttcttaggcaacttctactggactgcacctgtgacgttcgacaaagaggagccctgggggagacggcgctgcacatagcagccctctatgacaacttggaggcggccttggtgctgatggaggctgccccagagctggtctttgagcccaccacatgtgaggcttttgcaggtcagactgcactgcacatcgctgttgtgaaccagaatgtgaacctggtgcgtgccctgctcacccgcagggccagtgtctctgccagagccacaggcactgccttccgccgtagtccccgcaacctcatctactttggggagcaccctttgtcctttgctgcctgtgtgaacagcgaggagatcgtgcggctgctcattgagcatggagctgacatcagggcccaggactccctgggaaacacagtattacacatcctcatcctccagcccaacaaaacctttgcctgccagatgtacaacctgctgctgtcctacgatggacatggggaccacctgcagcccctggaccttgtgcccaatcaccagggtctcacccccttcaagctggctggagtggagggtaacactgtgatgttccagcacctgatgcagaagcggaggcacatccagtggacgtatggacccctgacctccattctctacgacctcacagagatcgactcctggggagaggagctgtccttcctggagcttgtggtctcctctgataaacgagaggctcgccaaattctggaacagaccccagtgaaggagctggtgagcttcaagtggaacaagtatggccggccgtacttctgcatcctggctgccttgtacctgctctacatgatctgctttaccacgtgctgcgtctaccgcccccttaagtttcgtggtggcaaccgcactcattctcgagacatcaccatcctccagcaaaaactactacaggaggcctatgagacacgtgaagatatcatcaggctggtgggggagctggtgagcatcgttggggctgtgatcatcctgctcctagagattccagacatcttcagggttggtgcctctcgctattttggaaagacgattcttggggggccattccatgtcatcatcatcacctatgcctccctggtgctggtgaccatggtgatgcggctcaccaacaccaatggggaggtggtgcccatgtcctttgccctggtgctgggctggtgcagtgtcatgtatttcactcgaggattccagatgctgggtcccttcaccatcatgatccagaagatgatttttggagacctaatgcgtttctgctggctgatggctgtggtcatcttgggatttgcctccgcgttctatatcattttccagacagaggacccaaccagtctggggcaattctatgactaccccatggcactgttcaccacctttgagctttttctcactgttattgatgcacctgccaactacgacgtggacttgcccttcatgttcagcattgtcaacttcgccttcgccatcattgccacactgctcatgctcaacttgttcatcgccatgatgggcgacacccactggagggtggcccaggagagggatgagctctggagggcccaggtcgtggccaccacagtgatgctggagcggaagctgcctcgctgcctgtggcctcgctccgggatctgtgggtgcgaattcgggctgggggaccgctggttcctgcgggttgagaaccacaatgatcagaatcctctgcgagtgcttcgctatgtggaagtgttcaagaactcagacaaggaggatgaccaggagcatccatctgagaaacagccctctggggctgagagtgggactctagccagagcctctttggctcttccaacttcctccctgtcccggaccgcgtcccagagcagcagtcaccgaggctgggagatccttcgtcaaaacaccctggggcacttgaatcttggactgaaccttagtgagggggatggagaggaggtctaccatttttgattaacatcgctatcactcttgaccttactccc

SEQ ID NO: 13725 - DNA, 5602 bp, Homo sapiens
gcggcgggagcgcggcttcccaggcccgccgctccgcagggctgctggcgttgctgctgttgagaggcggcggcggcggcgcaggcgggcgggaaggatggtgtttctgcgactggagcggcaggtgcggaccgggagccggaccgaggtttggcagaagcaacgtgtgctcgggagcaaccggcgcgggtgccactgaggcagcggagggaggcaggatcgactgacgggcgaacggacggacggacggaaggcgactcgagggccggccccggagccgcgccgtgggcgagatgccggggccgccggcgttgcggcggaggctgctgctgctgctgctggtcctcctgatcgccggcagtgctggggccgcgccacttccgcaaacaggtgcaggggaggcgccacctgctgcagaagtttcctcatcttttgtgatcctgtgtgtgtgcagtttaataatattaatagtgttaattgcaaactgtgtatcctgctgtaaggacccagaaatagactttaaggaatttgaagataattttgatgatgagatagatttcacaccaccagcagaagacactccctctgttcagtccccagcagaggtcttcacactttcagtaccaaatatttcactcccagctccctcgcaattccagccttctgtagagggattgaagtctcaagttgcccgccacagtctaaactacatacaggaaattggaaatggctggtttggaaaggttctcttgggagagatttacacgggcactagcgtagcaagagtcatcgtgaaggagttaaaagcaagtgccaacccaaaggaacaagatacttttttgaaaaatggagaaccttactacattcttcagcatccaaatattcttcagtgtgttggacagtgcgtagaagcgattccctacctcctggtgtttgagttctgtgacttgggtgacctgaaggcgtatctgcgcagcgagcaggagcacatgcggggggactcacagaccatgctgctgcagaggatggcgtgcgaggtcgccgcggggctggccgccatgcacaagctgcacttcctgcacagtgatttagccctgcggaattgttttctcacctccgacttaaatgtgaaagtgggagattacggaataggattcagcaggtacaaggaggattatattgaaacagatgataaaaaagttttccctctgcgatggactgctccagaattagtaaccagctttcaagacagactgctaactgcagatcagactaagtatagtaatatctggtctctgggtgtgacactttgggagctttttgacaatgccgcacagccgtattcaaacctttccaacttagatgtcctcaaccaagtcattagagagagagacacaaaactcccgaagccccagctggagcagccctactctgatagatggtatgaagtcttacagttctgttggctgtcaccagaaaagagacccgcggctgaagatgtgcacaggctgctgacttacctgcggctgcagagccagcgggactcagaggtcgactttgaacagcagtggaacgctctgaagccgaacacaaacagcagagactcctccaacaatgctgcattcccaattctcgaccactttgccagggaccggctgggtcgtgaaatggaggaagtcctcaccgtgaccgaaaccagccagggcctgagcttcgagtatgtctgggaggccgctaagcacgaccactttgacgagcgcagccggggccacctggacgaaggcttgtcctacacgagcatcttctatccggttgaagtttttgagagttcgctttcagatcctgggcccggaaagcaagatgacagcggccaggatgtccccctgagggtccctggagtggttcctgtttttgatgcccacaacctttctgttggaagcgactattatatccagttagaagaaaaaagtggtagtaacttggagcttgattacccaccagcgctgctcacaaccgacatggataatccagaaaggactggccctgaactgtcccagctcacggcgctcaggagcgttgaacttgaggagtccagtacagatgaggacttcttccaaagcagtacagaccccaaagactctagcttaccaggggacttacacgtgaccagtggccccgagagccctttcaacaatatatttaatgatgtggacaaatcggaagatttgcccagtcaccaaaaaatattcgacttaatggaattaaacggagttcaagccgactttaaacctgccactttaagttccagtttggataaccccaaagagtcagtcataacaggccactttgagaaagaaaagccccgtaagatttttgacagtgagcctctctgcctatcagataatcttatgcaccaagataattttgatccattgaatgttcaagaattgtcagaaaactttttatttcttcaagagaaaaacttactaaaaggctcattgtccagcaaagaacacataaatgatcttcagacagaacttaagaatgctggttttactgaagctatgttagaaacgtcatgtagaaactctttagatactgagcttcagtttgctgaaaataagccaggcttgtctttgttgcaggaaaacgtaagcacaaagggtgacgatacagatgtcatgctcacaggtgacactttgagcacctcattgcagtcttccccggaagtgcaggtacctcctacctccttcgaaacagaagaaacgccccgtcgggtacccccagactcactcccaacacagggagaaacccagcccacgtgtttagatgttattgtcccggaggactgtctccaccaggacatcagtccagacgctgtgactgtcccggttgaaattctctcaactgatgccagaacccacagcctggataacaggtcccaggactctcctggcgagagtgaggagaccctgcgactcaccgaaagtgactctgttcttgctgatgacatccttgccagcagggtgagtgtagggagtagtctcccggaactgggacaggaattgcacaataaaccattttcggaagaccatcacagtcatcgccggctagagaaaaacttagaggctgtggagactttaaatcagctcaattctaaagacgcagcaaaagaagcaggcttggtgtctgccctctcctcggactcaaccagtcaggacagcctcctggaggacagcttgtcagcacccttcccagcctctgagccgtccctggaaaccccggactctctggagtcagtggatgtccacgaagcgctactggactctttaggatctcacactccccagaaactagtgccccccgataagccggcagacagtggctacgaaacagagaacttggagtctcccgagtggaccttgcatcccgctcccgagggcaccgcagactcagaaccagccaccacgggcgatggcggccacagcggtctgcctcccaacccggtcattgtcatctcagatgccggcgatggtcacagaggcacagaagtgacccctgagacgttcacagctggctcccagggttcataccgagactctgcgtacttctcagacaatgactctgagcccgagaaaaggtctgaggaggtcccgggaacctccccatccgccttggtgttggtacaggagcagcccctacccgagccagtcctccccgagcaaagtcctgctgcccaggatagctgcctggaagccagaaagagccagccagatgaaagttgtctgtctgctttgcacaactccagtgacctggaattaagagccacgccggagccagcacagactggtgttccccagcaggtgcatcccacggaagacgaggccagcagtccctggagtgtgctgaatgcagaacttagcagcggcgatgacttcgagacacaggacgatcgcccctgcaccctcgcttccacggggaccaacacgaacgaactccttgcctacaccaattctgcgctggacaagtccctgtccagccactccgagggcccgaagttgaaggagccggacatcgaagggaagtacctggggaaactcggggtgtcagggatgctcgacctctcagaggacgggatggatgcagacgaggaggacgaaaacagcgacgactcggacgaggacctgcgggccttcaacctgcatagcctcagctccgagtcggaggacgagaccgagcaccccgtgcccatcatcctcagcaacgaggacggaaggcacctgcggagtctgttgaagcccacagcggccaatgcccccgacccactgcccgaggactggaagaaggaaaagaaggcagtcacgtttttcgatgatgtcacagtctacctgtttgaccaggagaccccaaccaaagagctggggccctgtggaggagaggcgtgcggcccggacctgagcggcccagccccagcctcaggctctccctacctgagcaggtgcatcaactccgaaagctccaccgacgaagaaggtggtggctttgagtgggatgatgacttctccccagatccttttatgtcaaagacaacaagtaacctgctcagctccaagccttctctccaaacatccaagtacttttctccgccgccaccggcccggagcacggagcagagctggccgcactcggcgccttactcccggttctccatctctcccgccaacattgccagcttttccctcacacacctgaccgactcggacatcgagcagggcggaagcagcgaagacggagaaaaggactaggtggctgccaacgcgcacgctcgggtccgaggctgctcccctggagcggcgcccctgcgccctcagcccgagcagcgacatccactcgccatttgctgacatgagattgggaggaagaatccagaggtgaagagggagacggctcttagctgcgttcaaggcggggccctcgggagcccaggtgcagagcgaggccgtgtccaggagccggcgtccctcagtgccccgtgcacccgcggccgcggcctcccaggcagtgctcatgcgctggccgtcgggggaggcaggggcacagcctccatgtgcgcgcgcgtgtggagctgtgtgcaccgcatgtgtgctttccacaggggcgtctctgcgtccacgcctgcacatcccggcgcacgtgtgggcaccacagaggacacgtgaggggaatggtcaccagtgagccatatttattatttctagagaaatcacgaactgctttctgtaattgcactgtggataaatgttccgagagtctccattgttgtacaggatcttcagttattcgaggggaatgaggcaggtcaagccgatgctagccactagtttgattttttttctgttttatagtttgcgctgcatggtacttgtgaagcttaaatattttgagtgttctactgtgtctaggattgttgggattgtacatatggtactctttcataaatgataaatgattctgaatgttagtgttttatgttcatataggaaatattttcattgagtccaaaataccactgttttgttgatggacttgaatgcatttttgt

SEQ ID NO: 13726 - DNA, 5491 bp, Homo sapiens
aggtcagactgcaagattgtttgttcagatgtaggcctaacaagggattgttcttttaaaatcttctttaaggcaaaattttctgttttatttctttacagattccagcaagattatggaagagcatagctacatacaaaaggagctagatttacaaaatggtagcttagaggaagactctgtggtgcattctgttgagaacgattcccaaaacatgatggagagcctcagcccaaagaaatactcttccagtctgagatttaaagccaatggagactattctggctcctatttaaccctctcacaacctgtgcctgcaaagagaagcccttctcctttgggaaccagtgtcagaagcagcccctccttagccaaaatccagggaagcaagcagttctcttatgatggaactgacaaaaatattcctatgaaacctccaactcctttactcaacactacatcctccctcagtggatatccacttggaagagcagactttgatcattatactggccgggacagtgaaagggccttgaggctctcagagaagcctccctattccaaatatagctcaaggcataaatcgcatgacaatgtctactctcttggagggctggaaggtcggaaggcatctggctcgctcctggccatgtggaatggaagttccctgagtgatgctggcccgcctcctatcagcagatcgggagccgcaagcatgccttcaagcccaaagcaagccaggaaaatgagcattcaggacagcctggcgcttcaacccaagttaactagacacaaggagcttgcatctgaaaacatcaatttgagaactaggaagtactccagcagcagcctgagtcacatgggagcctacagccgatcacttcccaggttgtacagagccacagagaaccagctgacacctctcagcttgcctccaagaaactctctgggcaattccaaacgaacaaaacttggggaaaaggatctacctcatagcgtaatagacaatgacaattaccttaatttttcttctttgagctcaggggctttaccctataaaacctctgcttctgaaggcaatccttatgtaagttctaccctcagtgtccctgccagtccacgagtggctcggaagatgcttctggcctccacctcctcctgtgcctctgatgactttgatcaggcttcatatgtggggacaaacccgagtcattcacttcttgctggagagtcagacagagtttttgcgaccaggaggaacttctcttgtggatctgtggaatttgatgaggcagatttggaaagcctcagacaggcctcaggaaccccccagcctgcccttcgggaacggaaaagcagtattagctccatttcaggacgtgatgacctgatggattatcaccggcggcagagggaggaaagactcagggagcaggaaatggagcgattggagagacagcgtctggagaccatcctcagtctctgtgctgaatacacaaagcctgacagtcgcttatctactgggaccaccgtggaagatgtgcagaaaatcaacaaggagcttgagaagctgcagctctctgatgaggagtctgtgtttgaggaagccctcatgagccctgacacaagatacaggtgccaccggaaagactccctccctgatgcagacttggcaagctgtgggagtctcagtcagagcagtgccagcttctttacccccaggagcaccaggaatgatgaactactcagtgacctcacccggactcctccaccaccatcctccacctttccgaaagcttccagcgagtcctcttatctaagtatcctaccaaagaccccagagggtataagtgaagaacagagatctcaggagttggctgcaatggaagaaacccggatagtcattctgaacaacctcgaggaacttaagcaaaaaatcaaagacataaatgatcagatggatgagtctttcagagagttggatatggaatgtgctcttttggatggagaacagaaatctgaaacaactgaacttatgaaggagaaggagattttggatcatctaaaccggaaaatagctgaactggaaaagaacattgttggtgaaaagaccaaggatgctgacctgttggatgttgaaagcaaacactttgaagacctggagttccagcagcttgaacatgagagccgtctagatgaagaaaaggagaacttgactcaacagctcctgcgtgaagttgctgaatatcaacggaacatcgtttctagaaaggaaaaaatttctgcattgaaaaagcaagccaatcacattgttcagcaggctcagagagagcaagatcattttgtgaaagaaaagaataatttaataatgatgttgcaaagagaaaaggagaatctttgtaatttggaaaagaaatactccagcctctctggggggaaagggtttcccgttaaccccaatactttaaaagagggctatatcagtgtaaatgagattaatgagccgtgtggcaattccacgaatctatccccttccactcagtttcctgctgatgctgatgctgttgccactgagcctgccacagctgtgctggcgagccagccacagagtaaagagcactttagaagtctggaagaaaggaaaaaacagcataaagaaggcctctatctgagtgatactttgcctcgaaagaaaaccacatcttccatctccccacatttcagcagtgctactatggggagaagcatcaccccaaaggcccatctgcccctaggacagagtaacagctgtggaagtgtgctccctccctcactggcagccatggccaaagactcagaatctcggaggatgctcagaggttataatcaccaacagatgagtgaaggacacaggcagaaatctgaattttataaccgcacagcatctgaatcaaatgtctacttgaatagtttccattatccagatcacagctacaaggaccaggcctttgatactctgagcctcgatagctctgatagcatggagaccagcatctctgcttgctcaccagacaacatctctagtgccagcacttcaaatattgctagaatagaagaaatggagagacttttgaagcaggctcatgcagaaaagacgcggctgctcgaatccagggaacgggaaatggaagccaaaaaacgagccctggaagaagaaaaacgacgccgggaaatcctggaaaaacgattacaggaagaaactagccagaggcagaagttaatagaaaaggaagtaaaaataagggagagacaaagggcacaggctcgtcctttgacacgctacctgcctgtccggaaggaagactttgatttgcggagccatgtagagactgctggccacaatattgacacctgttaccatgtatcaatcacagagaagacctgccgaggattcctcatcaaaatgggtgggaaaattaaaacgtggaaaaaacgttggtttgtttttgatcggaacaagcgaacattctcttattatgcagacaagcatgaaactaaattgaaaggagtaatatactttcaagccattgaagaagtctattatgatcacctcaagaatgctaataagagtcctaatccgttactcacctttagcgtcaagactcatgacagaatctattatatggtagccccatcgccagaagccatgcggatctggatggatgttatagttacgggggcagaaggttacactcacttcttgttgtagtgaactgaggcaacagtccacttcagggcagacggcaataatctcttacaagaatgaagccatattcaaccccagatgagaaaacccaacagatccatcccttgagctgtaaacactcagaactcctttcatatcaagacaagttatttgtaaaaaataaagaaggggttttaatacaaaccttcataataaatagcaaaataattgaagcttccatgagaaagaaaacactattttgataaattggatcacttataggaacatttctaataaactgtttttaatcagttgtcggatttggtgaaataaactaaacaggttacagaatatctgtatgtacttggaaatacagaataactttatcacccaaatcactggcattgacattattggtaatcaactggctttttttaaaaaaggtagcattttgttgacagttattttgtaaacataagcaaataagggcttggagggaaatacattttaggaggagttttgccttaattttttaagtactgcaccaaaaccaaagagctgacctgacttctgtggaacagtagtaactgcaagtgatgaactgcatttcgtattgttctgtatatttcaaaatggtattttgatgccatcaaatgcccaggaaattgactttgcagtgtcaccactggtgtaagctactatatatgtatatatatatgtagtaaaccactttttgtaaaagaagaaagagcaaaaagctgtgtgttttagaaaaaaaagccaggttacgcaacaggcattctgtcatgttgaacaattttaaataaagagaatatctggtgttaggagcttgttttgctgaagatttctccattcctggtgctgagaataaaggcaaccagtagccaatgtcctttagattgtctgatttctttttgttgtggagcacacctgctaactgctccctcaacataactatgaaatcatagctctgttttcaccaaagaacagaccaattaacatacttatttgcagaagtggtgtagttctacaaaacggcaaatgaagttcaacttaatattctctataatgtattattttattttattttttacaattagccttttttttagttaatttttgtcaaatgaaacgacttcaggcaagtctcttttataatggtttttcaagtgccatttattctagtttatcatgttttgcatgtttgaaagtatgaatgtgctctttcctaaaacatggcaaatgaatagatgtagagaataacaatattacttacaagatgaaatgattagattagaagtgtccctttattagactttgtcagcctgactgggtacaattcttttgttaatttgcagtgtggtttgtatacacgtatacgtgttatcaataataagattttgcaactggatgacacaagattttacttgaacagtgaaggacaaaaatcatgattgtggaagatatttttaaaatctgattttgcagcgatcacttttaaaccctgtagtgatgtaagactaaaatataattgctaagattttgttggttaatgtaaagatatgacttttctgcactgtactctcttcataggattgtaaaggtgttctaatccaattgcatgatgtagtaagcctcttaaatatgtgtgttaaatatattgagtttggattaaaatgttgacatgatttcacatttgaaaataaaatcatactcttattttgaagttaaaaaaaaaaaaaaaaa

SEQ ID NO: 13727 - DNA, 2880 bp, Homo sapiens
tgctgctctccgcccgcgtccggctcgtggccccctacttcgggcaccatggacacctcccggctcggtgtgctcctgtccttgcctgtgctgctgcagctggcgaccgggggcagctctcccaggtctggtgtgttgctgaggggctgccccacacactgtcattgcgagcccgacggcaggatgttgctcagggtggactgctccgacctggggctctcggagctgccttccaacctcagcgtcttcacctcctacctagacctcagtatgaacaacatcagtcagctgctcccgaatcccctgcccagtctccgcttcctggaggagttacgtcttgcgggaaacgctctgacatacattcccaagggagcattcactggcctttacagtcttaaagttcttatgctgcagaataatcagctaagacacgtacccacagaagctctgcagaatttgcgaagccttcaatccctgcgtctggatgctaaccacatcagctatgtgcccccaagctgtttcagtggcctgcattccctgaggcacctgtggctggatgacaatgcgttaacagaaatccccgtccaggcttttagaagtttatcggcattgcaagccatgaccttggccctgaacaaaatacaccacataccagactatgcctttggaaacctctccagcttggtagttctacatctccataacaatagaatccactccctgggaaagaaatgctttgatgggctccacagcctagagactttagatttaaattacaataaccttgatgaattccccactgcaattaggacactctccaaccttaaagaactaggatttcatagcaacaatatcaggtcgatacctgagaaagcatttgtaggcaacccttctcttattacaatacatttctatgacaatcccatccaatttgttgggagatctgcttttcaacatttacctgaactaagaacactgactctgaatggtgcctcacaaataactgaatttcctgatttaactggaactgcaaacctggagagtctgactttaactggagcacagatctcatctcttcctcaaaccgtctgcaatcagttacctaatctccaagtgctagatctgtcttacaacctattagaagatttacccagtttttcagtctgccaaaagcttcagaaaattgacctaagacataatgaaatctacgaaattaaagttgacactttccagcagttgcttagcctccgatcgctgaatttggcttggaacaaaattgctattattcaccccaatgcattttccactttgccatccctaataaagctggacctatcgtccaacctcctgtcgtcttttcctataactgggttacatggtttaactcacttaaaattaacaggaaatcatgccttacagagcttgatatcatctgaaaactttccagaactcaaggttatagaaatgccttatgcttaccagtgctgtgcatttggagtgtgtgagaatgcctataagatttctaatcaatggaataaaggtgacaacagcagtatggacgaccttcataagaaagatgctggaatgtttcaggctcaagatgaacgtgaccttgaagatttcctgcttgactttgaggaagacctgaaagcccttcattcagtgcagtgttcaccttccccaggccccttcaaaccctgtgaacacctgcttgatggctggctgatcagaattggagtgtggaccatagcagttctggcacttacttgtaatgctttggtgacttcaacagttttcagatcccctctgtacatttcccccattaaactgttaattggggtcatcgcagcagtgaacatgctcacgggagtctccagtgccgtgctggctggtgtggatgcgttcacttttggcagctttgcacgacatggtgcctggtgggagaatggggttggttgccatgtcattggttttttgtccatttttgcttcagaatcatctgttttcctgcttactctggcagccctggagcgtgggttctctgtgaaatattctgcaaaatttgaaacgaaagctccattttctagcctgaaagtaatcattttgctctgtgccctgctggccttgaccatggccgcagttcccctgctgggtggcagcaagtatggcgcctcccctctctgcctgcctttgccttttggggagcccagcaccatgggctacatggtcgctctcatcttgctcaattccctttgcttcctcatgatgaccattgcctacaccaagctctactgcaatttggacaagggagacctggagaatatttgggactgctctatggtaaaacacattgccctgttgctcttcaccaactgcatcctaaactgccctgtggctttcttgtccttctcctctttaataaaccttacatttatcagtcctgaagtaattaagtttatccttctggtggtagtcccacttcctgcatgtctcaatccccttctctacatcttgttcaatcctcactttaaggaggatctggtgagcctgagaaagcaaacctacgtctggacaagatcaaaacacccaagcttgatgtcaattaactctgatgatgtcgaaaaacagtcctgtgactcaactcaagccttggtaacctttaccagctccagcatcacttatgacctgcctcccagttccgtgccatcaccagcttatccagtgactgagagctgccatctttcctctgtggcatttgtcccatgtctctaattaatatgtgaaggaaaatgttttcaaaggttgagaacctgaaaatgtgagattgagtatatcagagcagtaattaataagaagagctgaggtgaaactcggtttaaa

SEQ ID NO: 13728 - DNA, 4598 bp, Homo sapiens
aggactcaggaagagatagacccataatgatgctgcctcaaaactcgtggcatattgattttggaagatgctgctgtcatcagaaccttttctctgctgtggtaacttgcatcctgctcctgaattcctgctttctcatcagcagttttaatggaacagatttggagttgaggctggtcaatggagacggtccctgctctgggacagtggaggtgaaattccagggacagtgggggactgtgtgtgatgatgggtggaacactactgcctcaactgtcgtgtgcaaacagcttggatgtccattttctttcgccatgtttcgttttggacaagccgtgactagacatggaaaaatttggcttgatgatgtttcctgttatggaaatgagtcagctctctgggaatgtcaacaccgggaatggggaagccataactgttatcatggagaagatgttggtgtgaactgttatggtgaagccaatctgggtttgaggctagtggatggaaacaactcctgttcagggagagtggaggtgaaattccaagaaaggtggggaactatatgtgatgatgggtggaacttgaatactgctgccgtggtgtgcaggcaactaggatgtccatcttcttttatttcttctggagttgttaatagccctgctgtattgcgccccatttggctggatgacattttatgccaggggaatgagttggcactctggaattgcagacatcgtggatggggaaatcatgactgcagtcacaatgaggatgtcacattaacttgttatgatagtagtgatcttgaactaaggcttgtaggtggaactaaccgctgtatggggagagtagagctgaaaatccaaggaaggtgggggaccgtatgccaccataagtggaacaatgctgcagctgatgtcgtatgcaagcagttgggatgtggaaccgcacttcacttcgctggcttgcctcatttgcagtcagggtctgatgttgtatggcttgatggtgtctcctgctccggtaatgaatcttttctttgggactgcagacattccggaaccgtcaattttgactgtcttcatcaaaacgatgtgtctgtgatctgctcagatggagcagatttggaactgcgactagcagatggaagtaacaattgttcagggagagtagaggtgagaattcatgaacagtggtggacaatatgtgaccagaactggaagaatgaacaagcccttgtggtttgtaagcagctaggatgtccgttcagcgtctttggcagtcgtcgtgctaaacctagtaatgaagctagagacatttggataaacagcatatcttgcactgggaatgagtcagctctctgggactgcacatatgatggaaaagcaaagcgaacatgcttccgaagatcagatgctggagtaatttgttctgataaggcagatctggacctaaggcttgtcggggctcatagcccctgttatgggagattggaggtgaaataccaaggagagtgggggactgtgtgtcatgacagatggagcacaaggaatgcagctgttgtgtgtaaacaattgggatgtggaaagcctatgcatgtgtttggtatgacctattttaaagaagcatcaggacctatttggctggatgacgtttcttgcattggaaatgagtcaaatatctgggactgtgaacacagtggatggggaaagcataattgtgtacacagagaggatgtgattgtaacctgctcaggtgatgcaacatggggcctgaggctggtgggcggcagcaaccgctgctcgggaagactggaggtgtactttcaaggacggtggggcacagtgtgtgatgacggctggaacagtaaagctgcagctgtggtgtgtagccagctggactgcccatcttctatcattggcatgggtctgggaaacgcttctacaggatatggaaaaatttggctcgatgatgtttcctgtgatggagatgagtcagatctctggtcatgcaggaacagtgggtggggaaataatgactgcagtcacagtgaagatgttggagtgatctgttctgatgcatcggatatggagctgaggcttgtgggtggaagcagcaggtgtgctggaaaagttgaggtgaatgtccagggtgccgtgggaattctgtgtgctaatggctggggaatgaacattgctgaagttgtttgcaggcaacttgaatgtgggtctgcaatcagggtctccagagagcctcatttcacagaaagaacattacacatcttaatgtcgaattctggctgcactggaggggaagcctctctctgggattgtatacgatgggagtggaaacagactgcgtgtcatttaaatatggaagcaagtttgatctgctcagcccacaggcagcccaggctggttggagctgatatgccctgctctggacgtgttgaagtgaaacatgcagacacatggcgctctgtctgtgattctgatttctctcttcatgctgccaatgtgctgtgcagagaattaaactgtggagatgccatatctctttctgtgggagatcactttggaaaagggaatggtctaacttgggccgaaaagttccagtgtgaagggagtgaaactcaccttgcattatgccccattgttcaacatccggaagacacttgtatccacagcagagaagttggagttgtctgttcccgatatacagatgtccgacttgtgaatggcaaatcccagtgtgacgggcaagtggagatcaacgtgcttggacactggggctcactgtgtgacacccactgggacccagaagatgcccgtgttctatgcagacagctcagctgtgggactgctctctcaaccacaggaggaaaatatattggagaaagaagtgttcgtgtgtggggacacaggtttcattgcttagggaatgagtcacttctggataactgtcaaatgacagttcttggagcacctccctgtatccatggaaatactgtctctgtgatctgcacaggaagcctgacccagccactgtttccatgcctcgcaaatgtatctgacccatatttgtctgcagttccagagggcagtgctttgatctgcttagaggacaaacggctccgcctagtggatggggacagccgctgtgccgggagagtagagatctatcacgacggcttctggggcaccatctgtgatgacggctgggacctgagcgatgcccacgtggtgtgtcaaaagctgggctgtggagtggccttcaatgccacggtctctgctcactttggggaggggtcagggcccatctggctggatgacctgaactgcacaggaatggagtcccacttgtggcagtgcccttcccgcggctgggggcagcacgactgcaggcacaaggaggacgcaggggtcatctgctcagaattcacagccttgaggctctacagtgaaactgaaacagagagctgtgctgggagattggaagtcttctataacgggacctggggcagcgtcggcaggaggaacatcaccacagccatagcaggcattgtgtgcaggcagctgggctgtggggagaatggagttgtcagcctcgcccctttatctaagacaggctctggtttcatgtgggtggatgacattcagtgtcctaaaacgcatatctccatatggcagtgcctgtctgccccatgggagcgaagaatctccagcccagcagaagagacctggatcacatgtgaagatagaataagagtgcgtggaggagacaccgagtgctctgggagagtggagatctggcacgcaggctcctggggcacagtgtgtgatgactcctgggacctggccgaggcggaagtggtgtgtcagcagctgggctgtggctctgctctggctgccctgagggacgcttcgtttggccagggaactggaaccatctggttggatgacatgcggtgcaaaggaaatgagtcatttctatgggactgtcacgccaaaccctggggacagagtgactgtggacacaaggaagatgctggcgtgaggtgctctggacagtcgctgaaatcactgaatgcctcctcaggtcatttagcacttattttatccagtatctttgggctccttctcctggttctgtttattctatttctcacgtggtgccgagttcagaaacaaaaacatctgcccctcagagtttcaaccagaaggaggggttctctcgaggagaatttattccatgagatggagacctgcctcaagagagaggacccacatgggacaagaacctcagatgacacccccaaccatggttgtgaagatgctagcgacacatcgctgttgggagttcttcctgcctctgaagccacaaaatgactttagacttccagggctcaccagatcaacctctaaatatctttgaaggagacaacaacttttaaatgaataaagaggaagtcaagttgccctatggaaaacttgtccaaataacatttcttgaacaataggagaacagctaaattgataaagactggtgataataaaaattgaattatgtatatcactgttaaaaaaaaaaaaaaaaaa

SEQ ID NO: 13729 - DNA, 2343 bp, Homo sapiens
atacgactacacctgctccggagcccgcggcggtacctgcagcggaggagctctgtcttccccttcatctcacgcgagcccggcgtcccgccgcgtgcgccccggcgcagcccgccagtccgcccggagcccgcccagtcgccgcgctgcacgcccggggtgaaccctctgccctcgctgggacagagggccccgcagccgtcatgctttccgccatctacacagtcctggcgggactgctgttcctgccgctcctggtgaacctctgctgcccatacttcttccaggacataggctacttcttgaaggtggccgccgtgggccggagggtgcgcagctacgggcagcggcggccggcgcgcaccatcctgcgggcgttcctggagaaagcgcgccagacgccacacaagccttttctgctcttccgcgacgagactctcacctacgcgcaggtggaccggcgcagcaatcaagtggcccgggcgctgcacgaccacctcggcctgcgccagggagactgcgtggcgctccttatgggtaacgagccggcctacgtgtggctgtggctggggctggtgaagctgggctgtgccatggcgtgcctcaattacaacatccgcgcgaagtccctgctgcactgcttccagtgctgcggggcgaaggtgctgctggtgtcgccagaactacaagcagctgtcgaagagatactgccaagccttaaaaaagatgatgtgtccatctattatgtgagcagaacttctaacacagatgggattgactctttcctggacaaagtggatgaagtatcaactgaacctatcccagagtcatggaggtctgaagtcactttttccactcctgccttatacatttatacttctggaaccacaggtcttccaaaagcagccatgatcactcatcagcgcatatggtatggaactggcctcacttttgtaagcggattgaaggcagatgatgtcatctatatcactctgcccttttaccacagtgctgcactactgattggcattcacggatgtattgtggctggtgctactcttgccttgcggactaaattttcagccagccagttttgggatgactgcagaaaatacaacgtcactgtcattcagtatatcggtgaactgcttcggtatttatgcaactcaccacagaaaccaaatgaccgtgatcataaagtgagactggcactgggaaatggcttacgaggagatgtgtggagacaatttgtcaagagatttggggacatatgcatctatgagttctatgctgccactgaaggcaatattggatttatgaattatgcgagaaaagttggtgctgttggaagagtaaactacctacagaaaaaaatcataacttatgacctgattaaatatgatgtggagaaagatgaacctgtccgtgatgaaaatggatattgcgtcagagttcccaaaggtgaagttggacttctggtttgcaaaatcacacaacttacaccatttaatggctatgctggagcaaaggctcagacagagaagaaaaaactgagagatgtctttaagaaaggagacctctatttcaacagtggagatctcttaatggttgaccatgaaaatttcatctatttccacgacagagttggagatacattccggtggaaaggggaaaatgtggccaccactgaagttgctgatacagttggactggttgattttgtccaagaagtaaatgtttatggagtgcatgtgccagatcatgagggtcgcattggcatggcctccatcaaaatgaaagaaaaccatgaatttgatggaaagaaactctttcagcacattgctgattacctacctagttatgcaaggccccggtttctaagaatacaggacaccattgagatcactggaacttttaaacaccgcaaaatgaccctggtggaggagggctttaaccctgctgtcatcaaagatgccttgtatttcttggatgacacagcaaaaatgtatgtgcctatgactgaggacatctataatgccataagtgctaaaaccctgaaactctgaatattcccaggaggataactcaacatttccagaaagaaactgaatggacagccacttgatataatccaactttaatttgattgaagattgtgaggaaattttgtaggaaatttgcatacccgtaaagggagacttttttaaataacagttgagtctttgcaagtaaaaagatttagagattattatttttcagtgtgcacctactgtttgtatttgcaaactgagcttgttggagggaaggcattattttttaaaatacttagtaaattaaatgaac

SEQ ID NO: 13730 - DNA, 6162 bp, Homo sapiens
ggagttaaccacctgttcagtcgggaggtggactcgaggctgcagtcctcgcccggttttaacaacctggatcttcgaacttttgacacggctttggaaacgacgtcatgtgttagaattggagcgttattcagtatattaatgtcttattgataatggcagaacatccaccactactggatacaactcagatcttaagtagtgatatttctcttttgtctgcccctattgtaagtgcagatggaacacaacaggttattctgggaagtgccagtcttacaacataaactaacaggaagggtaatgctttaagtgtacaggcctagtttctttttgggagaacctacagcaggatgtgaacattctgtgccaagcctccaggggtcctgctcaggttccaatgatgtccccaaatggttctgtgcctcctatctatgtgcctcctggatatgccccacaggttattgaagacaatggtgttcgaagagttgtcgtggtccctcaggcaccagagtttcaccctggtagtcacacagttctccaccgttctccacatcctcctctacctggtttcattcctgtcccaactatgatgccgcctccaccacgtcatatgtactcacccgtgactggagctggagacatgacaacacagtatatgccacagtatcagtcttcacaagtctatggagatgtagatgctcactctacacatggaaggtccaactttagagatgaacgatctagtaaaacatatgaacgtttgcagaaaaaattgaaggatcgccaaggaacacagaaagataaaatgagcagtccaccatcatcaccccagaaatgcccttctcccattaatgaacataatggacttataaaaggacaaattgctggtggtataaacacaggatcagcaaaaatcaagtctgggaaggggaaaggtggtacacaagttgatacagaaattgaagaaaaagatgaagaaactaaagcatttgaagcacttctttccaacattgtcaaaccagtggcctccgacatccaggcaaggacagtagtacttacctggtcaccaccttccagcctcattaatggtgaaacagatgaaagtagtgtaccagagctctatggttatgaagttctgatctcaagtactggaaaagatgggaaatacaaaagtgtatatgtaggagaagaaacaaatatcactttaaatgatctcaagccagccatggattaccatgcaaaagtccaggcaggatataattctataaagggaactccttcagaggctgaaatctttaccaccttgagctgtgaacctgatatacctaatccaccaaggatagccaatcggaccaaaaattcactcactttgcaatggaaggcacctagtgacaatggttctaaaatccaaaactttgtattagaatgggatgaaggaaaaggaaatggagagttttgtcagtgttacatgggctcacagaaacaatttaaaattactaaactttcaccagcaatgggctgtaaattcagactatcggccagaaatgactatggtacaagtggttttagtgaagaagtcttatattacacctcaggctgtgctccttctatgccagcaagtcctgtattaaccaaggctggaattacttggttatccttacaatggagtaagccctcaggaacaccatcagatgaaggaatttctcacattttagagatggaggaagaaacttcaggatatggttttaagcctaaatatgatggagaagatcttgcttacacagtgaaaaatctcagacgtagtactaagtataaatttaaggttattgcttacaactcagaaggtaaaagtaatccaagtgaagtagtagaatttactacttgccctgataaaccaggcatacctgtaaagccttcagtgaaaggaaagatacattcacacagttttaaaataacctgggatccaccaaaagacaatggcggagcaaccatcaataaatatgtagtggagatggcagaaggttctaacggaaacaaatgggaaatgatatacagtggtgctaccagggaacatctttgtgatcgactgaatccaggctgtttctatcgtttacgagtttactgcatcagtgatggaggacagagtgcggtctctgaatctttacttgtgcagactccagctgtgcctcctggcccatgcctccctcccagattacagggtagacccaaagcaaaagaaatacagttacgatggggaccccctctggttgatggtggatcacccatttcctgttacagtgtggaaatgtctcctatagaaaaagatgaacctagagaagtttaccaaggttctgaagtagaatgtacagtgagcagccttcttcctggaaagacatacagcttcagactacgtgcagctaacaaaatggggtttggaccattttcagaaaaatgtgatattactacagcccctgggccaccagatcagtgcaagccccctcaagtgacatgtagatctgcaacttgtgcacaagtgaattgggaggttcctttgagtaatggaacagatgtcactgaatatcgactggagtggggaggagttgaaggaagtatgcagatatgttactgtgggcctggtctcagttatgaaataaaaggactttcaccagcaactacctattattgcagggtccaggctctgagtgttgtgggtgcaggccctttcagtgaagtagtagcctgtgtgactccaccatcagttcctggcattgtgacctgtcttcaagaaataagcgatgatgagatagaaaatccccattattcaccttctacatgccttgcaataagctgggaaaagccttgtgatcatggttcggaaatccttgcctacagcatagactttggagataaacaatccctaacagtgggaaaggttacaagctatattatcaacaatttgcaaccagatacaacatacagaatacgaattcaagccttgaatagccttggagctggtcctttcagccatatgataaaattaaaaactaagcctctccctcctgatccacctcgtctggaatgtgttgcctttagccaccagaaccttaagctgaaatggggagaaggaactccaaagacattgtcaaccgattctattcagtaccaccttcagatggaggataagaatggacggtttgtatccctatacagaggaccatgtcatacatacaaagtacaaagacttaatgagtcaacatcctataaattctgtattcaagcttgtaatgaagctggggaaggtcccctctcccaagaatatattttcactactccaaaatctgtcccagctgccttgaaagcccccaaaatagagaaagtaaatgatcacatttgtgaaattacatgggagtgtttacagccaatgaaaggtgatccagttatttacagtcttcaagttatgttgggaaaagattcagaattcaaacagatttacaagggtcccgactcttccttccggtattccagccttcagctgaactgtgaatatcgcttccgtgtatgtgccattcgccagtgccaagactctctgggacaccaggacctcgtaggtccctacagcaccacagtgctcttcatctctcagaggactgaaccaccagccagcaccaacagagacactgtggaaagcacaaggacccgacgggcactgagtgacgagcagtgtgctgccgtcatccttgtgctgtttgctttcttttccattttgattgcctttatcattcagtactttgtaatcaagtgaaaatataactttattttttaactctattacattttattttgtcatgtactaaaattatttctgtattgcttttataaaaaacagtggcatttagcactggcattgagactatagcacatcatttttgccattttcagtgcttatattgttaggtagaggctggcactttattagaatgcaagccacaaaaatatcaattttgttttttttgttagggtgggtcttctttttttctttccctctctctttttttaacaaatgccttcttatagaaaaactttctaagaggcaacaatttagaatggatattttgacgaatcggtatgagtgtaacagtgataacctgatctgtttgttttaaagattattaccaagtgaaaaattcagaatgaatagaatttacactaacatgctatataaaatgttaaagtctgatgctgtgaaagcaatctagtgctatatttctacctcctcatttgtcttaattatttggtaagtgggattatgatgagtaactggaggggcttagaaacaaaaactggatgaaagagtatgcatgaagaaaagcttctttgataaatgtggagttcttcattataaatatatattcatgaattcacagataagtacttaaagaacagacagtttacttggcctaaaaatattttgatgtttactcaaaaagtacctcttcaggtcttgagaacatggaaaagaattgagtgcttttaaatactttttagaaagtaatcataaaagtaaattgaatttcaaacctatttggcttctgttttgtgaacctttgaactatatgtatgtgtataagggtatacacatacatatatggcatataacaagtgtacacatatacacataacaagtgtagaagtatatattacatacatacactcactctgtctggtataggctaattttgaagaactcccataagtttctgctgcttctcccataactgctgccaccaccatcagaattcataatcaaacctaacctttttgtttggggcaccaaatctgaagacaaaattaatttgcaccagtaaacttcaagctgctttctttcttgaaaactaaacgtttaacgtataatgtctgtttggatactgttccaaattgttgattgcatgtggttaatgttgcattagagcactttgcaattgcataattcattaatgttttgtgagcttgcatttgtgagttattggatgatcagactgaattttgtcaagtatcacattgtacatcttgcctagatgtcgatgactgcaagtaataatacagtttataatgaaactatctacaattcttgttttagcacatctgttatccgtaaaacacctgtaactagcttttttaatttattatttgaattttaggatagcgaatcactaatttttagttgctgaggttggcattttagtgattattaagcacttctgtcagtctttgaaaaaagaacgtattttttgtgctttgaagatctctgaagaatttcttttataatagaatgggcatgtattgtaacagttttatgtcaaatgatctgtgctgtagaaaaacattaacccttgttcaaaaaagaaatggataaacttggcctttctaagtggtaagaatgacctgtcactataatatactgtatgtttacattttatttaaatttaatctcttatgtatagggtgataaccttccccagaaacaacagtgattgcgattgttttctagaaacttctttaaagtgccacatttggcagtacaaatgagtctgagtgtaatagcccagagatttatatatagttgaatgtctaaaatggtaaaatgtgccactgtgtcaagttacagtggcttatgtttttcatagtaattcaaatgaacttcctatttttgatagtaaatgtcatttaatagtatacttgccatttgagcctcactgcaaaattagtgcagaggagaaaacaatttttaatgtaatcttgattttacctcatatactgtacattccaaaaactctaaactttttaaagattatagatacactaccaaacatatcaccttaaaattgtataaggctgaatgaacttcatacaaatgaaaaaaatctcataaaaatacataaactatgtagcaaaagtatctgtaaaatccatggaaaataaaagttgtatcattctttttgaaaaaaaaaaaaaaaaaaaaaaaaaaaaaaaaaaaaaaaaaaaaaaaaaaaaaaaaaaaaaaaaaaaaaaaaaaaaaaaaaaaaaaaaaaaaaaaaaaaaaaaaaaaaaaaaaaaaaaaaaaaaaaaaaaaaaaaaaaaaaaaaaaaaaaaaaaaaaaaa

SEQ ID NO: 13731 - DNA, 6368 bp, Homo sapiens
ccatggacctgcgccctgagctgcccaccaccctgggccccgtcagcctgcgccagctggggctggagcacacccgctacccctgtctggaccttggtgccatgttgctctacaccctgaccttctggctcctgctgcgccagtttgtgaaagagaagctgctgaagtgggcagagtctccagctgcgctgacggaggtcaccgtggcagacacagagcctacgcggacgcagacgctgttgcagagcctgggggagctggtgaagggcgtgtacgccaagtactggatctatgtgtgtgctggcatgttcatcgtggtcagcttcgccggccgcctcgtggtctacaagattgtctacatgttcctcttcctgctctgcctcaccctcttccaggtctactacagcctgtggcggaagctgctcaaggccttctggtggctcgtggtggcctacaccatgctggtcctcatcgccgtctacaccttccagttccaggacttccctgcctactggcgcaacctcactggcttcaccgacgagcagctgggggacctgggcctggagcagttcagcgtatccgagctcttctccagcatcctggtgcccggcttcttcctcctggcctgcatcctgcagctgcactacttccacaggcccttcatgcagctcaccgacatggagcacgtgtccctgcctggcacgcgcctcccgcgctgggctcacaggcaggatgcagtgagtgggaccccactgctgcgggaggagcagcaggagcatcagcagcagcagcaggaggaggaggaggaggaggactccagggacgaggggctgggcgtggccactccccaccaggccacgcaggtgcctgaaggggcagccaagtggggcctggtggctgagcgcctgctggagctggcagccggcttctcggacgtcctctcacgcgtgcaggtgttcctgcggcggctgctggagcttcacgttttcaagctggtggccctgtacaccgtctgggtggccctgaaggaggtgtcggtgatgaacctgctgctggtggtgctgtgggccttcgccctgccctacccacgcttccggcccatggcctcctgcctgtccaccgtgtggacctgcgtcatcatcgtgtgtaagatgctgtaccagctcaaggttgtcaacccccaggagtattccagcaactgcaccgagcccttccccaacagcaccaacttgctgcccacggagatcagccagtccctgctgtaccgggggcccgtggaccctgccaactggtttggggtgcggaaagggttccccaacctgggctacatccagaaccacctgcaagtgctgctgctgctggtattcgaggccatcgtgtaccggcgccaggagcactaccgccggcagcaccagctggccccgctgcctgcccaggccgtgtttgccagcggcacccgccagcagctggaccaggatctgctcggctgcctcaagtacttcatcaacttcttcttctacaaattcgggctggagatctgcttcctgatggccgtgaacgtgatcgggcagcgcatgaactttctggtgaccctgcacggttgctggctggtggccatcctcacccgcaggcaccgccaggccattgcccgcctctggcccaactactgcctcttcctggcgctgttcctgctgtaccagtacctgctgtgcctggggatgcccccggccctgtgcattgattatccctggcgctggagccgggccgtccccatgaactccgcactcatcaagtggctgtacctgcctgatttcttccgggcccccaactccaccaacctcatcagcgactttctcctgctgctgtgcgcctcccagcagtggcaggtgttctcagctgagcgcacagaggagtggcagcgcatggctggcgtcaacaccgaccgcctggagccgctgcggggggagcccaaccccgtgcccaactttatccactgcaggtcctaccttgacatgctgaaggtggccgtcttccgatacctgttctggctggtgctggtggtggtgtttgtcacgggggccacccgcatcagcatcttcgggctgggctacctgctggcctgcttctacctgctgctcttcggcacggccctgctgcagagggacacacgggcccgcctcgtgctgtgggactgcctcattctgtacaacgtcaccgtcatcatctccaagaacatgctgtcgctcctggcctgcgtcttcgtggagcagatgcagaccggcttctgctgggtcatccagctcttcagccttgtatgcaccgtcaagggctactatgaccccaaggagatgatggacagagaccaggactgcctgctgcctgtggaggaggctggcatcatctgggacagcgtctgcttcttcttcctgctgctgcagcgccgcgtcttccttagccattactacctgcacgtcagggccgacctccaggccaccgccctgctagcctccaggggcttcgccctctacaacgctgccaacctcaagagcattgacttccaccgcaggatagaggagaagtccctggcccagctgaaaagacagatggagcgtatccgtgccaagcaggagaagcacaggcagggccgggtggaccgcagtcgcccccaggacaccctgggccccaaggaccccggcctggagccagggcccgacagtccagggggctcctccccgccacggaggcagtggtggcggccctggctggaccacgccacagtcatccactccggggactacttcctgtttgagtccgacagtgaggaagaggaggaggctgttcctgaagacccgaggccgtcggcacagagtgccttccagctggcgtaccaggcatgggtgaccaacgcccaggcggtgctgaggcggcggcagcaggagcaggagcaggcaaggcaggaacaggcaggacagctacccacaggaggtggtcccagccaggaggtggagccagcagagggccccgaggaggcagcggcaggccggagccatgtggtgcagagggtgctgagcacggcgcagttcctgtggatgctggggcaggcgctagtggatgagctgacacgctggctgcaggagttcacccggcaccacggcaccatgagcgacgtgctgcgggcagagcgctacctcctcacacaggagctcctgcagggcggcgaagtgcacaggggcgtgctggatcagctgtacacaagccaggccgaggccacgctgccaggccccaccgaggcccccaatgccccaagcaccgtgtccagtgggctgggcgcggaggagccactcagcagcatgacagacgacatgggcagccccctgagcaccggctaccacacgcgcagtggcagtgaggaggcagtcaccgaccccggggagcgtgaggctggtgcctctctgtaccagggactgatgcggacggccagcgagctgctcctggacaggcgcctgcgcatcccagagctggaggaggcagagctgtttgcggaggggcagggccgggcgctgcggctgctgcgggccgtgtaccagtgtgtggccgcccactcggagctgctctgctacttcatcatcatcctcaaccacatggtcacggcctccgccggctccctggtgctgcccgtgctcgtcttcctgtgggccatgctgtcgatcccgaggcccagcaagcgcttctggatgacggccatcgtcttcaccgagatcgcggtggtcgtcaagtacctgttccagtttgggttcttcccctggaacagccacgtggtgctgcggcgctacgagaacaagccctacttcccgccccgcatcctgggcctggagaagactgacggctacatcaagtacgacctggtgcagctcatggcccttttcttccaccgctcccagctgctgtgctatggcctctgggaccatgaggaggactcaccatccaaggagcatgacaagagcggcgaggaggagcagggagccgaggaggggccaggggtgcctgcggccaccaccgaagaccacattcaggtggaagcgagggtcggacccacggacgggaccccagaaccccaagtggagctcaggccccgtgatacgaggcgcatcagtctacgttttagaagaaggaagaaggagggcccagcacggaaaggagcggcagccatcgaagctgaggacagggaggaagaagagggggaggaagagaaagaggcccccacggggagagagaagaggccaagccgctctggaggaagagtaagggcggccgggcggcggctgcagggcttctgcctgtccctggcccagggcacatatcggccgctacggcgcttcttccacgacatcctgcacaccaagtaccgcgcagccaccgacgtctatgccctcatgttcctggctgatgttgtcgacttcatcatcatcatttttggcttctgggcctttgggaagcactcggcggccacagacatcacgtcctccctatcagacgaccaggtacccgaggctttcctggtcatgctgctgatccagttcagtaccatggtggttgaccgcgccctctacctgcgcaagaccgtgctgggcaagctggccttccaggtggcgctggtgctggccatccacctatggatgttcttcatcctgcccgccgtcactgagaggatgttcaaccagaatgtggtggcccagctctggtacttcgtgaagtgcatctacttcgccctgtccgcctaccagatccgctgcggctaccccacccgcatcctcggcaacttcctcaccaagaagtacaatcatctcaacctcttcctcttccaggggttccggctggtgccgttcctggtggagctgcgggcagtgatggactgggtgtggacggacaccacgctgtccctgtccagctggatgtgtgtggaggacatctatgccaacatcttcatcatcaaatgcagccgagagacagagaagaaatacccgcagcccaaagggcagaagaagaagaagatcgtcaagtacggcatgggtggcctcatcatcctcttcctcatcgccatcatctggttcccgctgctcttcatgtcgctggtgcgctccgtggttggggttgtcaaccagcccatcgatgtcaccgtcaccctcaagctgggcggctatgagccgctgttcaccatgagcgcccagcagccgtccatcatccccttcacggcccaggcctatgaggagctgtcccggcagtttgacccccagccgctggccatgcagttcatcagccagtacagccctgaggacatcgtcacggcgcagattgagggcagctccggggcgctgtggcgcatcagtccccccagccgtgcccagatgaagcgggagctctacaacggcacggccgacatcaccctgcgcttcacctggaacttccagagggacctggcgaagggaggcactgtggagtatgccaacgagaagcacatgctggccctggcccccaacagcactgcacggcggcagctggccagcctgctcgagggcacctcggaccagtctgtggtcatccccaatctcttccccaagtacatccgtgcccccaacgggcccgaagccaaccctgtgaagcagctgcagcccaatgaggaggccgactacctcggcgtgcgtatccagctgcggagggagcagggtgcgggggccaccggcttcctcgaatggtgggtcatcgagctgcaggagtgccggaccgactgcaacctgctgcccatggtcattttcagtgacaaggtcagcccaccgagcctcggcttcctggctggctacggcatcatggggctgtacgtgtccatcgtgctggtcatcggcaagttcgtgcgcggattcttcagcgagatctcgcactccattatgttcgaggagctgccgtgcgtggaccgcatcctcaagctctgccaggacatcttcctggtgcgggagactcgggagctggagctggaggaggagttgtacgccaagctcatcttcctctaccgctcaccggagaccatgatcaagtggactcgtgagaaggagtaggagctgctgctggcgcccgagagggaaggagccggcctgctgggcagcgtggccacaaggggcggcactcctcaggccgggggagccactgccccgtccaaggccgccagctgtgatgcatcctcccggcctgcctgagccctgatgctgctgtcagagaaggacactgcgtccccacggcctgcgtggcgctgccgtcccccacgtgtactgtagagttttttttttaattaaaaaatgttttatttatacaaatgg

SEQ ID NO: 13732 - DNA, 8172 bp, Homo sapiens
ggggcggagccagcgcggatcgggtcccggacgcccgagcgccccgcccccgcgcgggcgatgcccagcggcgcggcgggctgcggggcccggcggggcgcgcagaggagcgggccgcggcgctgaggcggcggagcgtggccccgccatgggcttcctgcaccagctgcagctgctgctctggaagaacgtgacgctcaaacgccggagcccgtgggtcctggccttcgagatcttcatccccctggtgctgttctttatcctgctggggctgcgacagaagaagcccaccatctccgtgaaggaagtctccttctacacagcggcgcccctgacgtctgccggcatcctgcctgtcatgcaatcgctgtgcccggacggccagcgagacgagttcggcttcctgcagtacgccaactccacggtcacgcagctgcttgagcgcctggaccgcgtggtggaggaaggcaacctgtttgacccagcgcggcccagcctgggctcagagctcgaggccctacgccagcatctggaggccctcagtgcgggcccgggcacctcggggagccacctggacagatccacagtgtcttccttctctctggactcggtggccagaaacccgcaggagctctggcgtttcctgacgcaaaacttgtcgctgcccaatagcacggcccaagcactcttggccgcccgtgtggacccgcccgaggtctaccacctgctctttggtccctcatctgccctggattcacagtctggcctccacaagggtcaggagccctggagccgcctagggggcaatcccctgttccggatggaggagctgctgctggctcctgccctcctggagcagctcacctgcacgccgggctcgggggagctgggccggatcctcactgtgcctgagagtcagaagggagccctgcagggctaccgggatgctgtctgcagtgggcaggctgctgcgcgtgccaggcgcttctctgggctgtctgctgagctccggaaccagctggacgtggccaaggtctcccagcagctgggcctggatgcccccaacggctcggactcctcgccacaggcgccacccccacggaggctgcaggcgcttctgggggacctgctggatgcccagaaggttctgcaggatgtggatgtcctgtcggccctggccctgctactgccccagggtgcctgcactggccggacccccggacccccagccagtggtgcgggtggggcggccaatggcactggggcaggggcagtcatgggccccaacgccaccgctgaggagggcgcaccctctgctgcagcactggccaccccggacacgctgcagggccagtgctcagccttcgtacagctctgggccggcctgcagcccatcttgtgtggcaacaaccgcaccattgaacccgaggcgctgcggcggggcaacatgagctccctgggcttcacgagcaaggagcagcggaacctgggcctcctcgtgcacctcatgaccagcaaccccaaaatcctgtacgcgcctgcgggctctgaggtcgaccgcgtcatcctcaaggccaacgagacttttgcttttgtgggcaacgtgactcactatgcccaggtctggctcaacatctcggcggagatccgcagcttcctggagcagggcaggctgcagcaacacctgcgctggctgcagcagtatgtagcagagctgcggctgcaccccgaggcactgaacctgtcactggatgagctgccgccggccctgagacaggacaacttctcgctgcccagtggcatggccctcctgcagcagctggataccattgacaacgcggcctgcggctggatccagttcatgtccaaggtgagcgtggacatcttcaagggcttccccgacgaggagagcattgtcaactacaccctcaaccaggcctaccaggacaacgtcactgtttttgccagtgtgatcttccagacccggaaggacggctcgctcccgcctcacgtgcactacaagatccgccagaactccagcttcaccgagaaaaccaacgagatccgccgcgcctactggcggcctgggcccaatactggcggccgcttctacttcctctacggcttcgtctggatccaggacatgatggagcgcgccatcatcgacacttttgtggggcacgacgtggtggagccaggcagctacgtgcagatgttcccctacccctgctacacacgcgatgacttcctgtttgtcattgagcacatgatgccgctgtgcatggtgatctcctgggtctactccgtggccatgaccatccagcacatcgtggcggagaaggagcaccggctcaaggaggtgatgaagaccatgggcctgaacaacgcggtgcactgggtggcctggttcatcaccggctttgtgcagctgtccatctccgtgacagcactcaccgccatcctgaagtacggccaggtgcttatgcacagccacgtggtcatcatctggctcttcctggcagtctacgcggtggccaccatcatgttctgcttcctggtgtctgtgctgtactccaaggccaagctggcctcggcctgcggtggcatcatctacttcctgagctacgtgccctacatgtacgtggcgatccgagaggaggtggcgcatgataagatcacggccttcgagaagtgcatcgcgtccctcatgtccacgacggcctttggtctgggctctaagtacttcgcgctgtatgaggtggccggcgtgggcatccagtggcacaccttcagccagtccccggtggagggggacgacttcaacttgctcctggctgtcaccatgctgatggtggacgccgtggtctatggcatcctcacgtggtacattgaggctgtgcacccaggcatgtacgggctgccccggccctggtacttcccactgcagaagtcctactggctgggcagtgggcggacagaagcctgggagtggagctggccgtgggcacgcaccccccgcctcagtgtcatggaggaggaccaggcctgtgccatggagagccggcgctttgaggagacccgtggcatggaggaggagcccacccacctgcctctggttgtctgcgtggacaaactcaccaaggtctacaaggacgacaagaagctggccctgaacaagctgagcctgaacctctacgagaaccaggtggtctccttcttgggccacaacggggcgggcaagaccaccaccatgtccatcctgaccggcctgttccctccaacgtcgggttccgccaccatctacgggcacgacatccgcacggagatggatgagatccgcaagaacctgggcatgtgcccgcagcacaatgtgctctttgaccggctcacggtggaggaacacctctggttctactcacggctcaagagcatggctcaggaggagatccgcagagagatggacaagatgatcgaggacctggagctctccaacaaacggcactcactggtgcagacattgtcgggtggcatgaagcgcaagctgtccgtggccatcgccttcgtgggcggctctcgcgccatcatcctggacgagcccacggcgggcgtggacccctacgcgcgccgcgccatctgggacctcatcctgaagtacaagccaggccgcaccatccttctgtccacccaccacatggatgaggctgacctgcttggggaccgcattgccatcatctcccatgggaagctcaagtgctgcggctccccgctcttcctcaagggcacctatggcgacgggtaccgcctcacgctggtcaagcggcccgccgagccggggggcccccaagagccagggctggcatccagccccccaggtcgggccccgctgagcagctgctccgagctccaggtgtcccagttcatccgcaagcatgtggcctcctgcctgctggtctcagacacaagcacggagctctcctacatcctgcccagcgaggccgccaagaagggggctttcgagcgcctcttccagcacctggagcgcagcctggatgcactgcacctcagcagcttcgggctgatggacacgaccctggaggaagtgttcctcaaggtgtcggaggaggatcagtcgctggagaacagtgaggccgatgtgaaggagtccaggaaggatgtgctccctggggcggagggcccggcgtctggggagggtcacgctggcaatctggcccggtgctcggagctgacccagtcgcaggcatcgctgcagtcggcgtcatctgtgggctctgcccgtggcgacgagggagctggctacaccgacgtctatggcgactaccgccccctctttgataacccacaggacccagacaatgtcagcctgcaagaggtggaggcagaggccctgtcgagggtcggccagggcagccgcaagctggacggcgggtggctgaaggtgcgccagttccacgggctgctggtcaaacgcttccactgcgcccgccgcaactccaaggcactcttctcccagatcttgctgccagccttcttcgtctgcgtggccatgaccgtggccctgtccgtcccggagattggtgatctgcccccgctggtcctgtcaccttcccagtaccacaactacacccagccccgtggcaatttcatcccctacgccaacgaggagcgccgcgagtaccggctgcggctatcgcccgacgccagcccccagcagctcgtgagcacgttccggctgccgtcgggggtgggtgccacctgcgtgctcaagtctcccgccaacggctcgctggggcccacgttgaacctgagcagcggggagtcgcgcctgctggcggctcggttcttcgacagcatgtgtctggagtccttcacacaggggctgccactgtccaatttcgtgccacccccaccctcgcccgccccatctgactcgccagcgtccccggatgaggacctgcaggcctggaacgtctccctgccgcccaccgctgggccagaaatgtggacgtcggcaccctccctgccgcgcctggtacgggagcccgtccgctgcacctgctctgcgcagggcaccggcttctcctgccccagcagtgtgggcgggcacccgccccagatgcgggtggtcacaggcgacatcctgaccgacatcaccggccacaatgtctctgagtacctgctcttcacctccgaccgcttccgactgcaccggtatggggccatcacctttggaaacgtcctgaagtccatcccagcctcatttggcaccagggccccacccatggtgcggaagatcgcggtgcgcagggctgcccaggttttctacaacaacaagggctatcacagcatgcccacctacctcaacagcctcaacaacgccatcctgcgtgccaacctgcccaagagcaagggcaacccggcggcttacggcatcaccgtcaccaaccaccccatgaataagaccagcgccagcctctccctggattacctgctgcagggcacggatgtcgtcatcgccatcttcatcatcgtggccatgtccttcgtgccggccagcttcgttgtcttcctcgtggccgagaagtccaccaaggccaagcacctgcagtttgtcagcggctgcaaccccatcatctactggctggcgaactacgtgtgggacatgctcaactacctggtccccgctacctgctgtgtcatcatcctgtttgtgttcgacctgccggcctacacgtcgcccaccaacttccctgccgtcctctccctcttcctgctctatgggtggtccatcacgcccatcatgtacccggcctccttctggttcgaggtccccagctccgcctacgtgttcctcattgtcatcaatctcttcatcggcatcaccgccaccgtggccaccttcctgctacagctcttcgagcacgacaaggacctgaaggttgtcaacagttacctgaaaagctgcttcctcattttccccaactacaacctgggccacgggctcatggagatggcctacaacgagtacatcaacgagtactacgccaagattggccagtttgacaagatgaagtccccgttcgagtgggacattgtcacccgcggactggtggccatggcggttgagggcgtcgtgggcttcctcctgaccatcatgtgccagtacaacttcctgcggcggccacagcgcatgcctgtgtctaccaagcctgtggaggatgatgtggacgtggccagtgagcggcagcgagtgctccggggagacgccgacaatgacatggtcaagattgagaacctgaccaaggtctacaagtcccggaagattggccgtatcctggccgttgaccgcctgtgcctgggtgtgcgtcctggcgagtgcttcgggctcctgggcgtcaacggtgcgggcaagaccagcaccttcaagatgctgaccggcgacgagagcacgacggggggcgaggccttcgtcaatggacacagcgtgctgaaggagctgctccaggtgcagcagagcctcggctactgcccgcagtgtgacgcgctgttcgacgagctcacggcccgggagcacctgcagctgtacacgcggctgcgtgggatctcctggaaggacgaggcccgggtggtgaagtgggctctggagaagctggagctgaccaagtacgcagacaagccggctggcacctacagcggcggcaacaagcggaagctctccacggccatcgccctcattgggtacccagccttcatcttcctggacgagcccaccacaggcatggaccccaaggcccggcgcttcctctggaacctcatccttgacctcatcaagacagggcgttcagtggtgctgacatcacacagcatggaggagtgcgaggcgctgtgcacgcggctggccatcatggtgaacggtcgcctgcggtgcctgggcagcatccagcacctgaagaaccggtttggagatggctacatgatcacggtgcggaccaagagcagccagagtgtgaaggacgtggtgcggttcttcaaccgcaacttcccggaagccatgctcaaggagcggcaccacacaaaggtgcagtaccagctcaagtcggagcacatctcgctggcccaggtgttcagcaagatggagcaggtgtctggcgtgctgggcatcgaggactactcggtcagccagaccacactggacaatgtgttcgtgaactttgccaagaagcagagtgacaacctggagcagcaggagacggagccgccatccgcactgcagtcccctctcggctgcttgctcagcctgctccggccccggtctgcccccacggagctccgggcacttgtggcagacgagcccgaggacctggacacggaggacgagggcctcatcagcttcgaggaggagcgggcccagctgtccttcaacacggacacgctctgctgaccacccagagctgggccagggaggacacgctccactgaccacccagagctgggccagggactcaacaatggggacagaagtcccccagtgcctgccagggcctggagtggaggttcaggaccaaggggcttctggtcctccagcccctgtactcggccatgccctgcggtcactgcggttgccgcccctaattgtgccaaaggctgacccggcccgggctgcgtacacccttgccctgctttgccttaaagcctcggggtctgcccggcccctcgcccctgcctggcactgctcaccgcccaaggcgacgccggctggaccaggcactgctggcctttctcctgcccggcctcggaaccagcttttctctcttacgatgaaggctgatgccgagagcgggctgtgggcggagctgggtcagtcccgtatttattttgctttgagaagaggctcctctggccctgctctcctgcagggaggtggctgtcccgcgggaagccatcagcttgggccagctggcaggtggcaggaatggagaagctgaccctgctggccaggcaaggggccagaccccccccaacccccagctgccatcgctctcccacccagcttggccccctgcccgcccacctccctgggagccgggcctgtacatagcgcacagatgtttgttttaaataaataaacaaaatgtcaaaaaaaaaaaaaaaaaa

SEQ ID NO: 13733 - DNA, 2339 bp, Homo sapiens
gccgcccggatcgccgccgccgccgccgcacggtggccttttgtgtttttcagtacgtggcatgcctggatgtccctgccctggctgtggcatggcgggcccaaggctcctcttcctcactgcccttgccctggagctcttgggaagggctgggggttcccagccggccctccggagccgggggactgcgacggcctgtcgcctggacaacaaggaaagcgagtcctggggggctctgctgagcggagagcggctggacacctggatctgctccctcctgggttccctcatggtggggctcagtggggtcttcccgttgcttgtcattcccctagagatggggaccatgctgcgctcagaagctggggcctggcgcctgaagcagctgctcagcttcgccctggggggactcttgggcaatgtgtttctgcatctgctgcccgaagcctgggcctacacgtgcagcgccagccctggtggtgaggggcagagcctgcagcagcagcaacagctggggctgtgggtcattgctggcatcctgaccttcctggcgttggagaagatgttcctggacagcaaggaggaggggaccagccaggcccccaacaaagaccccactgctgctgccgccgcactcaatggaggccactgtctggcccagccggctgcagagcccggcctcggtgccgtggtccggagcatcaaagtcagcggctacctcaacctgctggccaacaccatcgataacttcacccacgggctggctgtggctgccagcttccttgtgagcaagaagatcgggctcctgacaaccatggccatcctcctgcatgagatcccccatgaggtgggcgactttgccatcctgctccgggccggctttgaccgatggagcgcagccaagctgcaactctcaacagcgctggggggcctactgggcgctggcttcgccatctgtacccagtcccccaagggagtagaggagacggcagcctgggtcctgcccttcacctctggcggctttctctacatcgccttggtgaacgtgctccctgacctcttggaagaagaggacccgtggcgctccctgcagcagctgcttctgctctgtgcgggcatcgtggtaatggtgctgttctcgctcttcgtggattaactttccctgatgccgacgcccctgccccctgcagcaataagatgctcggattcactctgtggccgcatatgtgagaggcagagagggcgagtggctgcgagagagaatgagcctcccgccagacaggagggaggtgcgtgtggatgtatgtggtgtgcacatgtggccagaggtgtgtgcgcgagaccgacactgtgatccctgtgctgggtccggggcccagtgtagcgcctgtccccagccatgctgtggttacctctccttgccgccctgtcaccttcacctcctggagtaagcagcgaggaagagcagcactggtcccaagcagaggccttgccctgctgggaccccgggagtgagagcagcccaaggatcccagggtgcagggaactccagagctgcccacctcccactgccccctcagcacacacacagtccccaggcggcctaggggccaaggctggggcggctttggtcccttttcctggcccttccttccccacttctaagccaaagaaaggagaggcaggtgctcctgtaccccagccccactcagcactgacagtccccagctcctagtagtgagctgggaggcgcttcctaagaccctttcctcagggctgccctgggagctcattcctggccaacacgccctggcagcaccagcagctcttgccacctccagctgccaaacagcagcctgccgggcagggagcagccccaggccagagaggcctcccggtccagctcagggatgctcctgccagcacaggggccagggactcctggagcaggcacatagtgagcccgggcagccctgcccagctcaggcccctttccttccccattgaggttggggtaggtgggggcggtgagggctccacgttgtcagcgctcaggaatgtgctccggcagagtgctgaagccataatccccaaccatttcccttggctgacgcccaggtactcagctggcccactccacagccaggcctggccctgcccttcaccgtggatgttttcagaagtggccatcgagaggtctggatggttttatagcaactttgctgtgattccgtttgtatctgtaaatatttgttctatagataagatacaaataaatattatccacataaaaaaaaaaaaaaaaaaaaaaaaaaaaaaaaaaaaaaaaaaaaaaaaaa

SEQ ID NO: 13734 - DNA, 2493 bp, Homo sapiens
ccctccgggcaggggaggtaggcctgggcctgacgccggccacgcagcggcgggagagtgagcactcgggcggcggcgtcctggagacccgcgagagatggaagcggcggcgacgccggcggctgccggggcggcgaggcgcgaggagctagatatggatgtaatgaggcccttgataaatgagcagaattttgatgggacatcagatgaagaacatgagcaagagcttctgcctgttcagaagcattaccaacttgatgatcaagagggcatttcatttgtacaaactcttatgcaccttcttaaaggaaatattggaactggccttttaggacttccattggcaataaaaaatgcaggcatagtgcttggaccaatcagccttgtgtttataggaattatttctgttcactgtatgcacatattggtacgttgcagtcactttctatgtctgaggtttaaaaagtcaacattaggttatagtgacactgtgagctttgctatggaagtgagtccttggagttgtcttcagaagcaagcagcatgggggcggagtgtggttgacttttttctggtgataacacagctgggattctgtagtgtttatattgtcttcttagctgaaaatgtgaaacaagttcatgaaggattcctggagagtaaagtgtttatttcaaatagtaccaattcatcaaacccttgtgagagaagaagtgttgacctaaggatatatatgctttgctttcttccatttataattcttttggtcttcattcgtgaactaaagaatctatttgtactttcattccttgccaacgtttccatggctgtcagtcttgtgataatttaccagtatgttgtcaggaacatgccagatccccacaaccttccaatagtggctggttggaagaaatacccactcttttttggtactgctgtatttgcttttgaaggcataggagtggtccttccactggaaaaccaaatgaaagaatcaaagcgtttccctcaagcgttgaatattggcatggggattgttacaactttgtatgtaacattagctactttaggatatatgtgtttccatgatgaaatcaaaggcagcataactttaaatcttccccaagatgtatggttatatcaatcagtgaaaattctatattcctttggcatttttgtgacatattcaattcagttctatgttccagcagagatcattatccctgggatcacatccaaatttcatactaaatggaagcaaatctgtgaatttgggataagatccttcttggttagtattacttgtgccggagcaattcttattcctcgtttagacattgtgatttccttcgttggagctgtgagcagcagcacattggccctaatcctgccacctttggttgaaattcttacattttcgaaggaacattataatatatggatggtcctgaaaaatatttctatagcattcactggagttgttggcttcttattaggtacatatataactgttgaagaaattatttatcctactcccaaagttgtagctggcactccacagagtccttttctaaatttgaattcaacatgcttaacatctggtttgaaatagtaaaagcagaatcatgagtcttctatttttgtcccatttctgaaaattatcaagataactagtaaaatacattgctatatacataaaaatggtaacaaactctgttttctttggcacgatattaatattttggaagtaatcataactctttaccagtagtggtaaacctatggaaaatccttgcttttaagtgttagcaatagttcaaaaaattaagttctgaaaattgaaaaaattaaaatgtaaaaaaattaaagaataaaaatacttctattattcttttatctcagtaagaaataccttaaccaagttatctctcttttatgctactcttttgccactcacttgagaacagaataggatttcaacaataagagaataaaataagaacatgtataacaaaaagctctctccagatcatccctgtgaatgccaaagtaaactttatgtacagtgtaaaaaaaaaaaatctcagttatgtttttattagccaaattctaatgattggctcctggaagtatagaaaactcccattaacataatataagcatcagaaaattgcaaacactagaattaattttacactctaatggtagttgatcttcatagtcaagaggcactgttcaagatcatgacttagtgtttcaatgaaatttgaaaagggactttaaaacttatccagtgcaactcccttgtttttcgtcagaggaaaaggaggcctagaaaggttaagtaacttggtcgagaccactcagccttgagatcaagaaaacctaatcttttgactcccaggccaggatgttttatttctcacatcatgtccaagaaaaagaataaattatgttcagcttaaaaaaaaaaaaaaaaaaaaaaaaaaaaaa

SEQ ID NO: 13735 - DNA, 5078 bp, Homo sapiens
taatactcctttattccctgttttaaaaatttttttaaatttgatacaataattatacataataatggagtaccatgtgagattcaatccacatatacattgtgaaatgatcaaattaggatagttagcatgcacatcacccccaaataattattacttttgtggtgagaacacttaaaattgtctcttttagaaatatacgttattattaaccatagtcacctcgctgtgcaatagaacaccagaacttattcctcctaaatgtaactttttacccattgaccactccctcctcacccccctctctcctccccacccctggtaaccactgttctgttatctcctatgatagcaactttttagcttctgcatgtgagattgtacggtagttgcctttctgtgcctggattatttcatttagcataatgtccttcgggtatatccctgttgctgcaaaagacaggatttctctctctttttctggttgaatagtattccattgtcagagaatgttgtaagactaggaaaggaacactgcaggctggagccctggggaaatggtctgaggcaggtggtgggactagagctggggtctggcaaacaggctgggtttgattgtcagcataatagagagcactcatgtgccagctgggtgggaggagcagccgagtgaagaaggggaagcctctcaggaagcatgtgcagggtttatggtaatgagcagaccagcaggtacgtagtgggagaggggtgtgatggggcagaggaacttacgttatgatagtacaagacagaggttgagcctcattttaataggcattgtggtgggtgttgaatagtgatggaatgtatgggtctggaatcaggctgcctggtcaagggctctgaaacatgagtgtgcatcagaatcacctcgaggcttgttaaaggataggctgtggaccacatctcctcagttgctgattcagtgggtgtgggtggggcctgagaattcacatttcccactggtgatgctgctgttactgattgggaccacatttggggaacactggtctagaattgagaggttggcaaaccttctctgttaagaggtagatagtaaatattttaggccttctgggctacaaagagtatctgttacatattttttattgcttttcatgacccattaagcatatatatatcattctctgccatatacaaacaggctgttgggggagtgaggatgatgtagggaaggtggggcatggtttaataacccctgggccatgcctagatgatcagtcctctgccacatagctggctgacctttgccaagttaatcaccttttacctttattttctcatgtttctaataaaacagagacgataatattcatacttcttaccatatagaacttctgaggattcagtgagcaaagccacaaaagatggtatgtcacaatatctgggatatagctagaatttataatttatttttactctgttgataggcaatgggaaaacagtaagaggcagaccaacagtgatccagggctctgaaagctaattgcttcaagatcctgctaccattttcttttgggccgcttgcaaagaagaatcctttgactgaagcatgtatgtacactctgaagtacagcctgggttagtctcttataagggatcggatcattgctcagctctcccttgagtggcacttagaaaatggcgctattcgtaagctgactggtattgggcccaggactctggctgaaggggtgggcatgctggtaaccatttgcaacctatgctcaggtcctacttgttgggaagccctgattgagaagagtggcctggtctgtgctggcattagataggatctggctgcattaatattgaaactactctgccttttaatgtctcattttgcctcatggtgggagtgaaagtgagaaccacagaaaatctgcctgccaggtgttccacatttcttgtgctacagcatgcaagtgagcagtgaggtgtaccttttcctcatgtagctgggaaagcaatacccctgcttgtacctctggcatatcttctctgtgctggtgcacctagagaggttgcctggtggccctgagagagccatctcatcactaaacactgatggtgaaaagctggccatgctcaaataagatgtagcaatctacctcttctttgtctagttacccccaagggggcatccactttcttgctcacctcaccagttgcatgttctagtccttgccagaagcacataataatgactttgtaagcttaagttacaggcacacaaaagggcctgatggtgatatgactccaccctccccgtttttgctgacattccgccaaatatccttctgtctcctccccaccttgcaaaacaaacttcctgttttgaatttggtccaggctggaacagccccaccacacctgttaacacacgcagacgcacacttcccccttcataattgcttagcttcttgttgcctagccagatttcccctcagcttacagttcctgaatcataagatattgaaccagcaaatttaagagttgacattttacttagaggtattcaagtgaaaacatggcttctggtttattttgctgtattgtgccatgaccacttggctaattcttctcctccttcacatcagaatggaagtgaggaaaggcaaccagctgacacaggagccagagtgagaccagcagactctcacactcaacctacaccatgaatttgtgtctatcttctacgcgttaagagccaaggacaggtgaagttgccagagagcaatggctctcttcactccgtggaagttgtcctctcagaagctgggctttttcctggtgacttttggcttcatttggggtatgatgcttctgcactttaccatccagcagcgaactcagcctgaaagcagctccatgctgcgcgagcagatcctggacctcagcaaaaggtacatcaaggcactggcagaagaaaacaggaatgtggtggatgggccatacgctggagtcatgacagcttatgatctgaagaaaacccttgctgtgttattagataacattttgcagcgcattggcaagttggagtcgaaggtggacaatcttgttgtcaatggcaccggaacaaactcaaccaactccactacagctgttcccagcttggttgcacttgagaaaattaatgtggcagatatcattaacggagctcaagaaaaatgtgtattgcctcctatggacggctaccctcactgtgagggaaagatcaagtggatgaaagacatgtggcgttcagatccctgctacgcagactatggagtggatggatccacctgctctttttttatttacctcagtgaggttgaaaattggtgtcctcatttaccttggagagcaaaaaatccctacgaagaagctgatcataattcattggcggaaattcgtacagattttaatattctctacagtatgatgaaaaagcatgaagaattccggtggatgagactacggatccggcgaatggctgacgcatggatccaagcaatcaagtccctggcagaaaagcagaaccttgaaaagagaaagcggaagaaagtcctcgttcacctgggactcctgaccaaggaatctggatttaagattgcagagacagctttcagtggtggccctcttggtgaattagttcaatggagtgatttaattacatctctgtacttactgggccatgacattaggatttcagcttcactggctgagctcaaggaaatcatgaagaaggttgtaggaaaccgatctggctgcccaactgtaggagacagaattgttgagctcatttacattgatattgtaggacttgctcaattcaagaaaactcttggaccatcctgggttcattaccagtgcatgctccgagtccttgattcatttggtactgaacccgaatttaatcatgcaaattatgcccaatcgaaaggccacaagaccccttggggaaaatggaatctgaaccctcagcagttttataccatgttccctcataccccagacaacagctttctggggtttgtggttgagcagcacctgaactccagtgatatccaccacattaatgaaatcaaaaggcagaaccagtcccttgtgtatggcaaagtggatagcttctggaagaataagaagatctacttggacattattcacacatacatggaagtgcatgcaactgtttatggctccagcacaaagaatattcccagttacgtgaaaaaccatggtatcctcagtggacgggacctgcagttccttcttcgagaaaccaagttgtttgttggacttgggttcccttacgagggcccagctcccctggaagctatcgcaaatggatgtgcttttctgaatcccaagttcaacccacccaaaagcagcaaaaacacagactttttcattggcaagccaactctgagagagctgacatcccagcatccttacgctgaagttttcatcgggcggccacatgtgtggactgttgacctcaacaatcaggaggaagtagaggatgcagtgaaagcaattttaaatcagaagattgagccatacatgccatatgaatttacgtgcgaggggatgctacagagaatcaatgctttcattgaaaaacaggacttctgccatgggcaagtgatgtggccacccctcagcgccctacaggtcaagcttgctgagcccgggcagtcctgcaagcaggtgtgccaggagagccagctcatctgcgagccttctttcttccagcacctcaacaaggacaaggacatgctgaagtacaaggtgacctgccaaagctcagagctggccaaggacatcctggtgccctcctttgaccctaagaataagcactgtgtgtttcaaggtgacctcctgctcttcagctgtgcaggcgcccaccccaggcaccagagggtctgcccctgccgggacttcatcaagggccaggtggctctctgcaaagactgcctatagcagctacctgctcagccctgcaccatgctgctggggaagacagtggcccc

SEQ ID NO: 13736 - DNA, 2589 bp, Homo sapiens
atgttgaggaacagcaccttcaaaaacatgcagcgccggcacacaacgctgagggagaagggccgtcgccaggccatccggggtcccgcctacatgttcaacgagaagggcaccagtctgacgcccgaggaggagcgcttcctggactcggctgagtatggcaacatcccggtggtccggaaaatgctggaggagtccaagacccttaacttcaactgtgtggactacatggggcagaacgctctgcagctggccgtgggcaacgagcacctagaggtcacggagctgctgctgaagaaggagaacctggcacgggtgggggacgcgctgctgctggccatcagcaagggctatgtgcgcatcgtggaggccatcctcaaccacccggccttcgcgcagggccagcgcctgacgctcagcccgctggaacaggagctgcgcgacgacgacttctatgcctacgacgaggacggcacgcgcttctcccacgacatcacgcccatcatcctggcggcgcactgccaggagtatgagatcgtgcacatcctgctgctcaagggcgcccgcatcgagcggccccacgactacttctgcaagtgcaatgagtgcaccgagaaacagcggaaagactccttcagccactcgcgctcgcgcatgaacgcctacaaaggactggcgagtgctgcctacttgtccctgtccagcgaagaccctgtcctcaccgccctggagctcagcaacgagttagccagactagccaacattgagactgaatttaagaacgattacaggaagttatctatgcaatgcaaggattttgtagtgggcgtgctggacctgtgccgagacacagaagaggtggaagcaattttaaacggtgatgtgaacttccaagtctggtccgaccaccaccgtccaagtctgagccggatcaaactcgccattaaatatgaagtcaagaagttcgttgctcatcctaactgtcagcagcaattgcttaccatgtggtatgaaaatctctcaggcttacgtcaacagtctatcgctgtgaaattcctggctgtctttggagtctccataggcctcccttttctcgccatagcctattggattgctccgtgcagcaagctaggacgaaccctgaggagccctttcatgaagtttgtagctcatgcagtttcttttacaatcttcttgggattattagttgtgaatgcatctgaccgatttgaaggtgttaaaaccctgccaaacgaaaccttcacagactacccaaaacaaatcttcagagtgaaaaccacacagttctcctggacagaaatgctcattatgaagtgggtcttaggaatgatttggtccgaatgcaaggaaatctgggaggaggggccacgggagtacgtgctgcacttgtggaacctgctagatttcgggatgctgtccatcttcgtggcctccttcacagcacgcttcatggccttcctgaaggccacggaggcacagctgtacgtggaccagcacgtgcaggacgacacgctgcacaatgtctcgcttccgccggaagtggcatacttcacctacgccagggacaagtggtggccttcagaccctcagatcatatcggaagggctctacgcgatagccgtcgtgctgagcttctctcgcattgcatacattctgccagccaacgagagttttgggcccctgcagatctcgctagggagaactgtgaaagatatcttcaagttcatggtcattttcatcatggtatttgtggccttcatgattgggatgttcaacctgtactcttactaccgaggtgccaaatacaacccagcgtttacaacggttgaagaaagttttaaaactttgttttggtccatattcggcttatctgaagtaatctcagtggtgctgaaatacgaccacaaattcatcgagaacattggctacgttctctacggcgtttataacgtcaccatggtggtagtgttgctcaacatgctaatagccatgataaacaactcctatcaggaaattgaggaggatgcagatgtggaatggaagttcgcccgagcaaaactctggctgtcttactttgatgaaggaagaactctacctgctccttttaatctagtgccaagtcctaaatcattttattatctcataatgagaatcaagatgtgcctcataaaactctgcaaatctaaggccaaaagctgtgaaaatgaccttgaaatgggcatgctgaattccaaattcaagaagactcgctaccaggctggcatgaggaattctgaaaatctgacagcaaataacactttgagcaagcccaccagataccagaaaatcatgaaacggctcataaaaagatacgtcctgaaagcccaggtggacagagaaaatgacgaagtcaatgaaggcgagctgaaggaaatcaagcaagatatctccagcctgcgctatgagcttcttgaggaaaaatctcaagctactggtgagctggcagacctgattcaacaactcagcgagaagtttggaaagaacttaaacaaagaccacctgagggtgaacaagggcaaagacatttag

SEQ ID NO: 13737 - DNA, 4296 bp, Homo sapiens
cggagcagcgctgcggccggcggcgggacggagcggccggggcctggggctgcctgccgggcggccgggcgcggcgagcccagggaggcagcgtccatggagcaaaaggaatgccaggatcctgcacaggcagacgcgggccagcctcagcaccgacagccgacgcgcagatagcagagccatccttggggttgaaccatgattccggtgacagagctccgctactttgcggacacgcagccagcataccggatcctgaagccgtggtgggatgtgttcacagactacatctctatcgtcatgctgatgattgccgtcttcggggggacgctgcaggtcacccaagacaagatgatctgcctgccttgtaagtgggtcaccaaggactcctgcaatgattcgttccggggctgggcagcccctggcccggagcccacctaccccaactccaccattctgccgacccctgacacgggccccacaggcatcaagtatgacctggaccggcaccagtacaactacgtggacgctgtgtgctatgagaaccgactgcactggtttgccaagtacttcccctacctggtgcttctgcacacgctcatcttcctggcctgcagcaacttctggttcaaattcccgcgcaccagctcgaagctggagcactttgtgtctatcctgctgaagtgcttcgactcgccctggaccacgagggccctgtcggagacagtggtggaggagagcgaccccaagccggccttcagcaagatgaatgggtccatggacaaaaagtcatcgaccgtcagtgaggacgtggaggccaccgtgcccatgctgcagcggaccaagtcacggatcgagcagggtatcgtggaccgctcagagacgggcgtgctggacaagaaggagggggagcaagccaaggcgctgtttgagaaggtgaagaagttccggacccatgtggaggagggggacattgtgtaccgcctctacatgcggcagaccatcatcaaggtgatcaagttcatcctcatcatctgctacaccgtctactacgtgcacaacatcaagttcgacgtggactgcaccgtggacattgagagcctgacgggctaccgcacctaccgctgtgcccaccccctggccacactcttcaagatcctggcgtccttctacatcagcctagtcatcttctacggcctcatctgcatgtatacactgtggtggatgctacggcgctccctcaagaagtactcgtttgagtcgatccgtgaggagagcagctacagcgacatccccgacgtcaagaacgacttcgccttcatgctgcacctcattgaccaatacgacccgctctactccaagcgcttcgccgtcttcctgtcggaggtgagtgagaacaagctgcggcagctgaacctcaacaacgagtggacgctggacaagctccggcagcggctcaccaagaacgcgcaggacaagctggagctgcacctgttcatgctcagtggcatccctgacactgtgtttgacctggtggagctggaggtcctcaagctggagctgatccccgacgtgaccatcccgcccagcattgcccagctcacgggcctcaaggagctgtggctctaccacacagcggccaagattgaagcgcccgcgctggccttcctgcgcgagaacctgcgggcgctgcacatcaagttcaccgacatcaaggagatcccgctgtggatctatagcctgaagacactggaggagctgcacctgacgggcaacctgagcgcggagaacaaccgctacatcgtcatcgacgggctgcgggagctcaaacgcctcaaggtgctgcggctcaagagcaacctaagcaagctgccacaggtggtcacagatgtgggcgtgcacctgcagaagctgtccatcaacaatgagggcaccaagctcatcgtcctcaacagcctcaagaagatggcgaacctgactgagctggagctgatccgctgtgacctggagcgcatcccccactccatcttcagcctccacaacctgcaggagattgacctcaaggacaacaacctcaagaccatcgaggagatcatcagcttccagcacctgcaccgcctcacctgccttaagctgtggtacaaccacatcgcctacatccccatccagatcggcaacctcaccaacctggagcgcctctacctgaaccgcaacaagatcgagaagatccccacccagctcttctactgccgcaagctgcgctacctggacctcagccacaacaacctgaccttcctccctgccgacatcggcctcctgcagaacctccagaacctagccatcacggccaaccggatcgagacgctccctccggagctcttccagtgccggaagctgcgggccctgcacctgggcaacaacgtgctgcagtcactgccctccagggtgggcgagctgaccaacctgacgcagatcgagctgcggggcaaccggctggagtgcctgcctgtggagctgggcgagtgcccactgctcaagcgcagcggcttggtggtggaggaggacctgttcaacacactgccacccgaggtgaaggagcggctgtggagggctgacaaggagcaggcctgagcgaggccggcccagcacagcaagcagcaggaccgctgcccagtcctcaggcccggaggggcaggcctagcttctcccagaactcccggacagccaggacagcctcgtggctgggcaggagcctggggccgcttgtgagtcaggccagagcgagaggacagtatctgtggggctggccccttttctccctctgagactcacgtcccccagggcaagtgcttgtggaggagagcaagtctcaagagcgcagtatttggataatcagggtctcctccctggaggccagctctgccccaggggctgagctgccaccagaggtcctgggaccctcactttagttcttggtatttatttttctccatctcccacctccttcatccagataacttatacattcccaagaaagttcagcccagatggaaggtgttcagggaaaggtgggctgccttttccccttgtccttatttagcgatgccgccgggcatttaacacccacctggacttcagcagagtggtccggggcgaaccagccatgggacggtcacccagcagtgccgggctgggctctgcggtgcggtccacgggagagcaggcctccagctggaaaggccaggcctggagcttgcctcttcagtatttgtggcagttttagttttttgtttttttttttttaatcaaaaaacaatttttttaaaaaaaaagctttgaaaatggatggtttgggtattaaaaagaaaaaaaaaacttaaaaaaaaaaagacactaacggccagtgagttggagtctcagggcagggtggcagtttcccttgagcaaagcagccagacgttgaactgtgtttcctttccctgggcgcagggtgcagggtgtcttccggatctggtgtgaccttggtccaggagttctatttgttcctggggagggaggtttttttgtttgttttttgggtttttttggtgtcttgttttctttctcctccatgtgtcttggcaggcactcatttctgtggctgtcggccagagggaatgttctggagctgccaaggagggaggagactcgggttggctaatccccggatgaacggtgctccattcgcacctcccctcctcgtgcctgccctgcctctccacgcacagtgttaaggagccaagaggagccacttcgcccagactttgtttccccaccgcctgcggcatgggtgtgtccagtgccaccgctggcctccgctgcttccatcagccttgtcgccacctggtccttcatgaagagcagacacttagaggctggtcgggaatggggaggtcgcccctgggagggcaggcgttggttccaagccggttcccgtccctggcgcctggagtgcacacagcccagtcggcacctggtggctagaagccaccctgctttagatcactcgggtccccaccttagaagggtccccgccttagatcaatcacgtggacactaaggcacgttttagagtctcttgtcttaatgattatgtccatccgtctgtccgtccatttgtgttttctgcgtcgtgtcattggatataatcctcagaaataatgcacactagcctctgacaaccatgaagcaaaaatccgttacatgtgggtctgaacttgtagactcggtcacagtatcaaataaaatctataacag

SEQ ID NO: 13738 - DNA, 1362 bp, Homo sapiens
aaaaccttgaggtgattcatcttccaggctctccttccatcaagtctctcctccctagcgctctgggtccttaatggcagcagccgccgctaccaagatccttctgtgcctcccgcttctgctcctgctgtccggctggtcccgggctgggcgagccgaccctcactctctttgctatgacatcaccgtcatccctaagttcagacctggaccacggtggtgtgcggttcaaggccaggtggatgaaaagacttttcttcactatgactgtggcaacaagacagtcacacctgtcagtcccctggggaagaaactaaatgtcacaacggcctggaaagcacagaacccagtactgagagaggtggtggacatacttacagagcaactgcgtgacattcagctggagaattacacacccaaggaacccctcaccctgcaggccaggatgtcttgtgagcagaaagctgaaggacacagcagtggatcttggcagttcagtttcgatgggcagatcttcctcctctttgactcagagaagagaatgtggacaacggttcatcctggagccagaaagatgaaagaaaagtgggagaatgacaaggttgtggccatgtccttccattacttctcaatgggagactgtataggatggcttgaggacttcttgatgggcatggacagcaccctggagccaagtgcaggagcaccactcgccatgtcctcaggcacaacccaactcagggccacagccaccaccctcatcctttgctgcctcctcatcatcctcccctgcttcatcctccctggcatctgaggagagtcctttagagtgacaggttaaagctgataccaaaaggctcctgtgagcacggtcttgatcaaactcgcccttctgtctggccagctgcccacgacctacggtgtatgtccagtggcctccagcagatcatgatgacatcatggacccaatagctcattcactgccttgattccttttgccaacaattttaccagcagttatacctaacatattatgcaattttctcttggtgctacctgatggaattcctgcacttaaagttctggctgactaaacaagatatatcattttctttcttctctttttgtttggaaaatcaagtacttctttgaatgatgatctctttcttgcaaatgatattgtcagtaaaataatcacgttagacttcagacctctggggattctttccgtgtcctgaaagagaatttttaaattatttaataagaaaaaatttatattaatgattgtttcctttagtaatttattgttctgtactgatatttaaataaagagttctatttcccaaaaaaaaaaaaaaaaaa

SEQ ID NO: 13739 - DNA, 741 bp, Homo sapiens
atggcagcagccgccatcccagctttgcttctgtgcctcccgcttctgttcctgctgttcggctggtcccgggctaggcgagacgaccctcactctctttgctatgacatcaccgtcatccctaagttcagacctggaccacggtggtgtgcggttcaaggccaggtggatgaaaagacttttcttcactatgactgtggcaacaagacagtcacacccgtcagtcccctggggaagaaactaaatgtcacaacggcctggaaagcacagaacccagtactgagagaggtggtggacatacttacagagcaactgcttgacattcagctggagaattacacacccaaggaacccctcaccctgcaggcaaggatgtcttgtgagcagaaagctgaaggacacagcagtggatcttggcagttcagtatcgatggacagaccttcctactctttgactcagagaagagaatgtggacaacggttcatcctggagccagaaagatgaaagaaaagtgggagaatgacaaggatgtggccatgtccttccattacatctcaatgggagactgcataggatggcttgaggacttcttgatgggcatggacagcaccctggagccaagtgcaggagcaccactcgccatgtcctcaggcacaacccaactcagggccacagccaccaccctcatcctttgctgcctcctcatcatcctcccctgcttcatcctccctggcatctga

SEQ ID NO: 13740 - DNA, 6345 bp, Homo sapiens
ggggggtctgctctgtgcggtgaagcttctcttcttggcacctgcctggcatcggaagagggccccttctccctccctgggcttttatgtggacactgtaatgcctcagttttctttctttctttttgtttttgacacagggtctcactctatcacccaagctggagtgcagtggcaccatcttagctcaccgcagcctcaaactccccagctcgggtgattcttcctgcctcagcctcctgagtagtagcagctgggaccacagacgtctgccaccaagcccagctgcaccgccagttccggggagggccctgggccagcggctgtccgccccccctcctttataaagtcctggcctcgggacagcccgcacagctgcccagcctgcggagacgggacagccctgtcccactcactctttcccctgctgctcctgccggcagctcagctggaaccatgggaggccgcgtctttctcgtctttctcgcattctgtgtctggctgactctgccgggagctgaaacccaggactccaggggctgtgcccggtggtgccctcaggactcctcgtgtgtcaatgccaccgcctgtcgctgcaatccagggttcagctctttttctgagatcatcaccacccccatggagacttgtgacgacatcaacgagtgtgcaacactgtcgaaagtgtcatgcggaaaattctcggactgctggaacacagaggggagctacgactgcgtgtgcagcccaggatatgagcctgtttctggggcaaaaacattcaagaatgagagcgagaacacgtgtcaagatatgactttctccacctggaccccgccccctggagtccacagccagacgctttcccgattcttcgacaaagtccaggacctgggcagagactacaagccaggcttggccaataacaccatccagagcatcttacaggcgctggatgagctgctggaggcccctggggacctggagaccctgccccgcttacagcagcactgtgtggccagtcacctgctggatggcctagaggatgtcctcagaggcctgagcaagaacctttccaatgggctgttgaacttcagttatcctgcaggcacagaattgtccctggaggtgcagaagcaagtagacaggagtgtcaccttgagacagaatcaggcagtgatgcagctcgactggaatcaggcacagaaatctggtgacccaggcccttctgtggtgggccttgtctccattccagggatgggcaagttgctggctgaggcccctctggtcctggaacctgagaagcagatgcttctgcatgagacacaccagggcttgctgcaggacggctcccccatcctgctctcagatgtgatctctgcctttctgagcaacaacgacacccaaaacctcagctccccagttaccttcaccttctcccaccgttcagtgatcccgagacagaaggtgctctgtgtcttctgggagcatggccagaatggatgtggtcactgggccaccacaggctgcagcacaataggcaccagagacaccagcaccatctgccgttgcacccacctgagcagctttgccgtcctcatggcccactacgatgtgcaggaggaggatcccgtgctgactgtcatcacctacatggggctgagcgtctctctgctgtgcctcctcctggcggccctcacttttctcctgtgtaaagccatccagaacaccagcacctcactgcatctgcagctctcgctctgcctcttcctggcccacctcctcttcctcgtggcaattgatcaaaccggacacaaggtgctgtgctccatcatcgccggtaccttgcactatctctacctggccaccttgacctggatgctgctggaggccctgtacctcttcctcactgcacggaacctgacggtggtcaactactcaagcatcaacagattcatgaagaagctcatgttccctgtgggctacggagtcccagctgtgacagtggccatttctgcagcctccaggcctcacctttatggaacaccttcccgctgctggctccaaccagaaaagggatttatatggggcttccttggacctgtctgcgccatcttctctgtgaatttagttctctttctggtgactctctggattttgaaaaacagactctcctccctcaatagtgaagtgtccaccctccggaacacaaggatgctggcatttaaagcgacagctcagctgttcatcctgggctgcacgtggtgtctgggcatcttgcaggtgggtccggctgcccgggtcatggcctacctcttcaccatcatcaacagcctgcagggtgtcttcatcttcctggtgtactgcctcctcagccagcaggtccgggagcaatatgggaaatggtccaaagggatcaggaaattgaaaactgagtctgagatgcacacactctccagcagtgctaaggctgacacctccaaacccagcacggttaactagaaaaatcttctgaataagatcttccctctttgcccgtggaaaatctgaacaatctttgagccatctagaggggaaagaaaagactttgttctgtgtgtttcaagaaattcaccatgtcagcaatatgaaggatgttatggaaggcgtgctaggcattcaattcctgcagaaaccggaaatcttccatgccctgcaatgtgctcatcaaactctcagcatatggacggccagctgtggcccatatcttggtcactctgaagcacaatatttatgaagctatagaacgttaagacctctttcacagcctctccttcctacaaagactcctccaaatcttaaaatgaagcaggaaaacgagcctaagaggactttcataccgacaacatctgaaaggactagaatgttcacaccacgatctggatttcttaattttttgtttttgtttttgttgttctctagttctacgggtttgattatttagtcatgtgaaaaatattgattactcacacatagatcaagagagacacggctcctgccttcatggagcttttaggggaaaatgaagtggctcttgcagctagagttgactcagaagccgaaattcctagaaatcaggtttctactgctaggcaattgaagtataaactattttataaacactgtcttctttcgtcttcacaccaacatgcagaaaagtttctaatctcagatcggggatgtgcaacaaattccatttcaaaggaatgacctgcaaaactcctaaatattccaagcaaatgcccttaaccctgtctgttatctgctttccttgaacagaaattctacatgaccataaaacctcgaagatgggtatggcacagttcatgccctgtaatcctagcactttgggagggtgaggcaggaggatggctcaagcccaggagtttgagaccagtgtgggcaacagagtgagaaccatctctacccaaaaaaaaaattaaaaattagccaagcatggtgatgatataggagttaaggagaaatcatttaggcaaatagcaagggtaggaagtcctcagtaaggttttccatttaatgaaaagcagcccccaaaatcattttcttttctaacaaagaacagcctgtaaaatcgagctgcagacatagacaagcaagctggaagcttccacgggtgaatgccggcagctgtgccaataggaaaaagctacctagactaggcatgtccaaaatggcggctccaagttcccttctctttgccagccatgtgtacagtaaaaagcaggcaacatagtgtcagccaaagctcatttgcataataagattagggtggggtggccagctcacataggggtaggccctaggtaaatcagacaccgccttctcaagcctgtctataaaatctggtacactatgacgagggtcagatttcccattcagacgcccctctcccatgcaagagaaagagctgttctcctttctctttcttttgcctattaaacctctgctcctggccaggcacagtggctcacgcctataatcccagcactttgggaggctgaggtggtcagatcacctaaggtcaggagttcaagaccagcctggtcaacatggtgaaatcttgtctctagtaaaaatacaaaaatatatgaaatctcacatagatgataatattaagttccaaaagcaactcaacctggtagattctaattttttttgaggcagggtcttgctttgtcacccatgctggagtacaatggcacaaacactgctcactgcagcctcgacctcccaaggcctaagcaatcctcctgcctcagtccccctccaggtatttgaaactacaggtgtgtaccaccacaccgggctaatttttgtattttttgtagagacgtgggtctcactatgctgcccaggctcaggtcttaatctcctgagctcaggcaatccgcaggcctcagcctccctaagtgcggggattacaggcttgagccactgcacctagcctctatttgttttacaaaagagaaattgagatcctgaatgttaagtgacttgcctgaggccatcccactaacaggagccagggttaggattcaaaccccatccaactggtcccagagctggagcttcttgcactgccctacactacctaccatctccatcctctgggcacctttttataagaaccaaaacattacagagcattgctttgtcaactcagctgggaacatttcccagtgcaactcacatttttcactgctctgtgcctgtccgtataagctcaatgagtattgatttaggggctttggagaactttgaatgctaccccccaagtaaccattgttggcaacctggtacctctacttttagccatttctccttctctataaatagtgcagaagtaacccacttggtaacaggcatccttgccaagcctccaccactaggtcagtgtaagaattaaagaaagaggaaagaaacacaaaaagtggcttgatggttaagacaggtttattttagagaaaacacacctgagaggggctgctggctgaattaggttagagtcttttctacagactaagagtgtttaaggatttagggtgggagagtttcttagaggcttggactgcttctgtgttttttttgttgtgcttatatgggagggagagtggtgtgtttgcttttatacatttttctgcagctgtaggcataccccccaagtctgcttttagcttccctattttagtgcacctggagggaaaggaatgtgcttattaaggcccactgttttactggggcccattgtatgagggtgaagtttggcagttacccaagagacttttcctccaccttcctctgtgcccgagctgttttatctgcattttactgtctgctttttttggctgcttatagtttttaaaaaagtaatttccttaaatccagaaggctaaaaatgaagctgaaacttaaagtggcggtgtttgtccaaaataacggggctcctgctctgccagtcagtaccctcaagtcactcctgatcctcaacctccatgcctaaggctggttcaagagaccacataatatctgccttttattacatacatgatgggtgcatgggattctgcgtgccctttgcttgatatagactgctaaggtgagatggggaatatcagagtcagctgctgcttgaggaagcagaacacacagctggaggcttggaacatgtgggtccctatgagtgtagagcccatatccccatagagtctacctagagcaggggtcgccaaatgttttcttaaagagcctgatagtgtatatgttaggctttgtgagccaggtatttacagcaactcaattctaccactgtggtatgaaaacagctatagacaatcataaatgaatgatcatggctatgttttaataaaactttacagacactgaacttgaacttccattgtgatatgaaaacagctatagacaatcataaatgaatgatcatggctatgttttaataaaactttatggacactgagcttgaacttcatatatcagtcatgtgacacaaaatatcattcttctttttatttgttttcacccatttgaaaaatgtaaaaactattcttagctgtacagaaacagatggtgggtcagatttgactcactgcccatagtttccagaccatgatgttcaggttcatggaagcacttcactctacactaatttattcatccattcatcacatatgtgatgagcacatacagacacacctcagagatattgcaggctccactccagatcaccacaataatgtgaatattgcaataaagcaagtcatacacatt

SEQ ID NO: 13741 - DNA, 2200 bp, Homo sapiens
ccgggaccatggagcctggtgacgcggcgcgccctggctcgggtcgggctaccggggcgccgccgccgcggctgctgctgctgccgctgctgctgggttgggggctgcgagtcgcggccgcggcctcggcctcctcctctggggcggcggcggaggacagcagcgccatggaggagctcgctactgagaaggaggcggaggagagccaccggcaagacagcgtgagcctgctcaccttcatcctgctgctcacgctcaccatcctcaccatctggctcttcaagcaccgccgggtgcgctttctgcacgagaccgggctggccatgatctatgggctcatcgttggggtgatcctgaggtatggtacccctgctaccagtggccgtgacaaatcactcagctgcactcaggaagacagggccttcagtaccttattagtgaatgtcagcggaaagttcttcgaatacactctgaaaggagaaatcagtcctggcaagatcaacagcgtagagcagaatgatatgctacggaaggtaacattcgatccagaagtatttttcaacattcttctgcctccaattatttttcatgctggatacagcttaaagaagagacactttttcagaaatcttggatctatactggcctatgccttcttggggactgctgtttcatgcttcattattggaaatctcatgtatggtgtggtgaagctcatgaagattatgggacagctctcagataaattttactacacagattgtctcttttttggagcaatcatctctgccactgacccagtgactgtgctggcgatatttaatgaattgcatgcagacgtggatctttacgcacttctttttggagagagcgtcctaaatgatgctgttgccattgtactgtcctcgtctattgttgcctaccagccagcgggactgaacactcacgcctttgatgctgctgccttttttaagtcagttggcatttttctaggtatatttagtggctcttttaccatgggagctgtgactggtgttaatgccaacgtgactaagtttaccaaactgcactgcttccccctgctggagacggcgctgttcttcctcatgtcctggagcacgtttctcttggcagaagcctgcggatttacaggtgttgtagctgtccttttctgtggaatcacacaagctcattacacctacaacaatctgtcggtggaatcaagaagtcgaaccaagcagctctttgaggtgttacatttcctggcagagaacttcatcttctcctacatgggcctggcactgtttaccttccagaagcacgttttcagccccattttcatcatcggagcttttgttgccatcttcctgggcagagccgcgcacatctacccgctctccttcttcctcaacttgggcagaaggcataagattggctggaattttcaacacatgatgatgttttcaggcctcaggggagcaatggcatttgcgttggccatccgtgacacggcatcctatgctcgccagatgatgttcacgaccacccttctcattgtgttcttcactgtctggatcattggaggaggcacgacacccatgttgtcatggcttaacatcagagttggcgtcgaggagccctccgaagaggaccagaatgaacaccactggcagtacttcagagttggtgttgaccccgatcaagacccaccacccaacaacgacagctttcaagtcttacaaggggacggcccagattctgccagaggaaaccggacaaaacaggagagcgcatggatattcaggctgtggtacagctttgatcacaattacctgaagcccatcctcacacacagtggtcccccactaaccaccacgctccccgcctggtgtggcttactagctcgatgtctgaccagtccccaggtgtacgataaccaagagccactgagagaggaagactctgatttcatcctgaccgaaggcgacctgacattgacctacggggacagcacagtgactgcaaatggctcctcaagttcgcacaccgcctccacgagtctggagggcagccggagaacgaagagcagctcggaggaagtgctggagcgagacctgggaatgggagaccagaaggtttcgagccggggcacccgcctagtgtttcccctggaagataatgcttgactttccccccaagc

SEQ ID NO: 13742 - DNA, 4542 bp, Homo sapiens
atgagcctttcattttgtggtaacaacatttcttcatataatatcaacgatggtgtactacaaaattcctgctttgtggatgccctcaacctggtccctcatgtctttctgttgtttatcacttttccaatattgtttattgggtgggggagccaaagctcaaaagtacaaattcaccacaacacatggcttcattttccgggacataacctgagatggattcttacattcgctctcctgtttgtgcatgtctgtgaaatagcagaaggcattgtttcagactcgcggcgggaatcaaggcacctccacctctttatgccagccgtgatgggattcgttgccactacaacatcgatagtgtattatcataatatcgaaacatcaaattttcctaaattacttttagccctgttcctgtattgggtaatggcctttattacaaaaacaataaaattggttaagtactgtcagtctggcttggacatatcaaacctgcgtttctgcatcacaggcatgatggtcatcttgaatgggctcttgatggctgtggagatcaatgtcattcgagtcaggagatatgtatttttcatgaatcctcagaaagtaaagcctcctgaagacctccaggatctgggagtgagatttcttcaaccatttgtgaatttgctgtcaaaagcaacatactggtggatgaacacacttattatatctgctcacaaaaagcctattgatctgaaggcaattggaaaattgccaatagcaatgagagcagtaacaaattatgtttgcctgaaagatgcatatgaagaacaaaagaaaaaagttgcagatcatccaaatcggactccatctatatggcttgcaatgtacagagcttttgggcgaccaattctacttagtagcacattccgctatctggctgatttactgggttttgctggacctctttgtatttctggaatagttcagcgtgtgaatgaaacccagaatgggacaaataacacaactggaatttcagaaaccctctcatcaaaggaatttcttgaaaacgcttacgttctagcagttcttctcttcttggctcttattctgcaaaggacatttttgcaggcttcctactatgtaaccatagagactggcattaacctccgtggagctctgctggccatgatttataataaaatccttaggctctctacgtctaacttatccatgggggagatgactctggggcagatcaacaacttagtcgccattgaaactaatcaactcatgtggtttttgttcctgtgtcccaatctatgggctatgcctgttcagatcataatgggcgtgattctgctctataatttacttggatcaagtgcattggtcggtgcagctgtcattgtgctccttgcgccaattcagtactttattgctacaaagttggcagaggctcagaaaagtacacttgattattccactgagagactcaagaaaacaaatgaaatattgaaaggcatcaaacttctaaaattgtatgcctgggaacacattttctgcaaaagtgtggaggaaacaagaatgaaagaactatctagtctcaaaacctttgcactatatacatcactctccatcttcatgaatgcagcaattcccatagcagctgttcttgctacatttgtgacccatgcgtatgccagtggaaacaatctgaaacctgcagaggcctttgcttcactgtctctcttccatatcctggtcacaccactgtccctgctcttcacggtggtcagatttgcagtcaaagccatcataagtgttcaaaagctgaatgagtttctcttgagtgatgagattggtgacgacagttggcgaactggtgaaagttcgcttccttttgagtcctgtaagaagcacactggagttgtcacaaatggatacttttcatggggcagtggtttagctacattatccaatatagatattcgaattccaacaggtcagttaaccatgattgtgggccaagtaggatgtgggaagtcctctcttctccttgccatcctcggtgagatgcagacattggaaggaaaagttcactggagcaatgtaaatgaatctgagccttcttttgaagcaaccagaagtaggaacaggtactctgtggcatatgcagctcaaaagccttggctattaaatgctacagtagaagaaaatattacttttggaagtccttttaacaaacagaggtacaaagctgtcacagatgcctgttctcttcagccagatattgacttattaccatttggagatcaaactgaaattggagagaggggcatcaacctgagtgggggacagaggcagagaatctgtgtggcacgagcgctgtatcaaaacaccaacattgtctttttggatgatccattctcagccctggacattcacttgagtgatcatttaatgcaggaggggattttgaaattcctgcaagatgacaaaaggacactcgttcttgtgactcacaaattacagtatctgacgcatgctgactggatcatagccatgaaagatggaagtgtcctaagagaaggaactttgaaggacattcaaaccaaagatgttgagctttatgaacactggaaaacacttatgaatcggcaagatcaagaattagaaaaggatatggaagctgaccaaactactttagagaggaaaactctccgacgggccatgtattcaagagaagccaaagcccagatggaggacgaagacgaagaggaagaagaggaggaagatgaggatgataacatgtccactgtaatgaggctcaggactaaaatgccatggaaaacctgctggcgctacctgacatctggaggattcttcctgctcatcctgatgattttctctaagcttttgaagcattcggtcattgtagctatagactattggctggccacatggacatcggagtacagtataaacaatactggaaaagctgatcagacctactatgtggctggctttagcatactctgtggagcaggcattttcctttgccttgttacatccctcactgtagaatggatgggtctcacagctgccaaaaatcttcaccacaaccttctcaataagataatccttggaccaataaggttttttgataccacacccctgggactgattctcaatcgcttttcagctgatactaatatcattgatcagcacatccctccaaccttggaatctctaactcgctcaacactgctctgcctgtctgccattgggatgatttcttatgctactcctgtgttcctggttgctctcctgccccttggtgttgccttttattttatccagaaatactttcgggttgcctctaaggacctccaggaactcgacgatagtacccagctccctctgctctgtcacttctcagaaacagcagaaggactcaccaccattcgggcctttaggcatgaaaccagatttaaacaacgtatgctggaactgacggatacaaacaacattgcctacttatttctctcagctgccaacagatggctggaggtcaggacggattatctgggagcttgcattgtcctcactgcatctatagcatccattagtgggtcttccaattctggattggtaggcttgggtcttctgtatgcacttacgataaccaattatttgaattgggttgtgaggaacttggctgacctggaggtccagatgggtgcagtgaagaaggtgaacagtttcctgactatggagtcagagaactatgaaggcacaatggatccttctcaagttccagaacattggccacaagaaggggagatcaagatacatgatctgtgtgtcagatatgaaaataatctgaaacctgttcttaagcacgtcaaggcttacatcaaacctggacaaaaggtgggcatatgtggtcgcactggcagtgggaaatcatcgttatctctggctttcttcagaatggttgatatatttgatggaaaaattgtcattgatgggatagacatttccaaattaccactgcacacactacgttctagactttcaatcattctgcaggatccaatactattcagtggttccattagatttaatttagatccagagtgcaaatgcacagatgacagactctgggaagccttagaaattgctcagctgaagaatatggtcaaatctctacctggaggtctagatgcggttgtcactgaaggtggggagaattttagcgtgggacagagacagctattttgccttgccagggcctttgtccgcaaaagcagcattcttattatggatgaggcaacagcttccattgacatggccacagagaatattttgcaaaaagtagtaatgacagcctttgcagaccggaccgtggtgacaatggctcaccgtgtctcttctattatggatgcaggccttgttttagtcttttctgagggtattttagtggagtgtgatactgtcccaaatttgttcgcccacaagaatggccccttttccactttggtgatgaccaacaagtag

SEQ ID NO: 13743 - DNA, 4650 bp, Homo sapiens
atgagcctttcattttgtggtaacaacatttcttcatataatatcaacgatggtgtactacaaaattcctgctttgtggatgccctcaacctggtccctcatgtctttctgttgtttatcacttttccaatattgtttattgggtgggggagccaaagctcaaaagtacaaattcaccacaacacatggcttcattttccgggacataacctgagatggattcttacattcgctctcctgtttgtgcatgtctgtgaaatagcagaaggcattgtttcagactcgcggcgggaatcaaggcacctccacctctttatgccagccgtgatgggattcgttgccactacaacatcgatagtgtattatcataatatcgaaacatcaaattttcctaaattacttttagccctgttcctgtattgggtaatggcctttattacaaaaacaataaaattggttaagtactgtcagtctggcttggacatatcaaacctgcgtttctgcatcacaggcatgatggtcatcttgaatgggctcttgatggctgtggagatcaatgtcattcgagtcaggagatatgtatttttcatgaatcctcagaaagtaaagcctcctgaagacctccaggatctgggagtgagatttcttcaaccatttgtgaatttgctgtcaaaagcaacatactggtggatgaacacacttattatatctgctcacaaaaagcctattgatctgaaggcaattggaaaattgccaatagcaatgagagcagtaacaaattatgtttgcctgaaagatgcatatgaagaacaaaagaaaaaagttgcagatcatccaaatcggactccatctatatggcttgcaatgtacagagcttttgggcgaccaattctacttagtagcacattccgctatctggctgatttactgggttttgctggacctctttgtatttctggaatagttcagcgtgtgaatgaaacccagaatgggacaaataacacaactggaatttcagaaaccctctcatcaaaggaatttcttgaaaacgcttacgttctagcagttcttctcttcttggctcttattctgcaaaggacatttttgcaggcttcctactatgtaaccatagagactggcattaacctccgtggagctctgctggccatgatttataataaaatccttaggctctctacgtctaacttatccatgggggagatgactctggggcagatcaacaacttagtcgccattgaaactaatcaactcatgtggtttttgttcctgtgtcccaatctatgggctatgcctgttcagatcataatgggcgtgattctgctctataatttacttggatcaagtgcattggtcggtgcagctgtcattgtgctccttgcgccaattcagtactttattgctacaaagttggcagaggctcagaaaagtacacttgattattccactgagagactcaagaaaacaaatgaaatattgaaaggcatcaaacttctaaaattgtatgcctgggaacacattttctgcaaaagtgtggaggaaacaagaatgaaagaactatctagtctcaaaacctttgcactatatacatcactctccatcttcatgaatgcagcaattcccatagcagctgttcttgctacatttgtgacccatgcgtatgccagtggaaacaatctgaaacctgcagaggcctttgcttcactgtctctcttccatatcctggtcacaccactgtccctgctcttcacggtggtcagatttgcagtcaaagccatcataagtgttcaaaagctgaatgagtttctcttgagtgatgagattggtgacgacagttggcgaactggtgaaagttcgcttccttttgagtcctgtaagaagcacactggagttcagccaaaaactataaacaggaaacagcctggaagatatcacctggacagctatgagcaatcaacacggcgtctacgtcccgcagaaacagaggacattgcaataaaggtcacaaatggatacttttcatggggcagtggtttagctacattatccaatatagatattcgaattccaacaggtcagttaaccatgattgtgggccaagtaggatgtgggaagtcctctcttctccttgccatcctcggtgagatgcagacattggaaggaaaagttcactggagcaatgtaaatgaatctgagccttcttttgaagcaaccagaagtaggaacaggtactctgtggcatatgcagctcaaaagccttggctattaaatgctacagtagaagaaaatattacttttggaagtccttttaacaaacagaggtacaaagctgtcacagatgcctgttctcttcagccagatattgacttattaccatttggagatcaaactgaaattggagagaggggcatcaacctgagtgggggacagaggcagagaatctgtgtggcacgagcgctgtatcaaaacaccaacattgtctttttggatgatccattctcagccctggacattcacttgagtgatcatttaatgcaggaggggattttgaaattcctgcaagatgacaaaaggacactcgttcttgtgactcacaaattacagtatctgacgcatgctgactggatcatagccatgaaagatggaagtgtcctaagagaaggaactttgaaggacattcaaaccaaagatgttgagctttatgaacactggaaaacacttatgaatcggcaagatcaagaattagaaaaggatatggaagctgaccaaactactttagagaggaaaactctccgacgggccatgtattcaagagaagccaaagcccagatggaggacgaagacgaagaggaagaagaggaggaagatgaggatgataacatgtccactgtaatgaggctcaggactaaaatgccatggaaaacctgctggcgctacctgacatctggaggattcttcctgctcatcctgatgattttctctaagcttttgaagcattcggtcattgtagctatagactattggctggccacatggacatcggagtacagtataaacaatactggaaaagctgatcagacctactatgtggctggctttagcatactctgtggagcaggcattttcctttgccttgttacatccctcactgtagaatggatgggtctcacagctgccaaaaatcttcaccacaaccttctcaataagataatccttggaccaataaggttttttgataccacacccctgggactgattctcaatcgcttttcagctgatactaatatcattgatcagcacatccctccaaccttggaatctctaactcgctcaacactgctctgcctgtctgccattgggatgatttcttatgctactcctgtgttcctggttgctctcctgccccttggtgttgccttttattttatccagaaatactttcgggttgcctctaaggacctccaggaactcgacgatagtacccagctccctctgctctgtcacttctcagaaacagcagaaggactcaccaccattcgggcctttaggcatgaaaccagatttaaacaacgtatgctggaactgacggatacaaacaacattgcctacttatttctctcagctgccaacagatggctggaggtcaggacggattatctgggagcttgcattgtcctcactgcatctatagcatccattagtgggtcttccaattctggattggtaggcttgggtcttctgtatgcacttacgataaccaattatttgaattgggttgtgaggaacttggctgacctggaggtccagatgggtgcagtgaagaaggtgaacagtttcctgactatggagtcagagaactatgaaggcacaatggatccttctcaagttccagaacattggccacaagaaggggagatcaagatacatgatctgtgtgtcagatatgaaaataatctgaaacctgttcttaagcacgtcaaggcttacatcaaacctggacaaaaggtgggcatatgtggtcgcactggcagtgggaaatcatcgttatctctggctttcttcagaatggttgatatatttgatggaaaaattgtcattgatgggatagacatttccaaattaccactgcacacactacgttctagactttcaatcattctgcaggatccaatactattcagtggttccattagatttaatttagatccagagtgcaaatgcacagatgacagactctgggaagccttagaaattgctcagctgaagaatatggtcaaatctctacctggaggtctagatgcggttgtcactgaaggtggggagaattttagcgtgggacagagacagctattttgccttgccagggcctttgtccgcaaaagcagcattcttattatggatgaggcaacagcttccattgacatggccacagagaatattttgcaaaaagtagtaatgacagcctttgcagaccggaccgtggtgacaatggctcaccgtgtctcttctattatggatgcaggccttgttttagtcttttctgagggtattttagtggagtgtgatactgtcccaaatttgttcgcccacaagaatggccccttttccactttggtgatgaccaacaagtag

SEQ ID NO: 13744 - DNA, 4650 bp, Homo sapiens
atgagcctttcattttgtggtaacaacatttcttcatataatatcaacgatggtgtactacaaaattcctgctttgtggatgccctcaacctggtccctcatgtctttctgttgtttatcacttttccaatattgtttattgggtgggggagccaaagctcaaaagtacaaattcaccacaacacatggcttcattttccgggacataacctgagatggattcttacattcgctctcctgtttgtgcatgtctgtgaaatagcagaaggcattgtttcagactcgcggcgggaatcaaggcacctccacctctttatgccagccgtgatgggattcgttgccactacaacatcgatagtgtattatcataatatcgaaacatcaaattttcctaaattacttttagccctgttcctgtattgggtaatggcctttattacaaaaacaataaaattggttaagtactgtcagtctggcttggacatatcaaacctgcgtttctgcatcacaggcatgatggtcatcttgaatgggctcttgatggctgtggagatcaatgtcattcgagtcaggagatatgtatttttcatgaatcctcagaaagtaaagcctcctgaagacctccaggatctgggagtgagatttcttcaaccatttgtgaatttgctgtcaaaagcaacatactggtggatgaacacacttattatatctgctcacaaaaagcctattgatctgaaggcaattggaaaattgccaatagcaatgagagcagtaacaaattatgtttgcctgaaagatgcatatgaagaacaaaagaaaaaagttgcagatcatccaaatcggactccatctatatggcttgcaatgtacagagcttttgggcgaccaattctacttagtagcacattccgctatctggctgatttactgggttttgctggacctctttgtatttctggaatagttcagcgtgtgaatgaaacccagaatgggacaaataacacaactggaatttcagaaaccctctcatcaaaggaatttcttgaaaacgcttacgttctagcagttcttctcttcttggctcttattctgcaaaggacatttttgcaggcttcctactatgtaaccatagagactggcattaacctccgtggagctctgctggccatgatttataataaaatccttaggctctctacgtctaacttatccatgggggagatgactctggggcagatcaacaacttagtcgccattgaaactaatcaactcatgtggtttttgttcctgtgtcccaatctatgggctatgcctgttcagatcataatgggcgtgattctgctctataatttacttggatcaagtgcattggtcggtgcagctgtcattgtgctccttgcgccaattcagtactttattgctacaaagttggcagaggctcagaaaagtacacttgattattccactgagagactcaagaaaacaaatgaaatattgaaaggcatcaaacttctaaaattgtatgcctgggaacacattttctgcaaaagtgtggaggaaacaagaatgaaagaactatctagtctcaaaacctttgcactatatacatcactctccatcttcatgaatgcagcaattcccatagcagctgttcttgctacatttgtgacccatgcgtatgccagtggaaacaatctgaaacctgcagaggcctttgcttcactgtctctcttccatatcctggtcacaccactgtccctgctcttcacggtggtcagatttgcagtcaaagccatcataagtgttcaaaagctgaatgagtttctcttgagtgatgagattggtgacgacagttggcgaactggtgaaagttcgcttccttttgagtcctgtaagaagcacactggagttcagccaaaaactataaacaggaaacagcctggaagatatcacctggacagctatgagcaatcaacacggcgtctacgtcccgcagaaacagaggacattgcaataaaggtcacaaatggatacttttcatggggcagtggtttagctacattatccaatatagatattcgaattccaacaggtcagttaaccatgattgtgggccaagtaggatgtgggaagtcctctcttctccttgccatcctcggtgagatgcagacattggaaggaaaagttcactggagcaatgtaaatgaatctgagccttcttttgaagcaaccagaagtaggaacaggtactctgtggcatatgcagctcaaaagccttggctattaaatgctacagtagaagaaaatattacttttggaagtccttttaacaaacagaggtacaaagctgtcacagatgcctgttctcttcagccagatattgacttattaccatttggagatcaaactgaaattggagagaggggcatcaacctgagtgggggacagaggcagagaatctgtgtggcacgagcgctgtatcaaaacaccaacattgtctttttggatgatccattctcagccctggacattcacttgagtgatcatttaatgcaggaggggattttgaaattcctgcaagatgacaaaaggacactcgttcttgtgactcacaaattacagtatctgacgcatgctgactggatcatagccatgaaagatggaagtgtcctaagagaaggaactttgaaggacattcaaaccaaagatgttgagctttatgaacactggaaaacacttatgaatcggcaagatcaagaattagaaaaggatatggaagctgaccaaactactttagagaggaaaactctccgacgggccatgtattcaagagaagccaaagcccagatggaggacgaagacgaagaggaagaagaggaggaagatgaggatgataacatgtccactgtaatgaggctcaggactaaaatgccatggaaaacctgctggcgctacctgacatctggaggattcttcctgctcatcctgatgattttctctaagcttttgaagcattcggtcattgtagctatagactattggctggccacatggacatcggagtacagtataaacaatactggaaaagctgatcagacctactatgtggctggctttagcatactctgtggagcaggcattttcctttgccttgttacatccctcactgtagaatggatgggtctcacagctgccaaaaatcttcaccacaaccttctcaataagataatccttggaccaataaggttttttgataccacacccctgggactgattctcaatcgcttttcagctgatactaatatcattgatcagcacatccctccaaccttggaatctctaactcgctcaacactgctctgcctgtctgccattgggatgatttcttatgctactcctgtgttcctggttgctctcctgccccttggtgttgccttttattttatccagaaatactttcgggttgcctctaaggacctccaggaactcgacgatagtacccagctccctctgctctgtcacttctcagaaacagcagaaggactcaccaccattcgggcctttaggcatgaaaccagatttaaacaacgtatgctggaactgacggatacaaacaacattgcctacttatttctctcagctgccaacagatggctggaggtcaggacggattatctgggagcttgcattgtcctcactgcatctatagcatccattagtgggtcttccaattctggattggtaggcttgggtcttctgtatgcacttacgataaccaattatttgaattgggttgtgaggaacttggctgacctggaggtccagatgggtgcagtgaagaaggtgaacagtttcctgactatggagtcagagaactatgaaggcacaatggatccttctcaagttccagaacattggccacaagaaggggagatcaagatacatgatctgtgtgtcagatatgaaaataatctgaaacctgttcttaagcacgtcaaggcttacatcaaacctggacaaaaggtgggcatatgtggtcgcactggcagtgggaaatcatcgttatctctggctttcttcagaatggttgatatatttgatggaaaaattgtcattgatgggatagacatttccaaattaccactgcacacactacgttctagactttcaatcattctgcaggatccaatactattcagtggttccattagatttaatttagatccagagtgcaaatgcacagatgacagactctgggaagccttagaaattgctcagctgaagaatatggtcaaatctctacctggaggtctagatgcggttgtcactgaaggtggggagaattttagcgtgggacagagacagctattttgccttgccagggcctttgtccgcaaaagcagcattcttattatggatgaggcaacagcttccattgacatggccacagagaatattttgcaaaaagtagtaatgacagcctttgcagaccggaccgtggtgacaatggctcatcgagtacacactattctgacggcagacctggttattgtgatgaagcgaggaaatattttagaatatgacactccagaaagcctcttggctcaggaaaatggagtatttgcttcttttgttcgcgcagacatgtga

SEQ ID NO: 13745 - DNA, 2323 bp, Homo sapiens
gaccaagcattcagcaagccactcttccacctcccttactgcaggaaggcactccgaagacataagtcggtgagacatggctgaagataaaagcaagagagactccatcgagatgagtatgaagggatgccagacaaacaacgggtttgtccataatgaagacattctggagcagaccccggatccaggcagctcaacagacaacctgaagcacagcaccaggggcatccttggctcccaggagcccgacttcaagggcgtccagccctatgcggggatgcccaaggaggtgctgttccagttctctggccaggcccgctaccgcatacctcgggagatcctcttctggctcacagtggcttctgtgctggtgctcatcgcggccaccatagccatcattgccctctctccaaagtgcctagactggtggcaggaggggcccatgtaccagatctacccaaggtctttcaaggacagtaacaaggatgggaacggagatctgaaaggtattcaagataaactggactacatcacagctttaaatataaaaactgtttggattacttcattttataaatcgtcccttaaagatttcagatatggtgttgaagatttccgggaagttgatcccatttttggaacgatggaagattttgagaatctggttgcagccatacatgataaaggtttaaaattaatcatcgatttcataccaaaccacacgagtgataaacatatttggtttcaattgagtcggacacggacaggaaaatatactgattattatatctggcatgactgtacccatgaaaatggcaaaaccattccacccaacaactggttaagtgtgtatggaaactccagttggcactttgacgaagtgcgaaaccaatgttattttcatcagtttatgaaagagcaacctgatttaaatttccgcaatcctgatgttcaagaagaaataaaagaaattttacggttctggctcacaaagggtgttgatggttttagtttggatgctgttaaattcctcctagaagcaaagcacctgagagatgagatccaagtaaataagacccaaatcccggacacggtcacacaatactcggagctgtaccatgacttcaccaccacgcaggtgggaatgcacgacattgtccgcagcttccggcagaccatggaccaatacagcacggagcccggcagatacaggttcatggggactgaagcctatgcagagagtattgacaggaccgtgatgtactatggattgccatttatccaagaagctgattttcccttcaacaattacctcagcatgctagacactgtttctgggaacagcgtgtatgaggttatcacatcctggatggaaaacatgccagaaggaaaatggcctaactggatgattggtggaccagacagttcacggctgacttcgcgtttggggaatcagtatgtcaacgtgatgaacatgcttcttttcacactccctggaactcctataacttactatggagaagaaattggaatgggaaatattgtagccgcaaatctcaatgaaagctatgatattaatacccttcgctcaaagtcaccaatgcagtgggacaatagttcaaatgctggtttttctgaagctagtaacacctggttacctaccaattcagattaccacactgtgaatgttgatgtccaaaagactcagcccagatcggctttgaagttatatcaagatttaagtctacttcatgccaatgagctactcctcaacaggggctggttttgccatttgaggaatgacagccactatgttgtgtacacaagagagctggatggcatcgacagaatctttatcgtggttctgaattttggagaatcaacactgttaaatctacataatatgatttcgggccttcccgctaaaataagaataaggttaagtaccaattctgccgacaaaggcagtaaagttgatacaagtggcatttttctggacaagggagagggactcatctttgaacacaacacgaagaatctccttcatcgccaaacagctttcagagatagatgctttgtttccaatcgagcatgctattccagtgtactgaacatactgtatacctcgtgttaggcacctttatgaagagatgaagacactggcatttcagtgggattgtaagcatttgtaatagcttcatgtacagcatgctgcttggtgaacaatcattaattcttcgatatttctgtagcttgaatgtaaccgctttaagaaaggttctcaaatgttttgaaaaaaaaaaaaaaaaaaaaaaaaaaaaaa

SEQ ID NO: 13746 - DNA, 8028 bp, Homo sapiens
tgctgccgccgccgcagccgcagctactgtgacttctccgattgtgtgagctttgttggagcctgcgtacgtggatttatcgctgccacggtctgcgtagctccagaggtttaaccataggatagagaaaccaggaatgtaatgaggaaatcaaaatggatccaagtatgggtgtgaattctgttaccatttctgttgagggtatgacttgcaattcctgtgtttggaccattgagcagcagattggaaaagtgaatggtgtgcatcacattaaggtatcactggaagaaaaaaatgcaactattatttatgaccctaaactacagactccaaagaccctacaggaagctattgatgacatgggctttgatgctgttatccataatcctgaccctctccctgttttaactgacaccttgtttctgactgttacggcgtcactgactttgccatgggaccatatccaaagcacattgctgaagaccaagggtgtgacagacattaaaatttaccctcagaaaagaactgtagcagtgacaataatcccttctatagtgaatgccaatcagataaaagagctggttccagaactcagtttagatactgggacactggagaaaaagtcaggagcttgtgaagatcatagtatggctcaagctggtgaagtcgtgctgaagatgaaagtggaagggatgacctgccattcatgtactagcactattgaaggaaaaattgggaaactgcaaggtgttcagcgaattaaagtctccctggacaatcaagaagctactattgtttatcaacctcatcttatctcagtagaggaaatgaaaaagcagattgaagctatgggctttccagcatttgtcaaaaagcagcccaagtacctcaaattgggagctattgatgtagaacgtctaaagaacacaccagttaaatcctcagaagggtcacagcaaaggagtccatcatataccaatgattcaacagccactttcatcattgatggcatgcattgtaaatcatgtgtgtcaaatattgaaagtactttatctgcactccaatatgtaagcagcatagtagtttctttagagaataggtctgccattgtgaagtataatgcaagctcagtcactccagaatccctgagaaaagcaatagaggctgtatcaccggggctatatagagttagtatcacaagtgaagttgagagtacctcaaactctccctccagctcatctcttcagaagattcctttgaatgtagttagccagcctctgacacaagaaactgtgataaacattgatggcatgacttgtaattcctgtgtgcagtctattgagggtgtcatatcaaaaaagccaggtgtaaaatccatacgagtctcccttgcaaatagcaatgggactgttgagtatgatcctctactaacctctccagaaacgttgagaggagcaatagaagacatgggatttgatgctaccttgtcagacacgaatgagccgttggtagtaatagctcagccttcatcggaaatgccgcttttgacttcaactaatgaattttatactaaagggatgacaccagttcaagacaaggaggaaggaaagaattcatctaagtgttacatacaggtcactggcatgacttgcgcttcctgtgtagcaaacattgaacggaatttaaggcgggaagaaggaatatattctatacttgtggccctgatggctggcaaggcagaagtaaggtataatcctgctgttatacaacccccaatgatagcagagttcatccgagaacttggatttggagccactgtgatagaaaatgctgatgaaggagatggtgttttggaacttgttgtgaggggaatgacgtgtgcctcctgcgtacataaaatagagtctagtctcacaaaacacagagggatcctatactgctccgtggccctggcaaccaacaaagcacatattaaatatgacccagaaattattggtcctagagatattatccatacaattgaaagcttaggttttgaagcttctttggtcaagaaggatcggtcagcaagtcacttagatcataaacgagaaataagacaatggagacggtcttttcttgtgagtctgtttttctgtattcctgtaatggggctgatgatatatatgatggttatggaccaccactttgcaactcttcaccataatcaaaacatgagtaaagaagaaatgatcaaccttcattcttctatgttcctggagcgccagattcttccaggattgtctgttatgaatttgctgtcctttttattgtgtgtacctgtacagtttttcggaggctggtacttctacattcaggcttataaagcactgaagcataagacagcaaatatggacgtactgattgtgctggcaaccaccattgcatttgcctactctttgattattcttctagttgcaatgtatgagagagccaaagtgaaccctattactttctttgacacaccccctatgctgtttgtgtttattgcactaggccgatggctggaacatatagcaaagggcaaaacatcagaggctcttgcaaagttaatttcactacaagctacagaagcaactattgtaactcttgattctgataatatcctcctcagtgaagaacaagtggatgtggaacttgtacaacgtggagatatcattaaagtagttccaggaggcaaatttccagtggatggtcgtgttattgaaggacattctatggtagatgagtccctcatcacaggggaggcaatgcctgtggctaagaaacctggcagcacagtgattgctggttccattaaccagaacgggtcactgcttatctgcgcaacacatgttggagcagacacaaccctttctcaaattgtcaaacttgtggaagaggcacaaacatcaaaggctcctatccagcagtttgcagacaaactcagtggctattttgttccttttattgtttttgtttccattgccaccctcttggtatggattgtaattggatttctgaattttgaaattgtggaaacctactttcctggctacaatagaagtatctcccgaacagaaacgataatacgatttgctttccaagcctctatcacagttctgtgtattgcatgtccctgttcactgggactggccactccaactgctgtgatggtgggtacaggagtaggtgctcaaaatggcatactaataaaaggtggagagccattggagatggctcataaggtaaaggtagtggtatttgataagactggaaccattactcacggaaccccagtggtgaatcaagtaaaggttctaactgaaagtaacagaatatcacaccataaaatcttggccattgtgggaactgctgaaagtaacagtgaacaccctctaggaacagccataaccaaatattgcaaacaggagctggacactgaaaccttgggtacctgcatagatttccaggttgtgccaggctgtggtattagctgtaaagtcaccaatattgaaggcttgctacataagaataactggaatatagaggacaataatattaaaaatgcatccctggttcaaattgatgccagtaatgaacagtcatcaacttcgtcttccatgattattgatgcccagatctcaaatgctcttaatgctcagcagtataaagtcctcattggtaaccgggagtggatgattagaaatggtcttgtcattaataacgatgtaaatgatttcatgactgaacatgagagaaaaggtcggactgctgtattagtagcagttgatgatgagctgtgtggcttgatagccattgcagacacagtgaagcctgaagcagaactggctatccatattctgaaatctatgggcttagaagtagttctgatgactggagacaacagtaaaacagctagatctattgcttctcaggttggcattactaaggtgtttgctgaagttctaccttctcacaaggttgctaaagtgaagcaacttcaagaggaggggaaacgggtagcaatggtgggagatggaatcaatgactccccagctctggcaatggctaatgtgggaattgctattggcacaggcacagatgtagccattgaagcagctgatgtggttttgataaggaatgatcttctggatgtagtggcaagtattgacttatcaagaaagacagtcaagaggattcggataaattttgtctttgctctaatttataatctggttggaattcccatagctgctggagtttttatgcccattggtttggttttgcagccctggatgggatctgcagcaatggctgcttcatctgtttctgtagtactttcttctctcttccttaaactttacaggaaaccaacttacgagagttatgaactgcctgcccggagccagataggacagaagagtccttcagaaatcagcgttcatgttggaatagatgatacctcaaggaattctcctaaactgggtttgctggaccggattgttaattatagcagagcctctataaactcactactgtctgataaacgctccctaaacagtgttgttaccagtgaacctgacaagcactcactcctggtgggagacttcagggaagatgatgacactgcattataaaaggccatggagagtgctgccagtttaacttgtcatgcactgacacagcattcatgatgttaccttcacttttcaaaatattgtagaaggatttttctcatgctcttatattagggattctatttgagttgcgtttatctgttggcaaaaatatctttttcaaggcatcagctctgaacctagctttatttaaactgaatttccagtatatttttgttttcactaacaacagataaggtagagcagtgaggtttacaacaagccctacaattagagattgctgaactgctgctaaagtgattttttttttatttgaccaaaaaaaaaaaggcccaagaagaagaaaatgaaaaatttgaagatttgagagcatgaagatattcatgcttttgaactcaaaatattgaagatactctcaagcctgtatccctgcccactggggagcaatgactttcaaagcactgtgtataaaacatctagttttagaagggaaacagttgaaactgtttaaaaatagatgtgccttatttattgcaggctttctttcccccattctccctgcatccttgtccttgcaggtgcttttttagatgctccaatatgtcttcttttgttattttctttcgagctaaccagtttagggtggtttttcattgattaaaaataactgacaactgttctaatattttgctcctttttaaattttgtagctcaaaagaccttaaaggtctgtagggttccctgcctcccatctttccactgttgtaaaaagtatatcaaattattccttcaagtttcctagctctgtgctcagtttcagttcactcctgccaagttggactctaagttattcttcatgtagtctgctgatctcagtctggaaacttaacattatgagccttttctgctcaaaaaattttcaaagattaaaactattatacatatacaggtcatataaaattacctggattcactaaatttgtttgttgttgttgttgttgttgttgttgttgttgagacagagtcttgttttgcagcccaggctggagtgcagtggcaccatcttggctcactgcaacctctgcctaccggattcaaggaattctccctgcctcagcctcctgagtagctaggattacaggtgcctgccaccacacccggctaattttcatatttttcagtagagacggggtttcgccatgttggctagcctggtcttaaactcctaacctcaggtgatccacccgccttggcctcccaaagtgctgggattacaggtgtgagcctccatgcccagcctaaatttgtattttttgaattgagtataacactttgctagtatatataatttaatagattttatttatcttttagtgtttcagataacctctcaaaaagactttaaaataatgctattacacaaagctgcatttaccaaaaaatacagtaaaatcataatacagaaactaaaatttccctaggttatgacgctttttagctaaatatatactcttctctagtttaaaacatttgaacttgcctagttagtgtggttggcaaatttaggagcttgttcccattgccaaatggatttagaaattcccttgtgagtgcctggtagctaatacactggtcagagatctggtacttgtaagactatttaaatttctttgttagttgcaagatggatttcatatgcagaatatgtaaatgaagaggactcataagtaaattcctaacattttgttcccattaccagaagcaaagctgctgctaacccaacatctggcacataggatttgtactcggtaaatgttagttcttttctccccttgaggtcagtaataaatacaaaaaaatcatttttctagagcagagtcttaaaatcaggtgggggtaggggatggagttcttcctttcctaccccttttctcttttatcctttcatatatacacatgcaaagtttacaaccttattccatgctgtctttcagatttagaaaagatctaatttctgtctcagctgtcttaaagagagaactgaagcttttgatgaaggtgctattaatctagaaaggcaaacccatttcactgaaatatcaatgggtttgcatatctaggccctttttttagaccaatgcctatgccatcctccatgctttcagtttgagttttattatttattattttaattccagtggcccatcttataatacaacttgtttcttctagaagacagagctgatagggtaaatgttgaaaaaagaagcatgcctccttctccctcccacccacctcaagcagttgaacacagccagttattcttccattattatgtgtaccttggagtcatcctcttggtcttgtattcatattgtgggacagtgggaatagcagcttgtagtattgaaataatcaaagagataatttcagctcttacaacaagaacagaaaacatgctaattagaaaaagtcctgctttaagtaatatgtagccacatttgaatcctctaccacaagtcttttttgcaatcttgaactttcattagcttcaaagagaagctgtatttacaggagaaagaggtgattatggagggaatcaaaaatactgctttcagttagtagctagctttaagtcaggagttagtaatgagaaattttataaatgtgtatttctgtgtattcacatacatatatatatacacacatatatatgtacatacacatacatacatattaccatactgaagggaaatggatttatatttgaatttgatatttgaatatttgaagttctctatttatatttcatttatcactcttctgtattcactcagcaaccatgcccttagtctgaagataacaaggatactttaatatccagtgccggttcagactcacctatgtggcaccttaaacttaaatatccaaagatgccttttgaatttcaaagattaaaacacagctagagtagtagtattgtagtctcaagatgtatggtgtgtcatttgtgaaaatagaaacgttatttttcctagtttagtatcaacattttagaatgtcaaatttgatgccttgtgaacaagtaattttatattgtgctttaattttttaaaaagtattctttattcatatgtatagaatgcttaaaatagcactgtagacaagatgtttccaaaactttaagtgcgcatatcttttctgtatacagcttaaaatcaaaaatgtatgttaagagaattttttctattacttatggatcatgctttaaaatgatttttcttgatatttattttactccattttgtttttttctctgggtgaggcatctggttactggttattttaaaaagaataaagacattcctgg

SEQ ID NO: 13747 - DNA, 3421 bp, Homo sapiens
acgctgctgagcccgaggacaggcggagacgccgggagccagtggcgcctgtggctccgggcaggggccgcggccgaaagatgccggtccgcaggggccacgtcgctccccaaaacacttacctggacaccatcatccgcaagttcgagggccaaagtcggaagttcctgattgccaatgctcagatggagaactgcgccatcatttactgcaacgacggcttctgcgaactcttcggctactcccgagtggaggtgatgcagcaaccctgcacctgcgacttcctcacaggccccaacacaccaagcagcgccgtgtcccgcctagcgcaggccctgctgggggctgaggagtgcaaggtggacatcctctactaccgcaaggatgcctccagcttccgctgcctggtagatgtggtgcccgtgaagaacgaggacggggctgtcatcatgttcattctcaacttcgaggacctggcccagctcctggccaagtgcagcagccgcagcttgtcccagcgcctgttgtcccagagcttcctgggctccgagggctctcatggcaggccaggcggaccagggccaggcacaggcaggggcaagtacaggaccatcagccagatcccacagttcacgctcaacttcgtggagttcaacttggagaagcaccgctccagctccaccacggagattgagatcatcgcgccccataaggtggtggagcggacacagaacgtcactgagaaggtcacccaggtcctgtccctgggcgcggatgtgctgccggagtacaagctgcaggcgccgcgcatccaccgctggaccatcctgcactacagccccttcaaggccgtgtgggactggctcatcctgctgctggtcatctacacggctgtcttcacgccctactcagccgccttcctgctcagcgatcaggacgaatcacggcgtggggcctgcagctatacctgcagtcccctcactgtggtggatctcatcgtggacatcatgttcgtcgtggacatcgtcatcaacttccgcaccacctatgtcaacaccaatgatgaggtggtcagccacccccgccgcatcgccgtccactacttcaagggctggttcctcattgacatggtggccgccatccctttcgacctcctgatcttccgcactggctccgatgagaccacaaccctgattgggctattgaagacagcgcggctgctgcggctggtgcgcgtagcacggaagctggaccgctactctgagtatggggcggctgtgctcttcttgctcatgtgcaccttcgcgctcatagcgcactggctggcctgcatctggtacgccatcggcaatgtggagcggccctacctagaacacaagatcggctggctggacagcctgggtgtgcagcttggcaagcgctacaacggcagcgacccagcctcgggcccctcggtgcaggacaagtatgtcacagccctctacttcaccttcagcagcctcaccagcgtgggcttcggcaatgtctcgcccaacaccaactccgagaaggtcttctccatctgcgtcatgctcatcggctccctgatgtacgccagcatcttcgggaacgtgtccgcgatcatccagcgcctgtactcgggcaccgcgcgctaccacacgcagatgctgcgtgtcaaggagttcatccgcttccaccagatccccaacccactgcgccagcgcctggaggagtatttccagcacgcctggtcctacaccaatggcattgacatgaacgcggtgctgaagggcttccccgagtgcctgcaggctgacatctgcctgcacctgcaccgcgcactgctgcagcactgcccagctttcagcggcgccggcaagggctgcctgcgcgcgctagccgtcaagttcaagaccacccacgcgccgcctggggacacgctggtgcacctcggcgacgtgctctccaccctctacttcatctcccgaggctccatcgagatcctgcgcgacgacgtggtcgtggccatcctaggaaagaatgacatctttggggaacccgtcagcctccatgcccagccaggcaagtccagtgcagacgtgcgggctctgacctactgcgacctgcacaagatccagcgggcagatctgctggaggtgctggacatgtacccggcctttgcggagagcttctggagtaagctggaggtcaccttcaacctgcgggacgcagccgggggtctccactcatccccccgacaggctcctggcagccaagaccaccaaggtttctttctcagtgacaaccagtcagggtctccccatgagctggggccccagttcccctctaagggctacagcctcctgggtcctgggagccagaactccatgggggcaggaccttgtgctccagggcacccagatgcagcccctcccctgagcatctcagatgcatctggcctctggcctgagctactgcaggaaatgcccccaaggcacagcccccaaagccctcaggaagacccagattgctggcctctgaagctgggctccaggctagagcagctccaggcccagatgaacaggctggagtcccgcgtgtcctcagacctcagccgcatcttgcagctcctccagaagcccatgccccagggccacgccagctacattctggaagcccctgcctccaatgacctggccttggttcctatagcctcggagacgacgagtccagggcccaggctgccccagggctttctgcctcctgcacagaccccaagctatggagacttggatgactgtagtccaaagcacaggaactcctcccccaggatgcctcacctggctgtggcaacggacaaaactctggcaccatcctcagaacaggaacagcctgaggggctctggccacccctagcctcacctctacatcccctggaagtacaaggactcatctgtggtccctgcttctcctccctccctgaacaccttggctctgttcccaagcagctggacttccagagacatggctcagatcctggatttgcagggagttggggccactgaactccaagataaagacaccatgaggggactgaaggtgggcaaggtgagagttaaggatcttggggaggtggccgggtgcagtggctcgcctgtaatcccagcactttgggaggccgaggcgggcggatcagaccatcctggctaacacggtgaaaccccacctctactaaaattaaaaaagaaaaaaaatagccgggcgtggtggcaggcgcctgtaatcccagctactggggaggctgaggcaggagaatggcatgaacccgggaggtggaggttgcagggagccgaggccgcaccactgcactccagcctgggtgacagagtgagactccaactcaaaaaaaaaaaaaaaaaag

SEQ ID NO: 13748 - DNA, 11820 bp, Homo sapiens
cccactcgctggctctctctccagctgcctcctctccaggtctctcctggctgcgcgcgctcctctccccgcttctccccctcccgcagcctcgccgccttggtgccttcctgcccggctcggccggcgctcgtccccggccccggccccgccagcccgggtctccgcgctcggagcagctcagccctgcagtggctcgggacccgatgctatgagagggaagcgagccgggcgcccagaccttcaggaggcgtcggatgcgcggcgggtcttgggaccgggctctctctccggctcgccttgccctcgggtgattatttggctccgctcatagccctgccttcctcggaggagccatcggtgtcgcgtgcgtgtggagtatctgcagacatgactgcgtggaggagattccagtcgctgctcctgcttctcgggctgctggtgctgtgcgcgaggctcctcactgcagcgaagggtcagaactgtggaggcttagtccagggtcccaatggcactattgagagcccagggtttcctcacgggtatccgaactatgccaactgcacctggatcatcatcacgggcgagcgcaataggatacagttgtccttccatacctttgctcttgaagaaaattttgatattttatcagtttacgatggacagcctcaacaagggaatttaaaagtgagattatcgggatttcagctgccctcctctatagtgagtacaggatctatcctcactctgtggttcacgacagacttcgctgtgagtgcccaaggtttcaaagcattatatgaagttttacctagccacacttgtggaaatcctggagaaatcctgaaaggagttctgcatggaacgagattcaacataggagacaaaatccggtacagctgcctccctggctacatcttggaaggccacgccatcctgacctgcatcgtcagcccaggaaatggtgcatcgtgggacttcccagctcccttttgcagagctgagggagcctgcggaggaaccttacgcgggaccagcagctccatctccagcccgcacttcccttcagagtacgagaacaacgcggactgcacctggaccattctggctgagcccggggacaccattgcgctggtcttcactgactttcagctagaagaaggatatgatttcttagagatcagtggcacggaagctccatccatatggctaactggcatgaacctcccctctccagttatcagtagcaagaattggctacgactccatttcacctctgacagcaaccaccgacgcaaaggatttaacgctcagttccaagtgaaaaaggcgattgagttgaagtcaagaggagtcaagatgctgcccagcaaggatggaagccataaaaactctgtcttgagccaaggaggtgttgcattggtctctcacatgtgtctagatcctgggattccagaaaatggtagaagagcaggttccgacttcagtagggttggtgcaaatgtacagttttcatgtgaggacaattacgtgctccagggatctaaaagcatcacctgtcagagagttacagagacgctcgctgcttggagtgaccacaggcccatctgccgagcgagaacatgtggatccaatctgcgtgggcccagcggcgtcattacctcccctaattatccggttcagtatgaagataatgcacactgtgtgtgggtcatcaccaccaccgacccggacaaggtcatcaagcttgcctttgaagagtttgagctggagcgaggctatgacaccctgacggttggtgatgctgggaaggtgggagacaccagatcggtcttgtacgtgctcacgggatccagtgttcctgacctcattgtgagcatgagcaaccagatgtggctacatctgcagtcggatgatagcattggctcacctgggtttaaagctgtttaccaagaaattgaaaagggagggtgtggggatcctggaatccccgcctatgggaagcggacgggcagcagtttcctccatggagatacactcacctttgaatgcccggcggcctttgagctggtgggggagagagttatcacctgtcagcagaacaatcagtggtctggcaacaagcccagctgtgtattttcatgtttcttcaactttacggcatcatctgggattattctgtcaccaaattatccagaggaatatgggaacaacatgaactgtgtctggttgattatctcggagccaggaagtcgaattcacctaatctttaatgattttgatgttgagcctcagtttgactttctcgcggtcaaggatgatggcatttctgacataactgtcctgggtactttttctggcaatgaagtgccttcccagctggccagcagtgggcatatagttcgcttggaatttcagtctgaccattccactactggcagagggttcaacatcacttacaccacatttggtcagaatgagtgccatgatcctggcattcctataaacggacgacgttttggtgacaggtttctactcgggagctcggtttctttccactgtgatgatggctttgtcaagacccagggatccgagtccattacctgcatactgcaagacgggaacgtggtctggagctccaccgtgccccgctgtgaagctccatgtggtggacatctgacagcgtccagcggagtcattttgcctcctggatggccaggatattataaggattctttacattgtgaatggataattgaagcaaaaccaggccactctatcaaaataacttttgacagatttcagacagaggtcaattatgacaccttggaggtcagagatgggccagccagttcgtccccactgatcggcgagtaccacggcacccaggcaccccagttcctcatcagcaccgggaacttcatgtacctgctgttcaccactgacaacagccgctccagcatcggcttcctcatccactatgagagtgtgacgcttgagtcggattcctgcctggacccgggcatccctgtgaacggccatcgccacggtggagactttggcatcaggtccacagtgactttcagctgtgacccggggtacacactaagtgacgacgagcccctcgtctgtgagaggaaccaccagtggaaccacgccttgcccagctgcgacgctctatgtggaggctacatccaagggaagagtggaacagtcctttctcctgggtttccagatttttatccaaactctctaaactgcacgtggaccattgaagtgtctcatgggaaaggagttcaaatgatctttcacacctttcatcttgagagttcccacgactatttactgatcacagaggatggaagtttttccgagcccgttgccaggctcaccgggtcggtgttgcctcatacgatcaaggcaggcctgtttggaaacttcactgcccagcttcggtttatatcagacttctcaatttcgtacgagggcttcaatatcacattttcagaatatgacctggagccatgtgatgatcctggagtccctgccttcagccgaagaattggttttcactttggtgtgggagactctctgacgttttcctgcttcctgggatatcgtttagaaggtgccaccaagcttacctgcctgggtgggggccgccgtgtgtggagtgcacctctgccaaggtgtgtggccgaatgtggagcaagtgtcaaaggaaatgaaggaacattactgtctccaaattttccatccaattatgataataaccatgagtgtatctataaaatagaaacagaagccggcaagggcatccaccttagaacacgaagcttccagctgtttgaaggagatactctaaaggtatatgatggaaaagacagttcctcacgtccactgggcacgttcactaaaaatgaacttctggggctgatcctaaacagcacatccaatcacctgtggctagagttcaacaccaatggatctgacaccgaccaaggttttcaactcacctataccagttttgatctggtaaaatgtgaggatccgggcatccctaactacggctataggatccgtgatgaaggccactttaccgacactgtagttctgtacagttgcaacccggggtacgccatgcatggcagcaacaccctgacctgtttgagtggagacaggagagtgtgggacaaaccactaccttcgtgcatagcggaatgtggtggtcagatccatgcagccacatcaggacgaatattgtcccctggctatccagctccgtatgacaacaacctccactgcacctggattatagaggcagacccaggaaagaccattagcctccatttcattgttttcgacacggagatggctcacgacatcctcaaggtctgggacgggccggtggacagtgacatcctgctgaaggagtggagtggctccgcccttccggaggacatccacagcaccttcaactcactcaccctgcagttcgacagcgacttcttcatcagcaagtctggcttctccatccagttctccacctcaattgcagccacctgtaacgatccaggtatgccccaaaatggcacccgctatggagacagcagagaggctggagacaccgtcacattccagtgtgaccctggctatcagctccaaggacaagccaaaatcacctgtgtgcagctgaataaccggttcttttggcaaccagaccctcctacatgcatagctgcttgtggagggaatctgacgggcccagcaggtgttattttgtcacccaactacccacagccgtatcctcctgggaaggaatgtgactggagagtaaaagtgaacccggactttgtcatcgccttgatattcaaaagtttcaacatggagcccagctatgacttcctacacatctatgaaggggaagattccaacagccccctcattgggagttaccagggctctcaggccccagaaagaatagagagtagcggaaacagcctgtttctggcatttcggagtgatgcctccgtgggcctttcagggttcgccattgaatttaaagagaaaccacgggaagcttgttttgacccaggaaatataatgaatgggacaagagttggaacagacttcaagcttggctccaccatcacctaccagtgtgactctggctataagattcttgacccctcatccatcacctgtgtgattggggctgatgggaaaccctcctgggaccaagtgctgccctcctgcaatgctccctgtggaggccagtacacgggatcagaaggggtagttttatcaccaaactacccccataattacacagctggtcaaatatgcctctattccatcacggtaccaaaggaattcgtggtctttggacagtttgcctatttccagacagccctgaatgatttggcagaattatttgatggaacccatgcacaggccagacttctcagctcactctcggggtctcactcaggggaaacattgcccttggctacgtcaaatcaaattctgctccgattcagtgcaaagagcggtgcctctgcccgcggcttccacttcgtgtatcaagctgttcctcgtaccagtgacacccaatgcagctctgtccccgagcccagatacggaaggagaattggttctgagttttctgccggctccatcgtccgattcgagtgcaacccgggatacctgcttcagggttccacggcgctccactgccagtccgtgcccaacgccttggcacagtggaacgacacgatccccagctgtgtggtaccctgcagtggcaatttcactcaacgaagaggtacaatcctgtcccccggctaccctgagccatacggaaacaacttgaactgtatatggaagatcatagttacggagggctcgggaattcagatccaagtgatcagttttgccacggagcagaactgggactcccttgagatccacgatggtggggatgtgaccgcacccagactgggaagcttctcaggcaccacagtaccggcactgctgaacagtacttccaaccaactctacctgcatttccagtctgacattagtgtggcagctgctggtttccacctggaatacaaaactgtaggtcttgctgcatgccaagaaccagccctccccagcaacagcatcaaaatcggagatcggtacatggtgaacgacgtgctctccttccagtgcgagcccgggtacaccctgcagggccgttcccacatttcctgtatgccagggaccgttcgccgttggaactatccgtctcccctgtgcattgcaacctgtggagggacgctgagcaccttgggtggtgtgatcctgagccccggcttcccaggttcttaccccaacaacttagactgcacctggaggatctcattacccatcggctatggtgcacatattcagtttctgaatttttctaccgaagctaatcatgacttccttgaaattcaaaatggaccttaccacaccagccccatgattggacaatttagcggcacggatctccccgcggccctgctgagcacaacgcatgaaaccctcatccacttttatagtgaccattcgcaaaaccggcaaggatttaaacttgcttaccaagcctatgaattacagaactgtccagatccacccccatttcagaatgggtacatgatcaactcggattacagcgtggggcaatcagtatctttcgagtgttatcctgggtacattctaataggccatcctgtcctcacttgtcagcatgggatcaacagaaactggaactacccttttccaagatgtgatgccccttgtgggtacaacgtaacttctcagaacggcaccatctactcccctggctttcctgatgagtatccgatcctgaaggactgcatttggctcatcacggtgcctccagggcacggagtttacatcaacttcaccctgttacagacggaagctgtcaacgattacattgctgtttgggacggtcccgatcagaactcaccccagctgggagttttcagtggcaacacagccctcgaaacggcgtatagctccaccaaccaagtcctgctcaagttccacagcgacttttcaaatggaggcttctttgtcctcaatttccacgcatttcagctcaagaaatgtcaacctcccccagcggttccacaggcagaaatgcttactgaggatgatgatttcgaaataggagattttgtgaagtaccagtgccaccccgggtacaccttggtggggaccgacattctgacttgcaagctcagttcccagttgcagtttgagggttctctcccaacatgtgaagcacaatgcccagcaaatgaagtccggactggatcatcgggagtcattctcagtccagggtatccgggtaattattttaactcccagacttgctcttggagtattaaagtggaaccaaactacaacattaccatctttgtggacacatttcaaagtgaaaagcagtttgatgcactggaagtgtttgatggttcttctgggcaaagtcctctgctagtagtcttaagtgggaatcatactgaacaatcaaattttacaagcaggagtaatcagttatatctccgctggtccactgaccatgccaccagtaagaaaggattcaagattcgctatgcagcaccttactgcagtttgacccaccccctgaagaatgggggtattctaaacaggactgcaggagcggttggaagcaaagtgcattatttttgcaagcctggataccgaatggtcggccacagcaatgcaacctgtagacgaaacccacttggcatgtaccagtgggactccctcacgccactctgccaggctgtgtcctgtggaatcccagaatccccaggaaacggttcatttaccgggaacgagttcactttggacagtaaagtggtctatgaatgtcatgaaggcttcaagcttgaatccagccagcaagcaacagccgtgtgtcaagaagatgggctgtggagtaacaaggggaagccgcccatgtgtaagccggtcgcttgccccagcattgaagctcagctctcagaacatgtcatctggaggctggtttcaggatccttgaatgagtacggtgctcaagtattgctgagctgcagtcctggttactacttagaaggctggaggctcctgcggtgccaggccaatgggacgtggaacataggagatgagaggccaagctgtcgagttatctcgtgtggaagcctttcctttcccccaaatggcaacaagattggaacgttgacagtttatggggccacagctatatttacgtgcaacaccggctacacgcttgtggggtctcatgtcagagagtgcttggcaaatgggctctggagcggcagcgaaactcgatgtctggctggccactgcggttccccagacccgattgtgaacggtcacattagtggagatggcttcagttacagagacacggtggtttaccagtgcaatcctggtttccggcttgtgggaacttccgtgaggatatgcctgcaagaccacaagtggtctggacaaacgcctgtctgtgtccccatcacatgtggtcaccctggaaaccctgcccacggattcactaatggcagtgagttcaacctgaatgatgtcgtgaatttcacctgcaacacgggctatttgctgcagggcgtgtctcgagcccagtgtcggagcaacggccagtggagtagccctctgcccacgtgtcgagtggtgaactgttctgatccaggctttgtggaaaatgccattcgtcacgggcaacagaacttccctgagagttttgagtatggaatgagtatcctgtaccattgcaagaagggattttacttgctgggatcttcagccttgacctgtatggcaaatggcttatgggaccgatccctgcccaagtgtttggctatatcctgtggacacccaggggtccctgccaacgccgtcctcactggagagctgtttacctatggcgccgtcgtgcactactcctgcagagggagcgagagcctcataggcaacgacacgagagtgtgccaggaagacagtcactggagcggggcactgccccactgcacaggaaataatcctggattctgtggtgatccggggaccccagcacatgggtctcggcttggtgatgactttaagacaaagagtcttctccgcttctcctgtgaaatggggcaccagctgaggggctcccctgaacgcacgtgtttgctcaatgggtcatggtcaggactgcagccggtgtgtgaggccgtgtcctgtggcaaccctggcacacccaccaacggaatgattgtcagtagtgatggcattctgttctccagctcggtcatctatgcctgctgggaaggctacaagacctcagggctcatgacacggcattgcacagccaatgggacctggacaggcactgctcccgactgcacaattataagttgtggggatccaggcacactagcaaatggcatccagtttgggaccgacttcaccttcaacaagactgtgagctatcagtgtaacccaggctatgtcatggaagcagtcacatccgccactattcgctgtaccaaagacggcaggtggaatccgagcaaacctgtctgcaaagccgtgctgtgtcctcagccgccgccggtgcagaatggaacagtggagggaagtgatttccgctggggctccagcataagttacagctgcatggacggttaccagctctctcactccgccatcctctcctgtgaaggtcgcggggtgtggaaaggagagatcccccagtgtctccctgtgttctgcggagaccctggcatccccgcagaagggcgacttagtgggaaaagtttcacctataagtccgaagtcttcttccagtgcaaatctccatttatactcgtgggatcctccagaagagtctgccaagctgacggcacgtggagcggcatacaacccacctgcattgatcctgctcataacacctgcccagaccctggtacgccacactttggaatacagaatagctccagaggctatgaggttggaagcacggtttttttcaggtgcagaaaaggctaccatattcaaggttccacgactcgcacctgccttgccaatttaacatggagtgggatacagaccgaatgtatacctcatgcctgcagacagccagaaaccccggcacacgcggatgtgagagccatcgatcttcctactttcggctacaccttagtgtacacctgccatccaggctttttcctcgcagggggatctgagcacagaacatgtaaagcagacatgaaatggacaggaaagtcgcctgtgtgtaaaagtaaaggagtgagagaagttaatgaaacagttactaaaactccagttccttcagatgtctttttcgtcaattcactgtggaaggggtattatgaatatttagggaaaagacaacccgccactctaactgttgactggttcaatgcaacaagcagtaaggtgaatgccaccttcagcgaagcctcgccagtggagctgaagttgacaggcatttacaagaaggaggaggcccacttactcctgaaagcttttcaaattaaaggccaggcagatatttttgtaagcaagttcgaaaatgacaactggggactagatggttatgtgtcatctggacttgaaagaggaggatttacttttcaaggtgacattcatggaaaagactttggaaaatttaagctagaaaggcaagatcctttaaacccagatcaagactcttccagtcattaccacggcaccagcagtggctctgtggcggctgccattctggttcctttctttgctctaattttatcagggtttgcattttacctctacaaacacagaacgagaccaaaagttcaatacaatggctatgctgggcatgaaaacagcaatggacaagcatcgtttgaaaaccccatgtatgatacaaacttaaaacccacagaagccaaggctgtgaggtttgacacaactctgaacacagtctgtacagtggtatagccctcagtgccccaacaggactgattcatagccatacctctgatggacaagcagtgattcctttggtgccatataccactctcccttccactctggctttactgcagcgatcttcaaccttgtctactggcataagtgcagcggggatctctactcaaatgtgtcagggtcttctacggatcaaactacacatgcgttttcattccaaaagtgggttctaaatgcctggctgcatctgtatgaaatcaaggcacactccaggaagactgccgcgtcgcgccaacacgtcatactcaatgcctcagactttcatatttctgtgttgctgagatgcctttcaatgcaatcgtctgggctcgtggatatgtccctcaggtgcggtgacagaatggtggcaccacgatatgtgttctcttgtgttgtttttcctttttaaacccccatgaacacgaatactctgaaaaaaataaaaagctttctggaagaagacacctttctgatagaggctcacacctacaaatgcttcactctgtccttccgagacctgacaagctttgaggacctcacagctcccctgtgtgttcatctctagggatgtttgcaatttcccagtcagctgttctgtcgcagaatgtttaatgcacaattttttgcactagtgtgttatgaatgactaagattctgataaaaaaaataaattatttacacagggtttatacacactaaaaaaaa

SEQ ID NO: 13749 - DNA, 5397 bp, Homo sapiens
gcgcactggagccctggccagcgcgcagccttcccggcgccggcgggctgggtcttgggaattctggtttgctttggctcactcgctttttacaaaccactggatcttacatgcctctgtaccccccacttccactccatgtccccatgctcctgcgccagcaacaggacatgttctctggatgtcagctgagtcattaaagtaactctgcatgtcagtagacagaccttggtagaaccacaaggctcccagagacacccatctctcctcatttttttggtgtgtgtgtcttcaccgaacattcaaaactgtttctccaaagcgttttgcaaaaactcagactgttttccaaagcagaagcactggagtccccagcagaagcgatgggcagtgtgcgaaccaaccgctacagcatcgtctcttcagaagaagacggtatgaagttggccaccatggcagttgcaaatggctttgggaacgggaagagtaaagtccacacccgacaacagtgcaggagccgctttgtgaagaaagatggccactgtaatgttcagttcatcaatgtgggtgagaaggggcaacggtacctcgcagacatcttcaccacgtgtgtggacattcgctggcggtggatgctggttatcttctgcctggctttcgtcctgtcatggctgttttttggctgtgtgttttggttgatagctctgctccatggggacctggatgcatccaaagagggcaaagcttgtgtgtccgaggtcaacagcttcacggctgccttcctcttctccattgagacccagacaaccataggctatggtttcagatgtgtcacggatgaatgcccaattgctgttttcatggtggtgttccagtcaatcgtgggctgcatcatcgatgctttcatcattggcgcagtcatggccaagatggcaaagccaaagaagagaaacgagactcttgtcttcagtcacaatgccgtgattgccatgagagacggcaagctgtgtttgatgtggcgagtgggcaatcttcggaaaagccacttggtggaagctcatgttcgagcacagctcctcaaatccagaattacttctgaaggggagtatatccctctggatcaaatagacatcaatgttgggtttgacagtggaatcgatcgtatatttctggtgtccccaatcactatagtccatgaaatagatgaagacagtcctttatatgatttgagtaaacaggacattgacaacgcagactttgaaatcgtggtcatactggaaggcatggtggaagccactgccatgacgacacagtgccgtagctcttatctagcaaatgaaatcctgtggggccaccgctatgagcctgtgctctttgaagagaagcactactacaaagtggactattccaggttccacaaaacttacgaagtccccaacactcccctttgtagtgccagagacttagcagaaaagaaatatatcctctcaaatgcaaattcattttgctatgaaaatgaagttgccctcacaagcaaagaggaagacgacagtgaaaatggagttccagaaagcactagtacggacacgccccctgacatagaccttcacaaccaggcaagtgtacctctagagcccaggcccttacggcgagagtcggagatatgactgactgattccttctctggaatagttactttacaacacggtctgttggtcagaggcccaaaacagttatacagatgacggtactggtcaagatgggtcaagcaagcggccacaagggactgaggcaagcacaatggtttcaaagaaagactgtaagctccatgattagcataaagcactaaccatgtctccatgtgacccgatggcacatagatgttgtagaataagttatgggtttttatgttttgttttgtgtttttccaaaacttgaacttgcaggcaagccttggttgggtatttgatttatccagaatgcttctctttagggaacaaggatgtttttaatggcataacaaaggcaagactctgccttaatttttgaaaagctgctaactacatgaacacaaatgtgtatttttgttgcagtgtagttttccttttgtgtaattttaaagtcagtgttgaattttattgaaagctcatgatgcgcttcaaagtggcaagtatttggctattaactgccaaaacaagagcctgattttttgaggccagtaattcgtttgctagaattgattttttttctctctctctttgttacataagggcattatgtaacactagccgaatggtagcctctgggttgttgtttttttcttttcctccatgatgttaatgggttatctcaaattttaagttaaactacctaaaataaataccaaagataatgcatatttttgcacagtggagcttacacttaaaagaaaacaaagccccatgggctgccttgaaatcaagagacaataactttgaacctcagcaagaccttgaaccgccggttcattttgcaccttattcagaaaatagagcatcatactcaccgagtctagtcagtgtagtgcttttaaaaattttgtcctttcatgtaacttttttattttaagaggaagaagaagaaaggggcacacacacacaataccgacgtctatcctttcctgctaggcagtgctggccaggctcatgtgtagtgtgcgagatggtgatgtactcttatatttttctgggcttttccttttgcacattccaaaattcatttcataagacaagatcttcataggacctccttggcatcctggcattctcaaaactgagccatccagcatgaaagataaatgggtttaaacccttgctgctgaatttattgcctggactgtcaggacatcaccagcccaccttcaccttagggaagatgccacacctggcctccacacttgctcttctgatcagtctgtctggattgagtcctacagtgtcagatagggcggcaaatgccaaagcagggaaacagggaggtgtggacaagccagtttgatgcagcacttcagatcaagtgcttaggaaggagaggaaacttgccttttttatggcagaggatagtaatgaaaatgtctcagtattttagggtcaatgagagccataaaaatataacataatcacaagtaaaggagataatggtctaaaacagctatttcccttttctgtgtgcatacttatgactgaatgtgagctaagcattttctcctgtggagccctagagcaggttactaaggaaggacacattgttttccagaagcctcccctgcctggctgactgccttgctagaaacataattttttttttctcactgaagctcaataatggaactctttttttttttttttttaatttaaagttccctatttgtgaattctgggattactgacttttctttttaattggagtctcaaaatcaactctcttatggtattatatctctgtatgccattaaaaaacagcttgttctagaatcatgtattttgtaaactgatgtttgtgatggtctctggttcttgaacagccatatctgaatgccgtgcctgcaaaactatgacaatttttgctgttttcagccttcagatttgatggcttgggaaactgaggtgttattttcaatgaaacaaagaaagagatgttaagcaagtggttgttttagatccaaatgtaaaggcaggtttgggaaggtgtttaaagagttggaggaattggggattgagttgtaaagaaaacttacagaagaggcaacaatttggttcttgacagtgagaggatattgagggcttcagctgctgctattatgatgttttgcaaaggaaaataatcaaaccaaagagtattcagtgatatgtaaattaaatgaagatacagtggagaatgggggtgaccacaaaagaggctccccctaaacacacagtgctgccacttaaaaagacttgagaaatttgaaagggggtgggtatggggggggcaagaaagagggagggaaatctttcaacttatttctgaaaaagagaaaaaaatataaaatttctggtgcacaggtttgttttttcaagaaaattttgcagaagctatgtttttaaagtgtacattttataaagtttatcagatattttcatatttaaagccaaatgtaaatagaggtctgtaaagaaaaataattgccatagaaagtataatttcagtgcagtaatttctgagagctagtacctatatgctaccggttagcatggttttagcaaatatataccagccttataaggttcgtattgctatgttcttctgttatttatttcagcatggactgttcatttgaaacctttttctagttattagcgttttaacagttacaagctttaaatggcaattttttttttttttttttttttttttttttttttgtcaagagccaagacacaggtaatgcacgacattgattgctgcattttaccttcaaaatatttgtccttattgactgggtctccttaattaatgtacacatgtcattagaatgcagacggaggggactcaccatgaatatctggggttgattcccagatgtgtgttgcttctctattgcaagcagattccctgttggatttacttcggatttattcccttttaaagaatttttgcccatatctggaagggcactatatttttgggaggagccatagattcctggttatcctatttttaaacaaaatgtagacaaagtgaactctattttgattattgagaaaggagtagttttctatccctctaagagtatacttgaatcagacattttaaggatgtcactatggcactgttgtcatttccaaattcctagaaaagtttgttttactttgtttttattctgttaatgcattctttcttctctttacttcctttcttaccagtacactcctatctcaactctgtttatttgatgagttctgtcccgtaaatcatatttcccttacaattaataaatgtcacttcatattttataataaaccactcagtaaaagcaaaagcttgtcctgagaagtagagtgagttctttttcactctgtgtctaataatgttaaggtgggaaaaaaaaaagtgtggcatagctacctgcccatccccaaccctcagcaaagtagaatctcttttctggtaattttgggtttccgctctgggctctggcaagttgaacaatcctagccattgacaatcgtgatagttattattttcccatttgctgtctttttgtatctaaagtcttcctattgtactgcacaaaccatggattgtacatatttttatatattatgtcttattttattatttctaaataaaaaaattaaaaattgaaaaaaaaaaaaa

SEQ ID NO: 13750 - DNA, 2963 bp, Homo sapiens
cgcttcgctgcctggcggcctttccccgagccgagcccgcttcccgaggccgccagtcgtcgcctgcccgcgcctgcgcagcgtcccgggccgagagggccacggcggcggccatggcgcaccgctgtttgcggctgtggggccggggcggctgctggccccgcggcctacagcagctcctcgtgcctggcggcgtgggcccgggcgagcagccctgcctccggacgctttaccgatttgttacaactcaagcaagggccagcagaaattctcttttgacagatataattgctgcttatcaaagattctgttctcgacccccaaaaggatttggaaaatactttcctaatggaaaaaatggaaaaaaagctagtgaacctaaagaagttatgggagagaaaaaagaatcaaagccagctgctaccacacgctcttctggaggaggaggtggtggcggtggaaaacgaggtggcaagaaagatgattctcactggtggtccaggtttcagaagggtgacattccatgggacgacaaggatttcaggatgttcttcctctggactgctctgttctggggtggagtcatgttttacttgctgctcaagagatccgggagagaaatcacttggaaggactttgtcaataactatctttcaaaaggagtagtagacagattggaagtcgtcaacaagcgttttgttcgagtgacctttacaccaggaaaaactcctgttgatgggcaatacgtttggtttaatattggcagtgtggacacctttgaacggaatctggaaactttacagcaggaattgggcatagaaggagaaaatcgggtgcctgttgtctacattgctgaaagtgatggctcttttctgctgagcatgctgcctacggtgctcatcatcgccttcttgctctacaccatcagaagagggcctgctggcattggccggacaggccgagggatgggcggactcttcagtgtcggagaaaccactgccaaggtcttaaaggatgaaattgatgtgaagttcaaagatgtggctggctgtgaggaggccaagctagagatcatggaatttgtgaatttcttgaaaaacccaaagcagtatcaagacctaggagcaaaaatcccaaagggtgccattctcactggtcctccaggcactgggaagacgctgctagctaaggccacagccggagaagccaatgtccccttcatcaccgttagtggatctgagtttttggagatgttcgttggtgtgggccctgctagagtccgagacttatttgcccttgctcggaagaatgccccttgcatcctcttcatcgatgaaatcgatgcggtgggaaggaagagaggaagaggcaactttggagggcagagtgagcaggagaacacactcaaccagctgctggtggagatggatggttttaatacaacaacaaatgtcgtcattttggccggcaccaatcgaccagatatcctggaccccgcgctacttaggccggggcgtttcgacaggcagatctttattggaccaccagacataaaaggaagagcttctattttcaaagttcatctccgaccgctaaaactggacagtaccctggagaaggataaattggcaagaaaactggcatctttaactccagggttttcaggtgctgatgttgctaatgtctgtaatgaagctgcgttgattgctgcaaggcatctgtcagattccataaatcagaaacactttgaacaggcaattgagcgagtgattggtggcttagagaagaaaacgcaggttctgcagcctgaggagaagaagactgtggcataccacgaagcaggccatgcggttgccggctggtatctggagcacgcagacccgcttttaaaggtatccatcatcccacgtggcaaaggactaggttatgctcagtatttaccaaaagaacaatacctctataccaaagagcagctcttggataggatgtgtatgactttaggtggtcgagcctctgaagaaatcttctttggaagaattacaactggtgctcaagatgacttgagaaaagtaactcagagtgcatatgcccaaattgttcagtttggcatgaatgaaaaggttgggcaaatctcctttgacctcccacgtcagggggacatggtattggagaaaccttacagtgaagccactgcaagattgatagatgatgaagtacgaatacttattaatgatgcttataaaagaacagtagctcttctcacagaaaagaaagctgacgtggagaaggttgctcttctgttgttagaaaaagaagtattagataagaatgatatggttgaacttttgggccccagaccatttgcggaaaaatctacctatgaagaatttgtggaaggcactggcagcttggatgaggacacctcacttccagaaggccttaaggactggaacaaggagcgggaaaaggagaaagaggagcccccgggtgagaaagttgccaactagaggcccagagggaggccatctcagtctctccactgtggtttcagctggtgcattatttcagctgtggctttcagaagaatgggaatgctgcgctgattttagccagccactggcccagctgaaatgatggggaaaggagtccttagtcctttcagcctcagaggtcacagtgggtggcaggtgactttccggaggccttgagggaaatgcacactgtcccatagcctcattgggctcccagacgtgctggaaaggttgagcccagagtggccgaggctggaccctgtggcaccaagtggggtcggctgaccgtgtggcagggatcgttgcactggactcttggcgtgtgggaagggatgctttctctttgtcgcccactcttcattcctgtttctcctcagttcccctgtgcagatgggctgtgaaattaaattggagtcttgataagaacatttt

SEQ ID NO: 13751 - DNA, 2428 bp, Homo sapiens
agtgttaccttggagcctacaatgagaggtatttcaaaatgagtgaagcatgactctcacagatgaaggcctagacgcaggatctttaatgaaaaaacacttgggccacttcaagacgacaaacgctcactgggcaaaacaccttcactgaaaagagacctcatattatgcaaaaaaaatcttaaaaggcctctgccttcagaagttacaagatgatcaattcaacctccacacagcctccagatgaatcctgctctcagaacctcctgatcactcagcagatcattcctgtgctgtactgtatggtcttcattgcaggaatcctactcaatggagtgtcaggatggatattcttttacgtgcccagctctgagagtttcatcatctatctcaagaacattgttattgctgactttgtgatgagcctgacttttcctttcaagatccttggtgactcaggccttggtccctggcagctgaacgtgtttgtgtgcagggtctctgccgtgctcttctacgtcaacatgtacgtcagcattgtgttctttgggctcatcagctttgacagatattataaaattgtaaagcctctttggacttctttcatccagtcagtgagttacagcaaacttctgtcagtgatagtatggatgctcatgctcctccttgctgttccaaatattattctcaccaaccagagtgttagggaggttacacaaataaaatgtatagaactgaaaagtgaactgggacggaagtggcacaaagcatcaaactacatcttcgtggccatcttctggattgtgtttcttttgttaatcgttttctatactgctatcacaaagaaaatctttaagtcccaccttaagtcaagtcggaattccacttcggtcaaaaagaaatctagccgcaacatattcagcatcgtgtttgtgttttttgtctgttttgtaccttaccatattgccagaatcccctacacaaagagtcagaccgaagctcattacagctgccagtcaaaagaaatcttgcggtatatgaaagaattcactctgctactatctgctgcaaatgtatgcttggaccctattatttatttctttctatgccagccgtttagggaaatcttatgtaagaaattgcacattccattaaaagctcagaatgacctagacatttccagaatcaaaagaggaaatacaacacttgaaagcacagatactttgtgagttcctaccctcttccaaagaaagaccacgtgtgcatgttgtcatcttcaattacataacagaaatcaataagatatgtgccctcatcataaatatcatctctagcactgccatccaatttagttcaataaaattcaaatataagtttccatgcttttttgtaacatcaaagaaaacatacccatcagtaatttctctaatactgacctttctattctctattaataaaaaattaatacatacaattattcaattctattatattaaaataagttaaagtttataaccactagtctggtcagttaatgtagaaatttaaatagtaaataaaacacaacataatcaaagacaactcactcaggcatcttctttctctaaataccagaatctagtatgtaattgttttcaacactgtccttaaagactaacttgaaagcaggcacagtttgatgaagggctagagagctgtttgcaataaaaagtcaggtttttttcctgatttgaagaagcaggaaaagctgacacccagacaatcacttaagaaaccccttattgatgtatttcatggcactgcaaaggaagaggaatattaattgtatacttagcaagaaaattttttttttctgatagcactttgaggatattagatacatgctaaatatgttttctacaaagacttacgtcatttaatgagcctggggttctggtgttagaatatttttaagtaggctttactgagagaaactaaatattggcatacgttatcagcaacttcccctgttcaatagtatgggaaaaataagatgactgggaaaaagacacacccacaccgtagaacatatattaatctactggcgaatgggaaaggagaccattttcttagaaagcaaataaacttgatttttttaaatctaaaatttacattaatgagtgcaaaataacacataaaatgaaaattcacacatcacatttttctggaaaacagacggattttacttctggagacatggcatacggttactgacttatgagctaccaaaactaaattctttctctgctattaactggctagaagacattcatctatttttcaaatgttctttcaaaacatttttataagtaatgtttgtatctatttcatgctttactgtctatatactaataaagaaatgttttaataccgaaaaaaaaaaaaaaaa

SEQ ID NO: 13752 - DNA, 7871 bp, Homo sapiens
tttttttttttttttcctaatttttggtcggcggcggtgctgggccaggggaaggaagggacacggaggccgccctcgtcccgccacctcctacccgcttccccccagccccggctccgggagatgtgccgggcggggggcccgggttcgccgagccgcaggagagacacgctgggccgaccccagagaggcgctggacaggctggtggtccaggccgtggtgcctgccaggtgatgtggggcaaagccccccgcacaggccactgagagctccggacacgcacccggctgccaccatggcccgcctagccgcagtgctctggaatctgtgtgtcaccgccgtcctggtcacctcggccacccaaggcctgagccgggccgggctcccgttcgggctgatgcgccgggagctggcgtgtgaaggctaccccatcgagctgcggtgccccggcagcgacgtcatcatggtggagaatgccaactacgggcgcacggacgacaagatttgcgatgctgaccctttccagatggagaatgtgcagtgctacctgccggacgccttcaagatcatgtcacagaggtgtaacaaccgcacccagtgcgtggtggtcgccggctcggatgcctttcctgacccctgtcctgggacctacaagtacctggaggtgcagtacgactgtgtcccctacatcttcgtgtgcccagggaccctgcagaaggtgctggagcccacctcgacacacgagtcagagcaccagtctggcgcatggtgcaaggacccgctgcaggcgggtgaccgcatctacgtgatgccctggatcccctaccgcacggacacactgactgagtatgcctcgtgggaggactacgtggccgcccgccacaccaccacctaccgcctgcccaaccgcgtggatggcacaggctttgtggtctacgatggtgccgtcttctacaacaaggagcgcacgcgcaacatcgtcaagtatgacctacggacgcgcatcaagagcggggagacggtcatcaataccgccaactaccatgacacctcgccctaccgctggggcggaaagaccgacattgacctggcggtggacgagaacgggctgtgggtcatctacgccactgagggcaacaacgggcggctggtggtgagccagctgaacccctacacactgcgctttgagggcacgtgggagacgggttacgacaagcgctcggcatccaacgccttcatggtgtgtggggtcctgtacgtcctgcgttccgtgtacgtggatgatgacagcgaggcggctggcaaccgcgtggactatgccttcaacaccaatgccaaccgcgaggagcctgtcagcctcaccttccccaacccctaccagttcatctcctccgttgactacaaccctcgcgacaaccagctgtacgtctggaacaactatttcgtggtgcgctacagcctggagttcgggccgcccgaccccagtgctggcccagccacttccccacccctcagcacgaccaccacagccaggcccacgcccctcaccagcacagcctcgcccgcagccaccaccccgctccgccgggcacccctcaccacgcacccagtgggtgccatcaaccagctgggacctgatctgcctccagccacagccccagtccccagcacccggcggcccccagccccgaatctacacgtgtcccctgagctcttctgcgagccccgagaggtacggcgggtccagtggccggccacccagcagggcatgctggtggagaggccctgccccaaggggactcgaggaattgcctccttccagtgtctaccagccttggggctctggaacccccggggccctgacctcagcaactgcacctccccctgggtcaaccaggtggcccagaagatcaagagtggggagaacgcggccaacatcgccagcgagctggcccgacacacccggggctccatctacgcgggggacgtctcctcctctgtgaagctgatggagcagctgctggacatcctggatgcccagctgcaggccctgcggcccatcgagcgcgagtcagccggcaagaactacaacaagatgcacaagcgagagagaacttgtaaggattatatcaaggccgtggtggagacagtggacaatctgctccggccagaagctctggagtcctggaaggacatgaatgccacggagcaggtgcacacggccaccatgctcctcgacgtcctggaggagggcgccttcctgctggccgacaatgtcagggagcctgcccgcttcctggctgccaaggagaacgtggtcctggaggtcacagtcctgaacacagagggccaggtgcaggagctggtgttcccccaggaggagtacccgagaaagaactccatccagctgtctgccaaaaccatcaagcagaacagccgcaatggggtggtcaaagttgtcttcatcctctacaacaacctgggcctcttcctgtccacggagaatgccacagtgaagctggccggcgaagcaggcccgggtggccctgggggcgcctctctagtggtgaactcacaggtcatcgcagcatccatcaacaaggagtccagccgcgtcttcctcatggaccctgtcatcttcaccgtggcccacctggaggacaagaaccacttcaatgctaactgctccttctggaactactcggagcgttccatgctgggctactggtcgacccaaggctgccgcctggtggagtccaacaagacccataccacgtgtgcctgcagccacctcaccaacttcgctgtgctcatggctcaccgtgagatctaccagggccgcatcaacgagctgctgctgtcggtcatcacctgggtgggcattgtgatctccctggtctgcttggccatctgcatctccaccttctgcttcctgcgggggctgcagaccgaccgcaacaccatccacaagaacctgtgcatcaacctcttcctggctgagctgctcttcctggtcgggatcgacaagactcagtatgagattgcctgccccatcttcgccggcctgctgcactatttcttcctggctgccttctcctggctgtgcctggagggcgtgcacctctacctgctactagtggaggtgtttgagagcgagtattcccgcaccaagtactactacctgggtggctactgcttcccggccctggtggtgggcatcgcggctgccattgactaccgcagctacggcaccgagaaggcctgctggctccgagtggacaattacttcatctggagtttcatcgggccagtctccttcgttatcgtggtcaacctggtgttcctcatggtgaccctgcacaagatgatccgaagctcatctgtgctcaagcccgactccagccgcctggacaacattaaatcctgggcgctgggggccatcgcgctgctgttcctgctgggcctcacctgggctttcggcctcctcttcatcaacaaggagtcggtggtcatggcctatctcttcaccaccttcaacgccttccagggggtcttcatcttcgtctttcactgcgccttacagaagaaggtgcacaaggagtacagcaagtgcctgcgtcactcctactgctgcatccgctccccacccgggggcactcacggatccctcaagacctcagccatgcgaagcaacacccgctactacacagggacccagagccgaattcggaggatgtggaatgacactgtgaggaaacagacggagtcctccttcatggcgggtgacatcaacagcacccccaccctgaaccgaggtaccatggggaaccacctgctgaccaaccccgtgctgcagccccgtgggggcaccagtccctacaacaccctcatcgccgagtcagtgggcttcaatccctcctcgccccctgtcttcaactccccagggagctaccgggaacccaagcaccccttgggaggccgggaagcctgtggcatggacaccctgcccctgaacggcaacttcaataacagttactccttgcgaagtggggatttccctcccggggatgggggccctgagccgccccgaggccggaacctagccgatgcggcggcctttgagaagatgatcatctcagagctggtgcacaacaacctgcgggggagcagcagcgcggccaagggccctccaccgcctgagccccctgtgccacctgtgccagggggcgggggcgaggaagaggcgggcgggcccgggggtgctgaccgggccgagattgaacttctctataaggccctggaggagcctctgctgctgccccgggcccagtcggtgctgtaccagagcgatctggacgagtcggagagctgcacggccgaggacggcgccaccagccggcccctctcctcccctcctggccgggactccctctatgccagcggggccaacctgcgggactcaccctcctacccggacagcagccctgaggggcccagtgaggccctgcccccaccccctcccgcaccccccggcccccccgaaatctactacacctcgcgcccgccagccctggtggcccggaatcccctgcagggctactaccaggtgcggcgtcctagccacgagggctacctggcagccccaggccttgaggggccagggcccgatggggacgggcagatgcagctggtcaccagtctctgagggcacctcatggaccaggggctggtggcccaggccagggagggaaccctgggcagggctctggtgggagagggagacagatggaggcagtggctggtgggccactctctccaggtgcccctcagccatgggccctacagtcccctcaggggactctaacctgggggcctgaggtgccagggttcacagacagggtttcccaccagccacacgcaccagctctatttgggggaagtgtagtgaggaggagcccagaggaccccaggggagtgaggagggagaacttggaagggtgcagcccacttccagactctcccctctcccacccttctaccctgtgaagggaaatgagggctttagtttcctgggcagggaggggcagcttctgaggttgccaaaggcccccactggatggaacctgttagctgctcctctccgcagccagaaatgctgccggctgcacccagagggagcagtgaggcaggacagatggacaggttcctcctgcgctgtaattccctgctccctggagactgggaaaaggccgcagggcagggggactgggcggtggtggctggtggtttaaaggttgaactttctctgaagctcctttccccttgctcttggtccctgccccgcaagcaaacctgccccctctgcctcccagtgcacccaatgaccccctcccttggggcgactcctgatgaagcacaactccccgcagggcccccagcccacaggggtggccatatttgggcagttcccagtcctgtgggctcggctatctggggagcagattttgggtctggatctccctggggagtgggtcctgggcttggatctttccctagggggccctcttactccttcctctctcctcctccttccccattgctgtaaatatttcaacgaaatggaaaagaaaaaaaaaagacaaaaaaaaaaaaaaagaaaagaaaaaaaatctcatcacttgaagccaccgggagcctgcggcccgggccagcccgggctttctccggagcagagcagcgctgctggcctggcagccaggacttctccgtgtacgtgcatccccagtccccgccggggcgggcgggccgccagagcagctttttacaatccagagacagaaaacaaaatctagatgcaacagcgaaacaaagaacccatttccttcctggcacccgtttctgtcccctcctttcctgctccgcctgcccggcatcatcagcccttctggggcgtgtacctctcactgcctgccccaggaccagaggcctgtctcccccttccctccccaccggcccgggggagacctcttcacacccaaagatgctttgtcaagatggctgcgctgtccctttgagttcctgcttcttgtatattgctctggggactctcgccggggaagatggggctgatttcccacctagagaggttgatggcagaaggaaaatggggaggcactggggttgtggagggcatgggtatggctgaggagggtgctgggaacggcaaggcggtctgggggatggggaggggcaaaggtgagagatcaccttccctatcctccaccttcccgcagggaagacgaagccaggtgccagggctggggtcgggacacccatgttctgggcggcttgaccccaaatcccagaccccggaagctccaggctcgggatgtgtcctgagcacctgtcccggccccctcctctccagcctgtcaggccagcctccccagcccccttccctcaactctaggggcagcatagccccaggccaccctagcccagcccctgcattgccgtttccccagaggtggcccctccacctctgctctgacctctccccatctctctgcccctccttttctcacaagtgccatgagttttcaaacatcttcgggtctcagcctgctgctgccatgaactttgttgggttaagggggaggggctctaggaaggaactggggggaaggggacaggtaggtggctggagggaccctttttgctgctagaaagcccctcccttctcccggggagctggggctggcttgtccccatcaattaggggagaaggggtcagaccaaagatggtggtttgtcccgtgtaagggaacaggtgtggggaagaggtggggttgggttccaactctggctttttctggtagaaaggcctaacccattacaccagaagaccatgggtgaagtctagatggggaggagaagtgaggccagggacagtcttgccagacgactctgaggagggcaagggacagttccatggcccttcccggactgcactaggctgggagctctgttgtgtggaggggtggtcagaggtctgtgaagagcgggcaggaggcatgagcaggcgaggagctggcctgtcccgggaagcagcccagcctgtggctgcccccgacaccaggaggagggccaggagagttccagggggctgaggcacacagagaggccaacttcctccctgcccagccttccttgtatctctccagactcggacaatcaaagggagagagggtgtatcgggtcctgttccagccggcatcgccgggtggcttccaggcctcagagctgtgtggcagggccccctgctggggctggacatcactgcagtccagtgcaaagccgcccccagagcccaggtgtccccccaacctaaccagacctggtgccttgacgcccccaccccagctgggacggtacagagaagggtcttggtttcctctcctactcccttccttaggctcctgaactcgtttgctcctaaatcttgttaattctttttctctggattttggtttcttttggctttcccttgccttcccctttctctgtctccaacactctttccccatgtctttctggctgtctctatgttcctcttctcttatcctcaactttctgtccattcgggcctcctccccacctcccacgccccagcccctccctccttggtctccttttcgatatgccaaaccaattttgggtcgagtgcatttaacgagaacaaaacaaaaggctcataacaacaagaacgtttcagaaaaaaacaaaaagttttaaaaaaattgttgagtcaaaaagtcaaacaataaagaaattaagatttcttggaatgacaaaaaaaaaaaaaaaaaaa

SEQ ID NO: 13753 - DNA, 1749 bp, Homo sapiens
aatccagaggcaggggagggacggtgcaggcgcagagtattgggtttggctggcctcgatttaaagagacagaagctgtcggggtcctggaagacggtccccaataccctccccccaagtccttgggaccacttgggtccccagagctggggagatggtttgtggcggctttgcctgctccaagaatgcgctttgcgctctcaacgtggtctacatgctggtgagcttgttgctcattggagtggctgcttggggcaagggcctgggtctggtgtccagcatccacatcatcggcggagtcattgctgtgggagtcttccttctccttattgcagtggctggactggtgggtgctgtcaaccaccaccaagtcctgctgttcttttacatgatcatccttggtttggtcttcatcttccaatttgtaatctcttgctcatgtctggctattaaccgaagcaaacagacagatgtcatcaatgcttcttggtgggtcatgagcaacaagactcgggatgaactggaaagaagttttgattgttgtggcttattcaacctcacaaccctgtatcaacaagattatgatttctgcactgcaatctgcaagagccagagccccacatgccagatgtgtggagaaaagtttcttaagcattcagacgaagccctgaaaatcctagggggtgttggactcttctttagctttacagagatccttggtgtttggctagcaatgagatttcggaatcagaaggatcctagagccaaccccagtgcctttctatgagactttggatccttctgacttttcttctgctctctctaagctttctcttcctcccttagggaatatctagggtctgtaaccgttttggtttgagaaaaaggaaaggccccttgtcacatcctctaaaattgatggaatagcaagactttatgccttgacatattttagtgggagccagactataaggaataaaaggaaaaactttcttcctctctctccaagaggatatgggaagcttctgtgagtgcataggatgggggctggagtcattcttagctgtttcccttcctctgtccatatactggatcacctcaacataccctggtgtggctctaagggtaaatcagggatagggccaaggagaaaacaaccaagaactctttcctgtaataagcaggatccagtttgagaaagtttagcgaatataaaagtaaaagccatttaaaaatctatattctttttttttttttgacacagagtcttgctctgttgcccaggctggagtgcaatggcatgatctcggctcaccgcaacctctgcctcccgggttcaagcgatcctcctgcctcagtctcccaagtagctgggattacaggtgtgcaccaccacgcctgactaattttgtatttttagtagagacagggtttcaccatgttagtcaggctggtctcgaactcctgacctcaggtgatccacccgcgttggcctcccaacgtgctgggattataggcgtgagccaccacgccccgcctaaaatccatattcaaagaagcaatttcagttcctttctaagctttgtcagtcaaggggctccactgacttcctaggccctgtaatttaaccagtctttaaggttttgcaggaaagtcccttcttccaagtggtttttccaaatcgcacaatggcaaagccaaacagaggaagaaacattaaaaaaaaaaaaaagaccattaaaaaaaaaa

SEQ ID NO: 13754 - DNA, 6686 bp, Homo sapiens
gagccaccacccctgaccatgtagatgccagttccagggagcagcatgggccccactgaatggagactcctgggtctacagccctgagcccctccggcccctggacctcgtcccacaccggaggacacctcttggagctcaccaccactgtcaccagcccgcctcggccacccccaccccccgggacccggagtcggccgcctggtgccacagctgaccagtgagggtgtgctgaggacagccacaagcagccatcacccggcagcctcttgtccagcgctgacccttgggcccagcccgagcaaggaccgcagcaaacatgggtgacatgaccaacagcgacttttactccaaaaaccaaagaaatgagtcgagccatgggggcgagttcgggtgcacaatggaggagctccgctccctcatggagctgcggggcactgaggctgtggtcaagatcaaggagacttatggggacaccgaagccatctgccggcgcctcaaaacctcacctgttgaaggtttgccgggcaccgctccagacctggaaaagagaaagcaaatttttgggcaaaactttatacctccaaagaagccaaaaaccttcctgcagctcgtgtgggaggcgctgcaggacgtgacgctcatcatcctggagattgccgccatcatctccctggggctgtccttctaccacccgcccggcgagggcaacgaaggatgtgcgacggcccagggtggggcagaggatgaaggagaggcagaggcaggttggatcgagggggccgccattctcctctcagttatctgtgtggtcctggtcacggccttcaatgactggagcaaagagaaacagttccggggcctgcagagccgcatcgagcaggaacagaaatttaccgtggtccgggctggccaggtggtccagatccctgtggctgagatcgtggttggggacatagcccaggtcaaatatggtgacctcctccctgccgacggcctcttcatccagggcaatgacctcaagattgatgaaagctccctaactggagagtctgaccaggtgcgcaagtccgtggacaaggaccccatgctgctgtcaggaacccacgtgatggagggctcaggacggatgttggtgactgctgtgggtgtgaactctcagactggcatcatctttaccctcctgggggctggtggtgaagaggaagagaagaaagacaaaaaagccaaacaacaggacggggcagccgccatggagatgcagcccctcaagagtgccgagggcggcgacgctgacgacaggaagaaggccagcatgcacaagaaggagaagtccgtgctgcagggcaagctcaccaagctggctgtgcagatcgggaaggcgggcttggtgatgtcagccatcacggtgatcatcctggtgctctacttcactgtggacaccttcgtggtcaacaagaagccgtggctgcctgagtgcacgcccgtctacgtgcagtactttgtcaagttcttcatcattggcgtgacggtgctggtggtcgccgtgcccgaggggctccctctggccgtcaccatctcgttggcctattcggtgaagaaaatgatgaaggacaacaacctggtacgccacctggatgcctgtgagaccatgggcaatgccacagccatctgctcagacaagacaggcacgctgaccaccaatcgcatgacagtggtacaggcctatgtcggcgacgtccactataaagagatccccgaccccagctccatcaacaccaagaccatggagctgctgatcaatgccatcgccatcaacagcgcctacaccaccaagattctgcccccagagaaggagggcgccctgcctcggcaggtgggcaacaagacggagtgcggcctgctgggcttcgtgctggacctgaagcaggactacgagcccgtgcgcagccagatgccagaggagaagttgtacaaagtgtacaccttcaactccgtgcgcaagtccatgagcactgtcatcaagctgcccgacgagagcttccgcatgtacagcaagggggcttctgagatcgtgctcaagaagtgctgcaaaatcctcaatggggcgggagagcctcgtgtcttccggccccgcgaccgggacgagatggtaaagaaggtgattgagcccatggcttgcgatgggctccgcactatctgcgtggcctaccgcgacttccccagcagcccggagccggactgggacaatgagaatgacatcctcaacgaactcacctgcatctgcgtggtgggcatcgaggacccggtgcggccagaggtcccagaagccatccgcaagtgccagcgggcaggcatcacggtccgcatggtcactggcgacaatatcaacacggctcgggccatcgccatcaagtgtggcatcatccatcctggggaggactttctgtgcctcgagggcaaggagttcaacaggaggatccgcaacgagaagggggagattgagcaggagcgaattgacaagatctggccaaagctgcgggtgctggctcgctcctccccaacggacaagcataccctggttaaaggcatcatcgacagcacacacactgagcagcggcaggtggtggccgtgacgggggacgggaccaacgacgggcctgcactcaagaaggccgacgtgggcttcgccatgggcatcgcaggcactgacgtggccaaggaggcctcagacatcatcctgacagacgacaatttcagcagcatcgtcaaggcagtgatgtggggccgcaacgtctatgacagcatctccaaattcttgcagttccagctcaccgtcaacgtggtggccgtgattgtggccttcacaggcgcctgcatcacgcaggactcccctctgaaggccgtgcagatgctctgggtgaacctcatcatggacacgtttgcctcgctggcactggccactgagccgcccacggagaccctgctgctgaggaagccgtacggccgcaacaagccgctcatctccaggaccatgatgaagaacatcctgggccatgctgtctaccagcttgccctcatcttcaccctgctctttgttggcgagaagatgttccagatcgacagcgggaggaacgcgcccctgcattcgccaccctcagaacattacaccatcatcttcaacaccttcgtcatgatgcagctcttcaacgagatcaacgcccgcaagatccacggcgagcgcaatgtctttgacggcatcttccggaaccccatcttctgcaccatcgtgctgggcacctttgccatccagatagtgatcgtgcagtttggagggaagccattcagctgctctccactgcagctggaccagtggatgtggtgcatattcattgggttaggagagctcgtttggggccaggtcatcgccaccatcccgaccagcagactcaagttcctcaaggaggcaggcaggctcacacagaaggaggagatcccggaggaggagctcaacgaggacgtggaggagatcgaccacgcggagcgggagctgcggcggggccagatcctgtggttccgaggcctgaatcggatccagacacagatccgcgtcgtgaaggcgttccgtagctctctctatgaaggtttagaaaagcctgaatctcgaacctccatccataacttcatggctcatcctgaattccggatcgaagattcccagccccacatccccctcattgatgacaccgacctggaagaagatgccgcgctcaagcagaactcgagcccgccgtcatccctcaacaagaacaacagcgccatcgacagtgggatcaacctgacgaccgacacaagcaaatcagctacctcttcaagtccagggagccccatccacagcctggagacgtcgctttagctgaggaccctctcgcctgcccgcccgccctcatggaccccgctgccacccgctttccgggcacccatccatccaggcacccaactcacccaagcagcaacgagcaacaatcggaaaccaaatactggagagaaaaccaacgtttccacccacagaccctttctctggctgcgatgctgtttgaactctttttcacttcaaggcaaggggcgggatctccactgggggcttacgggagtgagcggttttcccaaaacaagcccttcctggctcccacccagacatggaccagccatgcacccgcccagccaccacgtcccccgcatgaatgtactgtacactttcaatcctccccttgtttggtttttgggggttggggaggggtttttgtttgtttgtttgttttcttaggcgggaactgcaaacagactcttttctgagactatttatccaatccactggtctgtgagtttttgaaatgcttgcacagcatggtctcagttgtatagattaatttaataactttttgaaattgcagagcttaactcgcctagtagatttgcaccaatggaaccgaagaacttcatagacactcacaaggttatatccatttctttgtatctatatcaacgtatacttttccgagactgtatacgtccatatagataggtagatatatatatatatatataaatatatatacatggatatataaagtttctttgccggcatgttgccttgtttccgcttaaattgctctattttaacttatttatgtcctaaaagaagaatgtaatttgtttacaaacctgtagataacgtctttggctatttgtatggtttaagaacactggtggctgagatgctataaaaacagctcggcccaacagacacttcccctgggttgcatcctggatgttttatgatagccatgctctgatttttgcctgctatttccgttcaataatgtcactaccgtgagaggctcaggcagaagccaaatgctaccgagttgccatcctgaggggtttaacaacatgctccgtagacgaagggagaggaggagagaaggcttcctgggtttgcaacactaacggccatccggcccaaggatgccaggatctgcaaagcactgctcgaagacttttctctcaatgaaactcgcttgagtttactaagagcatttcaaaaataggttctctttggcactgtctgtacagagattgaggtagtgttgaaatattataaatggtattgtgttgatttttttttttatttagtaacttacaggtttgtttccttattaatggcagcatctgagctgttggcatattggatgaggatcagtatggcttgctgcttttatttttatttttgaagaagaatagcctttttctctgcactatttagatccgaatgaaccttatgatgtgtatattgagatgtactcagtgtgattttaaaccaaattgtcttcctgtagtcacaatatatactgtagccttttaacagcaagtcttgctttcccaaacagaaagccattctgaaaccctacagtatcacaggtgagaaaaggtggttattttttccccaagacaacagcactagtaatcccacttaataagagcttatttaattggatgtcagcctcttaactgctaagcactttgtgggtctcagcgtttttcataaaagaacttttgtatttaatacaaagtttgctttgagacttttcagcatatgatcttttttccataaacttgtacagtgcaaaagacattttgaataccatgatcgatgatgtcccatgcttcgaggaaaaccaaacactttccgcctctcttgcaaaatccattcctcatgctgaccctcctcacgatggctgtgtcagcccagccccttcccttctccaggcccagagaactcttccacaaacaagatgagagccactcgggaaaagagccatagtcaactgggagggcctacatctggatggcggtggaaaaacttgagggtttggggttcaaagtcagcccatcccacctggcaaaatcctcctggaaggaggaccttcaagagcgcatcacctgaatgtcgtgaagaagtatctctgaatgtatccaggagaggaactgcataaccaaaggggtgaccagccctcagatgtgcttattggattccagtacaaacgccaccaaagccagcccactgctctcctacaaggaaggaaagatctgcacgtgtaaaacatggggcagccttggaacatggtgttttttggagtttcctttctcacagttttccatctccccacttctttgatcagtcatgtgtccgtgacctcgttccatgacatcaggatagctgtgtttgcacaccatgctccatgttcattcggagccaggaggggttctcagtggagcctggcttagggaacagggagcgatggaagaatgccaacattagcgttggtcttctcttgtcaggaatgaaggatgcttgcacacatgcaccccctcactctcacacttgcacacatacacacacacacacacgaaatggttggtttgtcaaaactcactgtagtacataaagcttgcactctgcgtcctatatctagcagcatggggtacgtttggcagttcactccattagggggtaaataatttatgaccattcatctgtttttatgaatttttttatctagacaataatgtaaataaagaactcaccatctctgttcatttaatactaaaaaaaaaaaaaaaaa

SEQ ID NO: 13755 - DNA, 859 bp, Homo sapiens
atgttggagctagaggctgagcatgaccaggacctgagtaaacaggataagcaagaaacagatgttgatgaggaccctcaagcgtctacatctctgcagttttcaaagaagaacctccttgaactgtgtctgaagggcatgttcctcaagctaaactactggaacacaaagataggtctccaggtgaaagaacttggagctgattacatagacggaacggagaaaattgacaatattattaaaaaaataaatgtaacagaaaacacagtgaagagcttattaaaagacatgctgaccctgaagggtcaaattgaaaagctggaggaccggggccttgaccttgatcaagggacaagcactgaggtgaatacttgtaatgaagtttatgaattaaagaagaaagtcatagaaaggctggaggacctttgcaagaatgtggaactgctgagtgcaaagctaaggatgtatcaaatggaggcagaggacactgactctcacagttctgaggaaatagatacggaagagatggaggccctgcttcctcaggccccagcatcctttttagtgcagaagtctcctccccgcaatacagcatggaaacgtgcactgaggattttcatcatgtttgatgtcctcaccgtcactggacttttatgttacatactattttttggtgctacatttctctttgaaagggtgcttctgagaatgcttgggtgccgcaccacatgggacctacgggagatgagagagcctttcttgaatttggaagtggaagccttgttaccctcctaaagatacagaagttactgtcaccctactgactttctcaccagtaaacattgtggctgttcctgta

SEQ ID NO: 13756 - DNA, 3201 bp, Homo sapiens
cagaaactatgagggcagaacccagcaatctgtgctttctttcacaagccctccaggagttgctgaaatttaggaatcattgccccaaaaagtggccctcataatgatgccagatgggatcttactctgttgcccaggctggagtgcagtggtgcgatctcggctctctgcaacctccgcctcccaggttcaagtgattctcctgcctcggcctcctgagtagctgggatttcaggccatgaaagatcactgttttagtctgcgtggtgcagtggaacagatagacctcggtttgaatctcagctctactgtttactagacatgaaatggggaaatctaaaatgagatgccagaagcctcaaaaatggaaaaccccctgtgcttcacatctgaaaatctctgctgggggcagcaactttgagcctgtggggaaggaactgtccacgtggagtggtctggtgaatgcttaaggagctgcagaagggaagtccctctccaaactagccagccactgagaccttctgacaggacacccccaggatgtcacccaaaaaagtacaaatcaaagtggaggaaaaagaagacgagactgaggaaagctcaagtgaagaggaagaggaggtggaagataagctacctcgaagagagagcttgagaccaaagaggaaacggaccagagatgttatcaatgaggatgacccagaacctgaaccagaggatgaagaaacaaggaaggcaagagaaaaagagaggaggaggaggctaaagagaggagcagaagaagaagaaattgatgaagaggaattggaaagattgaaggcagagttagatgagaaaagacaaataattgctactgtcaaatgcaaaccatggaagatggagaagaaaattgaagttctcaaggaggcaaaaaaatttgtgagtgaaaatgaaggggctcttgggaaaggaaaaggaaaacggtggtttgcatttaagatgatgatggccaagaaatgggcaaaattcctccgtgattttgagaacttcaaagctgcgtgtgtcccatgggaaaataaaatcaaggctattgaaagtcagtttggctcctcagtggcctcatacttcctcttcttgagatggatgtatggagtcaatatggttctctttatcctgacatttagcctcatcatgttgccagagtacctctggggtttgccatatggcagtttacctaggaaaaccgttcccagagccgaagaggcatcggcagcaaactttggtgtgttgtacgacttcaatggtttggcacaatattccgttctcttttatggctattatgacaataaacgaacaattggatggatgaatttcaggttgccgctctcctattttctagtggggattatgtgcattggatacagctttctggttgtcctcaaagcaatgaccaaaaacattggtgatgatggaggtggagatgacaacactttcaatttcagctggaaggtctttaccagctgggactacctgatcggcaatcctgaaacagcagacaacaaatttaattctatcacaatgaactttaaggaagctatcacagaagaaaaagcagcccaagtagaagaaaacgtccacttgatcagattcctgaggtttctggctaacttcttcgtgtttctaacacttggagggagtggatacctcatcttttgggctgtgaagcgatcccaggaatttgcacagcaagatcctgacacccttgggtggtgggaaaaaaatgaaatgaacatggttatgtccctcctagggatgttctgtccaacattgtttgacttatttgctgaattagaagactaccatcctctcatcgctttgaaatggctactgggacgcatttttgctcttcttttaggcaatttatacgtatttattcttgcattaatggatgagattaacaacaagattgaagaggagaagctagtaaaggccaatattaccctttgggaagccaatatgatcaaggcctacaatgcatcattctctgaaaatagcactggaccacccttttttgttcaccctgcagatgtacctcgaggaccttgctgggaaacaatggtgggacaggagtttgtgaggctgacagtctctgatgttctgaccacctacgtcacaatcctcattggggactttctaagggcatgttttgtgaggttttgcaattattgctggtgctgggacttggagtatggatatccttcatacaccgaattcgacatcagtggcaacgtcctcgctctgatcttcaaccaaggcatgatctggatgggctccttctttgctcccagcctcccaggcatcaatatccttcgactccatacatccatgtacttccagtgctgggccgttatgtgctgcaatgttcctgaggccagggtcttcaaagcttccagatcaaataacttctacctgggcatgctactgctcatcctcttcctgtccacaatgcctgtcttgtacatgatcgtgtccctcccaccatcttttgattgtggtccattcagtggcaaaaatagaatgtttgaagtcattggagagaccctggagcacgatttcccaagctggatggcgaagatcttgagacagctttcaaaccctgggctggtcattgctgtcattttggtgatggttttggccatctattatctcaatgctactgccaagggccagaaggcagcgaatctggatctcaaaaagaagatgaaaatgcaagctttggagaacaaaatgcgaaacaagaaaatggcagctgcacgagcagctgcagctgctggtcgccagtaataagtatcctgagagcccagaaaaggtacactttgccttgctgtttaaaagtaatgcaatatgtgaacgcccagagaacaagcactgtggaactgctattttcctgttctacccttgatggattttcaaggtcatgctggccaattaaggcatcatcagtcctacctgagcaacaagaatctaaactttattccaagtcagaaactgtttctgcagagccactctctcccctgctccatttcgtgactttttttttttttttaacaaattgagtttagaagtgagtgtaatccagcaatacagtttactggtttagttggtgggttaattaaaaaaaatttgctcatatgaactttcattttatatgtttcttttgcc

SEQ ID NO: 13757 - DNA, 3009 bp, Homo sapiens
atccagccccgggagaacagcatgtacaccagcctcagtgttacagagtgtgggtacatcaaggtgaatggtgagcagaaactataacctgttagtccttctacacctcatctgctacaagttctggcttagacatggatattctttgtgaagaaaatacttctttgagctcaactacgaactccctaatgcaattaaatgatgacaccaggctctacagtaatgactttaactccggagaagctaacacttctgatgcatttaactggacagtcgactctgaaaatcgaaccaacctttcctgtgaagggtgcctctcaccgtcgtgtctctccttacttcatctccaggaaaaaaactggtctgctttactgacagccgtagtgattattctaactattgctggaaacatactcgtcatcatggcagtgtccctagagaaaaagctgcagaatgccaccaactatttcctgatgtcacttgccatagctgatatgctgctgggtttccttgtcatgcccgtgtccatgttaaccatcctgtatgggtaccggtggcctctgccgagcaagctttgtgcagtctggatttacctggacgtgctcttctccacggcctccatcatgcacctctgcgccatctcgctggaccgctacgtcgccatccagaatcccatccaccacagccgcttcaactccagaactaaggcatttctgaaaatcattgctgtttggaccatatcagtaggtatatccatgccaataccagtctttgggctacaggacgattcgaaggtctttaaggaggggagttgcttactcgccgatgataactttgtcctgatcggctcttttgtgtcatttttcattcccttaaccatcatggtgatcacctactttctaactatcaagtcactccagaaagaagctactttgtgtgtaagtgatcttggcacacgggccaaattagcttctttcagcttcctccctcagagttctttgtcttcagaaaagctcttccagcggtcgatccatagggagccagggtcctacacaggcaggaggactatgcagtccatcagcaatgagcaaaaggcatgcaaggtgctgggcatcgtcttcttcctgtttgtggtgatgtggtgccctttcttcatcacaaacatcatggccgtcatctgcaaagagtcctgcaatgaggatgtcattggggccctgctcaatgtgtttgtttggatcggttatctctcttcagcagtcaacccactagtctacacactgttcaacaagacctataggtcagccttttcacggtatattcagtgtcagtacaaggaaaacaaaaaaccattgcagttaattttagtgaacacaataccggctttggcctacaagtctagccaacttcaaatgggacaaaaaaagaattcaaagcaagatgccaagacaacagataatgactgctcaatggttgctctaggaaagcagcattctgaagaggcttctaaagacaatagcgacggagtgaatgaaaaggtgagctgtgtgtgataggctagttgccgtggcaactgtggaaggcacactgagcaagttttcacctatctggaaaaaaaaaaatatgagattggaaaaaattagacaagtctagtggaaccaacgatcatatctgtatgcctcattttattctgtcaatgaaaagcggggttcaatgctacaaaatgtgtgcttggaaaatgttctgacagcatttcagctgtgagctttctgatacttatttataacattgtaaatgatatgtctttaaaatgattcacttttattgtataattatgaagccctaagtaaatctaaattaacttctattttcaagtggaaaccttgctgctatgctgttcattgatgacatgggattgagttggttacctattgctgtaaataaaaatagctataaatagtgaaaattttattgaatataatggcctcttaaaaattatctttaaaacttactatggtatatattttgaaaggagaaaaaaaaagccactaaggtcagtgttataaaatctgtattgctaagataattaaatgaaatacttgacaacatttttcattcctgctttttcatagataccattttgaaatattcacaaggttgctggcatttgctgcatttcaagttaattctcagaagtgaaaaagacttcaaatgttattcaataactattgctgctttctcttctacttcttgtgctttactctgaatttccagtgtggtcttgtttaatatttgttcctctaggtaaactagcaaaaggatgatttaacattaccaaatgcctttctagcaattgcttctctaaaacagcactatcgaggtatttggtaacttgctgtgaaatgactgcatcatgcatgcactcttttgagcagtaaatgtatattgatgtaactgtgtcaggattgaggatgaactcaggtttccggctactgacagtggtagagtcctaggacatctctgtaaaaagcaggtgactttcctatgacactcatcaggtaaactgatgctttcagatccatcggtttatactatttattaaaaccattctgcttggttccacaatcatctattgagtgtacatttatgtgtgaagcaaatttctagatatgagaaatataaaaataattaaaacaaaatccttgccttcaaacgaaatggctcggccaggcacggaggctcgtgcatgtaatcctagcactttgggaggctgagatgggaggatcacttgaggccaagagtttgagaccaacctgggtaacaaagtgagacctccctgtctctacaaaaaaaatcaaaaaattatctgatccttgtggcacacaactgtggtcccagctacaggggaggctgagacgcaaggatcacttgagcccagaagctcaaggctgcagtgagccaagttcacaccactgccatttcctcctgggcaacagagtgagaccctatcac

SEQ ID NO: 13758 - DNA, 6528 bp, Homo sapiens
tcctgctatacccacagtggtggtcatctcttctgatcttcacagccaatcagctcccaaggcccctgacctcagctcagcttttgtagatccttatgacaccatcctttaagactggaatcctagggcaggctgttttattcccgcctcctgaggcctttctgaggatctgtggcttgtctctgtcctgagggtgaagatggatgacagatgctacccagtaatctttccagatgagcggaatttccgccccttcacttccgactctctggctgcaattgagaagcggattgccatccaaaaggagaaaaagaagtctaaagaccagacaggagaagtaccccagcctcggcctcagcttgacctaaaggcctccaggaagttgcccaagctctatggcgacattcctcgtgagctcataggaaagcctctggaagacttggacccattctaccgaaatcataagacatttatggtgttaaacagaaagaggacaatctaccgcttcagtgccaagcatgccttgttcatttttgggcctttcaattcaatcagaagtttagccattagagtctcagtccattcattgttcagcatgttcattatcggcaccgttatcatcaactgcgtgttcatggctacagggcctgctaaaaacagcaacagtaacaatactgacattgcagagtgtgtcttcactgggatttatatttttgaagctttgattaaaatattggcaagaggtttcattctggatgagttttctttccttcgagatccatggaactggctggactccattgtcattggaatagcgattgtgtcatatattccaggaatcaccatcaaactattgcccctgcgtaccttccgtgtgttcagagctttgaaagcaatttcagtagtttcacgtctgaaggtcatcgtgggggccttgctacgctctgtgaagaagctggtcaacgtgattatcctcaccttcttttgcctcagcatctttgccctggtaggtcagcagctcttcatgggaagtctgaacctgaaatgcatctcgagggactgtaaaaatatcagtaacccggaagcttatgaccattgctttgaaaagaaagaaaattcacctgaattcaaaatgtgtggcatctggatgggtaacagtgcctgttccatacaatatgaatgtaagcacaccaaaattaatcctgactataattatacgaattttgacaactttggctggtcttttcttgccatgttccggctgatgacccaagattcctgggagaagctttatcaacagaccctgcgtactactgggctctactcagtcttcttcttcattgtggtcattttcctgggctccttctacctgattaacttaaccctggctgttgttaccatggcatatgaggagcagaacaagaatgtagctgcagagatagaggccaaggaaaagatgtttcaggaagcccagcagctgttaaaggaggaaaaggaggctctggttgccatgggaattgacagaagttcacttacttcccttgaaacatcatattttaccccaaaaaagagaaagctctttggtaataagaaaaggaagtccttctttttgagagagtctgggaaagaccagcctcctgggtcagattctgatgaagattgccaaaaaaagccacagctcctagagcaaaccaaacgactgtcccagaatctatcactggaccactttgatgagcatggagatcctctccaaaggcagagagcactgagtgccgtcagcatcctcaccatcaccatgaaggaacaagaaaaatcacaagagccttgtctcccttgcggagaaaacctggcatccaagtacctcgtgtggaactgttgcccccagtggctgtgcgttaagaaggtcctgagaactgtgatgactgacccgtttactgagctggccatcaccatctgcatcatcatcaacactgtcttcttggccatggagcatcacaagatggaggccagttttgagaagatgttgaatatagggaatttggttttcactagcatttttatagcagaaatgtgcctaaaaatcattgcgctcgatccctaccactactttcgccgaggctggaacatttttgacagcattgttgctcttctgagttttgcagatgtaatgaactgtgtacttcaaaagagaagctggccattcttgcgttccttcagggtgctcagggtcttcaagttagccaaatcctggccaactttgaacacactaattaagataatcggcaactctgtcggagcccttggaaacctgactgtggtcctggtcattgtgatctttattttctcagtagttggcatgcagctttttggccgtagcttcaattcccaaaagagtccaaaactctgtaacccgacaggcccgacagtctcatgtttacggcactggcacatgggggatttctggcactccttcctagtggtattccgcatcctctgcggggaatggatcgaaaatatgtgggaatgtatgcaagaagcgaatgcatcatcatcattgtgtgttattgtcttcatattgatcacggtgataggaaaacttgtggtgctcaacctcttcattgccttactgctcaattcctttagcaatgaggaaagaaatggaaacttagaaggagaggccaggaaaactaaagtccagttagcactggatcgattccgccgggctttttgttttgtgagacacactcttgagcatttctgtcacaagtggtgcaggaagcaaaacttaccacagcaaaaagaggtggcaggaggctgtgctgcacaaagcaaagacatcattcccctggtcatggagatgaaaaggggctcagagacccaggaggagcttggtatactaacctctgtaccaaagaccctgggcgtcaggcatgattggacttggttggcaccacttgcggaggaggaagatgacgttgaattttctggtgaagataatgcacagcgcatcacacaacctgagcctgaacaacaggcctatgagctccatcaggagaacaagaagcccacgagccagagagttcaaagtgtggaaattgacatgttctctgaagatgagcctcatctgaccatacaggatccccgaaagaagtctgatgttaccagtatactatcagaatgtagcaccattgatcttcaggatggctttggatggttacctgagatggttcccaaaaagcaaccagagagatgtttgcccaaaggctttggttgctgctttccatgctgtagcgtggacaagagaaagcctccctgggtcatttggtggaacctgcggaaaacctgctaccaaatagtgaaacacagctggtttgagagctttattatctttgtgattctgctgagcagtggggcactgatatttgaagatgttcaccttgagaaccaacccaaaatccaagaattactaaattgtactgacattatttttacacatatttttatcctggagatggtactaaaatgggtagccttcggatttggaaagtatttcaccagtgcctggtgctgccttgatttcatcattgtgattgtctctgtgaccaccctcattaacttaatggaattgaagtccttccggactctacgagcactgaggcctcttcgtgcgctgtcccagtttgaaggaatgaaggtggtggtcaatgctctcataggtgccatacctgccattctgaatgttttgcttgtctgcctcattttctggctcgtattttgtattctgggagtatacttcttttctggaaaatttgggaaatgcattaatggaacagactcagttataaattataccatcattacaaataaaagtcaatgtgaaagtggcaatttctcttggatcaaccagaaagtcaactttgacaatgtgggaaatgcttacctcgctctgctgcaagtggcaacatttaagggctggatggatattatatatgcagctgttgattccacagagaaagaacaacagccagagtttgagagcaattcactcggttacatttacttcgtagtctttatcatctttggctcattcttcactctgaatctcttcattggcgttatcattgacaacttcaaccaacagcagaaaaagttaggtggccaagacatttttatgacagaagaacagaagaaatactataatgcaatgaaaaaattaggatccaaaaaacctcaaaaacccattccacggcctctgaacaaatgtcaaggtctcgtgttcgacatagtcacaagccagatctttgacatcatcatcataagtctcattatcctaaacatgattagcatgatggctgaatcatacaaccaacccaaagccatgaaatccatccttgaccatctcaactgggtctttgtggtcatctttacgttagaatgtctcatcaaaatctttgctttgaggcaatactacttcaccaatggctggaatttatttgactgtgtggtcgtgcttctttccattgttagtacaatgatttctaccttggaaaatcaggagcacattcctttccctccgacgctcttcagaattgtccgcttggctcggattggccgaatcctgaggcttgtccgggctgcacgaggaatcaggactctcctctttgctctgatgatgtcgcttccttctctgttcaacattggtcttctactctttctgattatgtttatctatgccattctgggtatgaactggttttccaaagtgaatccagagtctggaatcgatgacatattcaacttcaagacttttgccagcagcatgctctgtctcttccagataagcacatcagcaggttgggattccctgctcagccccatgctgcgatcaaaagaatcatgtaactcttcctcagaaaactgccacctccctggcatagccacatcctactttgtcagttacattatcatctcctttctcattgttgtcaacatgtacattgctgtgattttagagaacttcaatacagccactgaagaaagtgaggaccctttgggtgaagatgactttgacatattttatgaagtgtgggaaaagtttgacccagaagcaacacaatttatcaaatattctgccctttctgactttgctgatgccttgcctgagcctttgcgtgtcgcaaagccaaataaatatcaatttctagtaatggacttgcccatggtgagtgaagatcgcctccactgcatggatattcttttcgccttcaccgctagggtactcggtggctctgatggcctagatagtatgaaagcaatgatggaagagaagttcatggaagccaatcctctcaagaagttgtatgaacccatagtcaccaccaccaagagaaaggaagaggaaagaggtgctgctattattcaaaaggcctttcgaaagtacatgatgaaggtgaccaagggtgaccaaggtgaccaaaatgacttggaaaacgggcctcattcaccactccagactctttgcaatggagacttgtctagctttggggtggccaagggcaaggtccactgtgactgagccctcacctccacgcctacctcatagcttcacagccttgccctcagcctctgagctccaggggtcagcagcttagtgtatcaacagggagtggattcaccaaattagccattccattttcttttctggctaaataaatgatatttcaatttcattttaaatgatacttacagagatataagataaggctacttgacaaccagcggtactattttaataaggaagaagacaccaggaaggactgtaaaaggacattccaattttaggattggaatagttcaagccgggcgcagtggctcatgcctggaatcccagcactttgagaggccaaggcaggtggatcacgaggtcaagagatcgagaccatcctggccaaccatgatgaaactccgtctctactaaaatacaaaaattagctgggcatggttgcgtgcgcctgtagtcccagctacttgggaggctgaggcaggagaatcgcttaaacctgggagacggaggttgcagtgagccaagatcgtgtcactgcactccagcctggtgacagagtgagactctgtttcaaaaaagaaaagaaaagaaacatggttcaaattatatctaaacaaaaaagaataagaaacaaaaaacacattaaaattttaagttgtattttctatgtttctagatacatcatttttgtttgatattttcctgatgcaagtatgtggtttatcacatgtagctcttttgcatgctaaatgaaaattcaagacttgccaataaatgaatagcttattgcagacattttttaccaacattaattattttgggtttgtttaaaacctagaggcacaatcttgacttgtcaattactaccctttcacaagctaccatctcagatatatatatatatataaattcaataaagctttctgtttgtgttccataaaaaaaaaaaaaaaaaaaaaaaaaaa

SEQ ID NO: 13759 - DNA, 8751 bp, Homo sapiens
atgagactggatgagataacgaaatcagagaatgaagacggagaaaagaagatgtttactcagcagtttgaaagtactgatgcctgtgtatatgaggtgtatgtgaaaataaattccattgtgaaatctcagagtcagtgtggattgaaaagaggtagtcccgagactgagctctggggtgctatagtgttcagaagccaggaagagaacgcaaaaccagtgaaggaaactgaggtgacagcctctgatgcagattcaggactctatggctttattgaatattctctttatgatggattcctgagctatgaagcacctcaggcattccggatcgaccctcatgatgggcaaatctgtgtttctcaagatatcgacagggaaagggatccagctacctatgatctcctggtggaagctaaggatggggatgagcagagaatgacacatttagccctggtgaagggtgggctaagtgcccaagcctttgttcgtgtggacctggaggacgtgaatgataatcatcctgtgtttaacccatcaacctatgtgacgagcatcagtgatgagacccagccaggcaccgagatcatcaatgttcttgccactgaccaggactctgggatatatgggacagtggcttatgagcttattccaggaaacgtgtcgtccctttttaccattgactccaccacaggactctatagtccagaggtagaaattctgagtgctgtcaacttttcagcagacaaggaagtaatgaacagtttagagatgtttttacctctgctaaggcacttcaagaaggttgaaagagatgaggaagctgcagaaaaaaaatttgaagctagcagaggttggttcatgaggtttaagggaagacgccatctccattacctaaaagtgcaagatgaagcagcaagtgctgatggagaagctgcagcaaggtatgtagcaaatctagctaagattcttggtgaaggaattatttacttaacattacctcttagtcatttggaatctaccacactttcgttgatggtctctgctcaagacggtggtgggctcacagctgtcattaatgccgatgtcaccatacacattttccagacaactctggcacctgctgagtttgaaaggcctaagtacactttcttagtttatgaagatgtgcctgaagatagtcccattggaacagtgaaagcaagagagcccttgaactcctcagaaccaatcttttacaggatttcttctggtgatctcggcggaaagttctccattcacccgcggctgggcactattcgcacccggaagcccctggatcacgagacgcagcccgtggttgtgctcacggtgcaggcgcagctcggcagcgccccagcctgcagcagcaccgaggtcaacataacagtcatggatgtcaatgacaaccacccagcgttcctcaggacctcggatgagattagaatatcccagaccacgccccctggcacagccttgtacctcgcacgtgcggaagacagagacagtgggcggaacggactcatccggtactccatcgccagcccgcagccaggcgtctttgccatcgacagagccctgggggtgctgttcctcaacggcagcctgggcgcgggcgagcagcgggagctcacgctgactctcagggccgaggaccaaggcgtgcatcctcaggcagccctgctggtgctgacagtcgttatcgagaaacgcgaacacagcccatcctggactttcgaacatttggtctatcaagtggaagtcagtgagtctctctcaccgatgacacaaatgctgcaaacacaggcgcacccacttggcccccagcgtgcagcctcgcctcttaggtactcgctggaacccagcgtagactctgctatgtttggaatccgcccttacacgggctggatttatttgcggcgacagtttgactatgaatccacccaaacatataattttagagtgtttgcttggatccccgaggacggattcttgcaaaatgtgagcactacagtcattgttcgtgtctgggatgagaatgacaattcccccaccttcttgcatgatgtgttgtttttgaaagtcgaagagagccctgttccccaaggggtaataggcaaaattacagctattgacatggactctggaaagaatggacagctattatatttccttttgtctgatggaaaattcttcaagatgaatcctaatacaggtccagcaggcaccatctatgtcataacctgggcagatggtgctgctgcctttagtgggacagactttgcattcagttctgatgaacttcaagcctttgttctcaagtctctgttctgtgaattaggagaaggagagttaatcaattgggtggcactggatcgtgagcaccgggggcaccatgagatgactgtgctagtgacagaccgcggctccccaccacgaaacgccaccatggcggtttacgtctcagttactgacatcaatgataacaggcccttcttcccccagtgtctccctggaaaggagttacacgtgaaggttctggaaggtcaaccagtaaatatgttggttacaactgtgtttgcaaaggatcctgatgaaggaaataatgcagaagttacatactcagtatcttcagaagatagttctgatcactttaagattgacgccaacaatggtgaaataagaacaaccacaatactttcgtatgattatagaccttcctacagaatgagtgtcattgccactgaccagggagtgcctcctcttcaaggacaggcagttgttaatattcaggtgatcccactatccaaagggagagcaatcatgtctcagaatattagacatttaattataccagaaaatttgaagcccacaaaaataatgagcttgataaagtcatctgatcaccttcaacaacattataatggaaagttacattttagtattgttgcagatgataaggatggacactttgaaatagacagctcaaccggagacttgtttctttctaaggaacttgattatgagacgacatctcattatcttttcagagtgattactacagaccatagcaaaaacctttccctgagtagcacagtcttccttagtatcgatgtggaagatcagaatgaccattccccatctttccaggatgagctcattgtgatcagtgtagaggagaatgttcccataggaaccctggtgtatgtcttcaatgccaaagatgatgacggcagttttttgaacagtagaatacaatactacattgaatcccacaaccctggcacgaatccatttctcatccacccctcatttggcacactagtcactgtgtcccgtcttgacagagaaagcattccaactgtcatcctgacagtaacagcatctgatcaggctgtgaatgtgacagaccggcgactgagatcactgacagcacaaatagtgattttggatgtaaatgaccacaaccccacttttatttctttccccaatgcccatgtcaaagaggatgtcacagtgggctccttggtccaccacataactgctcacgatccagacgaaggaaggaatggaaaagtaacatacagcatcctctcaggaaatgaaaacatgacgtttatgctagatgagtcatcaggcttactaaccacaacctgtcctttggattatgaaatgaaaactcagcatattctgactgttctggcactggatgatggcacaccagcactttcttcatcccagactttgacagttactgttcttgatgtaaatgatgaagctccagtatttaagcagcacctgtatgaagcctcagtgaaagaaaaccaaaatccaggggagtttgttaccagggttgaagctctggacagagattcaggagtcaattccaagcttcagtttgaaatcatgccaggtgcttcatttgaattattcgagataaattctgacactggagaggtagtgacaaccaccatacttgacagagaaattcaagaagtcttcacccttcgagtactagtacgagatgggggattcccttcattgtccagcaccacaacaatcctctgcactgttgaagatgaaaacgatcacgcaccagagtttattgtttccagttatgacattgaggttctggaaaaccaggaaccagaggttgtctatacggttttagcctctgatatggatgctggcaataacagagctgttgaatatcacataattgatggaaatactgatgagtgctttactataaatgagatgtcaggagaactctcaaccactcgtgctttggaccgggagcaaatcagcaattttacccttgtcattctgtgctctgacctgggagatccacctaggagctctgtaatacacctgcaagttagagttttggatgccaatgaccacagtccttcttttcccacactttattaccagtcctctgtgagagaagatgctgaagtgggaacagtggttcttgtgctttcagctgtggacaaggatgaaggcctgaatgggcaaactgagtattttctgactgatgaggcttctggtgcattcaccattgatcctatgtcaggcacattgaaaaccagcaacaccctcgaccgtgaagccagatctcagcatacatttagtgctgtggccagagactgtagcatccagggttcacgaagcaccactgtaattataaaagtatatgtcactgatgttaatgacaatgatccagttttggaacagaacccttttgatgtgtttctttcccccgagtcgcctacaaaccagacaactgtcattgtgagagctgatgacctggacttggggcccaatggaactgtggtttttagttttgcagagacccagtcaatgttttctattgataaatacacaggagaaattcaatttcagcaaaatccatcttcagaatacttccctatctggctgcagttaaaagttacagaccagggcattccagccaggacaaccacgggtctcttggtcattcacatggaaggagaagatgtaaagatttccttcagccaccacctgtataaagggctcgtgactgaaaattgtgaggcaggtacttctattgtgactgttaaagcttttgctcctgactcaattcaggacagcatgaaatattcaatttttagtggaaatgaagatggagttctttccctgtgctctaagtcaggacaactcactgtgaaagaacccaagtttcttgattttgaagtcagaaatgaggttcaactcatcgttttagctgaaagtagtgggcatagagcctattgcaaagtagcagtcttgatacaggatgagaatgataattcaccatgctttgaacaaagcatttaccaggcatcagtgtctgaaagccaactctacaatgctcatgtcatacaggtttttgctaccgacttggacagtggtttgaacggcctgattgagtattctattctgtctggcaaccaagaagaagcattccagattgatgcactgagtggtgtgataacaacaaaagcgattctagattacgagctcaccagctcctacagcttgattgtccaagccacagataaagggatgcccaggctttctaatacgactgtaatcaaggtacaggtgactgatataaatgacaatgccccagcttttctcccctctgaagcagtggaaattacagaagattctttgcctggtgtaattgtgactcatgtgtcagttcatgatgtggatttgaattcagctttcatattcagttttgccaaagagagtaatcctggaaccaagtttgctattgatcagaacactggagtggtggtgttggtgaaaacattggattttgaagaaatgactgaatatgagctgctcatccaaatttctgattcagtgcactacacagagggagcacttgtagtccgtgtgctggatgtcaatgataatccaccagtgttttctcaagatttctatcaggtcacagttcctgaatcaatacctgtggggtattcagtgctgactctgtcagccacagacttagaaagcaatgagaacatttcttacagaattctatcctcttctaaggaattctccattgatcctaagaatggcacaatatttactatcagtcccgtattacttctggatacaatatcaacaactcaatttcttgtggaagccagtgatggtggaaatcctgacctgagagctcttactttagtggagataggaatagaagatatgaacaattatgcccctgaattcacagtcaaatcctataatcttagcctaagtgaggatgctctggttggaagcacgcttgttacattttcaaacatcgaccatgactggacccgtgaaaacacatatgttgaatattccatcatcagtggtaattcacagaacaattttcatgtggaaactaagttctttcattcagaatatccttataagcaagtcggttatcttgtgttgcttcacagtctggacagagaagcaagtgctagccatgagcttgtcattctggcatctgacagtggctgccctccattgagttccacagctgtcatatcaatacaagtacttgatgtcaatgacaatcccccaaacttcagcagcctgagctatcacacccatgtcaaggaaagcacccctctagggagtcacatcactgtggtctcagcaaatgaccgtgacacagggtcacatgcagaaatcatctacaacatcatctctggaaatgagaagggacatttttacttagaagaaaacactggagttctttatttgattaaacctctggattatgaaaaaatgacaaaattcaccttaactgtccaagcttcagatgcagaaaagaaacatttttcttttgcagttgtgtttgtcagtgtcctggatgataacgaccatgcacctcagtttatgttctcaagcttcagctgtattgttccagaaaatctgcctatttcctctaccatatgctctataaatgctctggattttgatgctggtccgtatggagaattgacctattctattgtatcaccctgttttctcactcatggaatgtcttatgatcatgatctcttcctcattgaccctttgacaggggatattcatgctaagcaaatccttgactatgaaaatggcaataaatactgcctcacagtccaagccaaagacaaaggtgatgcaactgcctccttagtggtctgggtggatattgaagggatagatgaatttgagcccattttcactcaagatcagtattttttcaccctcccagaaaagaataaagacagacagttgattggcagagtggaagcctcagatgcagatgctggtattgatggagtcattctttactcccttggaacctcatctcctttcttttcagtaaataaaaccaatggaaatatttatttgattagagcccttcccctaataaaaagtcaactcaacaaagaagacaccttggaaatgaaaataatcgctcatagtcccaaatcagattccaagtttgcatcttgcactgtttttgtgaatgtgtctttctcctctgaaggaacacccttggcagtgttcgccagcagcttttcaatcagcctggtggtctcctttttagtgtttctgatactcatctgcattctaattgtaatgattttaagacataaacaaaaagacacaataaacaattatgaggagaagaaaacctcatctttagatgcggacttgagagtgacccgggatgccagtgtgctcaaagccttccagaaaactgacgactgcagtaacgaggtggtccctgtggatgccactccggaatggttgagtttaataagtatcatggagaaggatattgtcaatctgtacagacactcaaactccagtggccactgttctgtggaaggagaaactgcagaagataaggaaatccagaggataaatgagcatccctacagaaagtgctcagactcagctctgagtgaccacgagtccagggtgccagactcgggtatcccgagggactcagaccagctctcctgcctatctggggaaactgatgtgatggtgactgccgaaacagcagaagccagccaaacatttggggaaggagatcaaggggaaggctgcagcaccacctgtgctcaaaataatgtgttaccccagacagttcagaagagagaggcaaaagagagcatcctggctgacgttagaaaagagtctgtctttatttcaggtgatcaggaagtaaggtgtgcagctctttcaactcagacgacctctgatcatgatggaaaagacaactatcactggaattatcttcttagttgggagcccaaattccaacctcttgcctcagtatttaatgatattgcaaaactaaaggatgaacatttgcatatgcctggcattccaaaagagaagaaatcttttgtttttccaccccctttgataacagcagtagcccagcctgggattaaagcagtcccaccaagaatgccggcagtaaacctggggcaggtgcctccgaaacacccacgctctcccatcccctaccatcttggttctctgccagaaggcatgactcccaatttttctccatctctttccctattgacgatgcagcctcctgccttgtctccactgttgagagaaggagaattattaggaacacacatcagtggtacatgccatgaacttaaagcagaagatgaagttcaaatatga

SEQ ID NO: 13760 - DNA, 2439 bp, Homo sapiens
ctccgggaacgccagcgccgcggctgccgcctctgctggggtctaggctgtttctctcgcgccaccactggccgccggccgcagctccaggtgtcctagccgcccagcctcgacgccgtcccgggacccctgtgctctgcgcgaagccctggccccgggggccggggcatgggccaggggcgcggggtgaagcggcttcccgcggggccgtgactgggcgggcttcagccatgaagaccctcatagccgcctactccggggtcctgcgcggcgagcgtcaggccgaggctgaccggagccagcgctctcacggaggacctgcgctgtcgcgcgaggggtctgggagatggggcactggatccagcatcctctccgccctccaggacctcttctctgtcacctggctcaataggtccaaggtggaaaagcagctacaggtcatctcagtgctccagtgggtcctgtccttccttgtactgggagtggcctgcagtgccatcctcatgtacatattctgcactgattgctggctcatcgctgtgctctacttcacttggctggtgtttgactggaacacacccaagaaaggtggcaggaggtcacagtgggtccgaaactgggctgtgtggcgctactttcgagactactttcccatccagctggtgaagacacacaacctgctgaccaccaggaactatatctttggataccacccccatggtatcatgggcctgggtgccttctgcaacttcagcacagaggccacagaagtgagcaagaagttcccaggcatacggccttacctggctacactggcaggcaacttccgaatgcctgtgttgagggagtacctgatgtctggaggtatctgccctgtcagccgggacaccatagactatttgctttcaaagaatgggagtggcaatgctatcatcatcgtggtcgggggtgcggctgagtctctgagctccatgcctggcaagaatgcagtcaccctgcggaaccgcaagggctttgtgaaactggccctgcgtcatggagctgacctggttcccatctactcctttggagagaatgaagtgtacaagcaggtgatcttcgaggagggctcctggggccgatgggtccagaagaagttccagaaatacattggtttcgccccatgcatcttccatggtcgaggcctcttctcctccgacacctgggggctggtgccctactccaagcccatcaccactgttgtgggagagcccatcaccatccccaagctggagcacccaacccagcaagacatcgacctgtaccacaccatgtacatggaggccctggtgaagctcttcgacaagcacaagaccaagttcggcctcccggagactgaggtcctggaggtgaactgagccagccttcggggccaactccctggaggaaccagctgcaaatcacttttttgctctgtaaatttggaagtgtcatgggtgtctgtgggttatttaaaagaaattataacaattttgctaaaccattacaatgttaggtcttttttaagaaggaaaaagtcagtatttcaagttctttcacttccagcttgccctgttctaggtggtggctaaatctgggcctaatctgggtggctcagctaacctctcttcttcccttcctgaagtgacaaaggaaactcagtcttcttggggaagaaggattgccattagtgacttggaccagttagatgattcactttttgcccctagggatgagaggcgaaagccacttctcatacaagcccctttattgccactaccccacgctcgtctagtcctgaaactgcaggaccagtttctctgccaaggggaggagttggagagcacagttgccccgttgtgtgagggcagtagtaggcatctggaatgctccagtttgatctcccttctgccacccctacctcacccctagtcactcatatcggagcctggactggcctccaggatgaggatgggggtggcaatgacaccctgcaggggaaaggactgccccccatgcaccattgcagggaggatgccgccaccatgagctaggtggagtaactggtttttcttgggtggctgatgacatggatgcagcacagactcagccttggcctggagcacatgcttactggtggcctcagtttaccttccccagatcctagattctggatgtgaggaagagatccctcttcagaaggggcctggccttctgagcagcagattagttccaaagcaggtggcccccgaacccaagcctcacttttctgtgccttcctgagggggttgggccggggaggaaacccaaccctctcctgtgtgttctgttatctcttgatgagatcattgcaccatgtcagacttttgtatatgccttgaaaataaatgaaagtgagaatccaaaaaaaaaaaaaaaaaa

SEQ ID NO: 13761 - DNA, 2352 bp, Homo sapiens
gaagatgctgttgagggccctggagaaacttcagcagaacagggcctctccccttgcaggccgagccggggccctgcgccctccccctccgcccagctcggccaagggcgcatttgctgagcgtctggcggcctctaccggagcacctctgcagagggccgatcctccagcccagagacgacatgtggcgctcgggcgagtgccttgcagagagaggagtagcttgctggctttgaacgcgtggcgtggcagatatttcagaaagcttcaagaacaagctggagaagggaagagttattcctccatattcacctgcttcaactactattcttattgggaatggacaatggaatgttctctggttttatcatgatcaaaaacctccttctcttttgtatttccatgaacttatccagtcactttggcttttcacagatgccaaccagttcagtgaaagatgagaccaatgacaacatcacgatatttaccaggatcttggatgggctcttggatggctacgacaacagacttcggcccgggctgggagagcgcatcactcaggtgaggaccgacatctacgtcaccagcttcggcccggtgtccgacacggaaatggagtacaccatagacgtgtttttccgacaaagctggaaagatgaaaggcttcggtttaaggggcccatgcagcgcctccctctcaacaacctccttgccagcaagatctggaccccagacacgttcttccacaacgggaagaagtccatcgctcacaacatgaccacgcccaacaagctgctgcggctggaggacgacggcaccctgctctacaccatgcgcttgaccatctctgcagagtgccccatgcagcttgaggacttcccgatggatgcgcacgcttgccctctgaaatttggcagctatgcgtaccctaattctgaagtcgtttacgtctggaccaacggctccaccaagtcggtggtggtggcggaagatggctccagactgaaccagtaccacctgatggggcagacggtgggcactgagaacatcagcaccagcacaggcgaatacacaatcatgacagctcacttccacctgaaaaggaagattggctactttgtcatccagacctaccttccctgcataatgaccgtgatcttatcacaggtgtccttttggctgaaccgggaatcagtcccagccaggacagtttttggggtcaccacggtgctgaccatgacgaccctcagcatcagcgccaggaactctctgcccaaagtggcctacgccaccgccatggactggttcatagctgtgtgctatgccttcgtcttctcggcgctgatagagtttgccacggtcaattactttaccaagagaggctgggcctgggatggcaaaaaagccttggaagcagccaagatcaagaaaaagcgtgaagtcatactaaataagtcaacaaacgcttttacaactgggaagatgtctcaccccccaaacattccgaaggaacagaccccagcagggacgtcgaatacaacctcagtctcagtaaaaccctctgaagagaagacttctgaaagcaaaaagacttacaacagtatcagcaaaattgacaaaatgtcccgaatcgtattcccagtcttgttcggcactttcaacttagtttactgggcaacgtatttgaatagggagccggtgataaaaggagccgcctctccaaaataaccggccacactcccaaactccaagacagccatacttccagcgaaatggtaccaaggagaggttttgctcacagggactctccatatgtgagcactatctttcaggaaatttttgcatgtttaataatatgtacaaataatattgccttgatgtttctatatgtaacttcagatgtttccaagatgtcccattgataattcgagcaaacaactttctggaaaaacaggatacgatgactgacactcagatgcccagtatcatacgttgatagtttacaaacaagatacgtatatttttaactgcttcaagtgttacctaacaatgttttttatacttcaaatgtcatttcatacaaattttcccagtgaataaatattttaggaaactctccatgattattagaagaccaactatattgcgagaaacagagatcataaagagcacgttttccattatgaggaaacttggacatttatgtacaaaatgaattgcctttgataattcttactgttctgaaattaggaaagtacttgcatgatcttacacgaagaaatagaataggcaaacttttatgtaggcagattaataacagaaatacatcatatgttagatacacaaaatatt

SEQ ID NO: 13762 - DNA, 3804 bp, Homo sapiens
ctgtctgagcatttcactgcggagcctgagcgcgcctgcctgggaaaacactgcagcggtgctcggactcctcctgtccagcaggaggcgcggcccggcagctcccgcatgcgcagtgcgctcggtgtcagacggcccggatcccggttaccggcccctcgctcgctgctcgccagcccagactcggccctggcagtggcggctggcgattcggaccgatccgacctgggcggaggtggcccgcgccccgcggcatgagccggtgaccaagctcggggccgagcgggaggcagccgtggccgagccacagggatctgattcctcccagggggatgtcctgcgcctcagggtccggtggtggcctgcggcatcccttgcggtgccagaagccgtgggacgagtgtctttaatgttatagagctactcagagttgctgtttctccttgagatgcttttggagtgtgaggaagaggctgtctgtgtcattatgtgtgcgtcggtcaagtataatatccggggtcctgccctcatcccaagaatgaagaccaagcaccgaatctactatatcaccctcttctccattgtcctcctgggcctcattgccactggcatgtttcagttttggccccattctatcgagtcctcaaatgactggaatgtagagaagcgcagcatccgtgatgtgccggttgttaggctgccagccgacagtcccatcccagagcggggggatctcagttgcagaatgcacacgtgttttgatgtctatcgctgtggcttcaacccaaagaacaaaatcaaggtgtatatctatgctctgaaaaagtacgtggatgactttggcgtctctgtcagcaacaccatctcccgggagtataatgaactgctcatggccatctcagacagtgactactacactgatgacatcaaccgggcctgtctgtttgttccctccatcgatgtgcttaaccagaacacactgcgcatcaaggagacagcacaagcgatggcccagctctctaggtgggatcgaggtacgaatcacctgttgttcaacatgttgcctggaggtcccccagattataacacagccctggatgtccccagagacagggccctgttggctggtggcggcttttctacgtggacttaccggcaaggctacgatgtcagcattcctgtctatagtccactgtcagctgaggtggatcttccagagaaaggaccaggtccacggcaatacttcctcctgtcatctcaggtgggtctccatcctgagtacagagaggacctagaagccctccaggtcaaacatggagagtcagtgttagtactcgataaatgcaccaacctctcagagggtgtcctttctgtccgtaagcgctgccacaagcaccaggtcttcgattacccacaggtgctacaggaggctactttctgtgtggttcttcgtggagctcggctgggccaggcagtattgagcgatgtgttacaagctggctgtgtcccggttgtcattgcagactcctatattttgcctttctctgaagttcttgactggaagagagcatctgtggttgtaccagaagaaaagatgtcagatgtgtacagtattttgcagagcatcccccaaagacagattgaagaaatgcagagacaggcccggtggttctgggaagcgtacttccagtcaattaaagccattgccctggccaccctgcagattatcaatgaccggatctatccatatgctgccatctcctatgaagaatggaatgaccctcctgctgtgaagtggggcagcgtgagcaatccactcttcctcccgctgatcccaccacagtctcaagggttcaccgccatagtcctcacctacgaccgagtagagagcctcttccgggtcatcactgaagtgtccaaggtgcccagtctatccaaactacttgtcgtctggaataatcagaataaaaaccctccagaagattctctctggcccaaaatccgggttccattaaaagttgtgaggactgctgaaaacaagttaagtaaccgtttcttcccttatgatgaaatcgagacagaagctgttctggccattgatgatgatatcattatgctgacctctgacgagctgcaatttggttatgaggtctggcgggaatttcctgaccggttggtgggttacccgggtcgtctgcatctctgggaccatgagatgaataagtggaagtatgagtctgagtggacgaatgaagtgtccatggtgctcactggggcagctttttatcacaagtattttaattacctgtatacctacaaaatgcctggggatatcaagaactgggtagatgctcatatgaactgtgaagatattgccatgaacttcctggtggccaacgtcacgggaaaagcagttatcaaggtaaccccacgaaagaaattcaagtgtcctgagtgcacagccatagatgggctttcactagaccaaacacacatggtggagaggtcagagtgcatcaacaagtttgcttcagtcttcgggaccatgcctctcaaggtggtggaacaccgagctgaccctgtcctgtacaaagatgactttcctgagaagctgaagagcttccccaacattggcagcttatgaaacgtgtcattggtggaggtctgaatgtgaggctgggacagagggagagaacaaggcctcccagcactctgatgtcagagtagtaggttaagggtggaaggttgacctacttggatcttggcatgcacccacctaacccactttctcaagaacaagaacctagaatgaatatccaagcacctcgagctatgcaacctctgttcttgtatttcttatgatctctgatgggttcttctcgaaaatgccaagtggaagactttgtggcatgctccagatttaaatccagctgaggctccctttgttttcagttccatgtaacaatctggaaggaaacttcacggacaggaagactgctggagaagagaagcgtgttagcccatttgaggtctggggaatcatgtaaagggtacccagacctcacttttagttatttacatcaatgagttctttcagggaaccaaacccagaattcggtgcaaaagccaaacatcttggtgggatttgataaatgccttgggacctggagtgctgggcttgtgcacaggaagagcaccagccgctgagtcaggatcctgtcagttccatgagctattcctctttggtttggctttttgatatgattaaaattattttttattcctttttctactgtgtcttaaacaccaattcctgatagtccaaggaaccacctttctcccttgatatatttaactccgtctttggcctgacaacagtcttctgcccatgtctgggaacacacgccaggaggaatgtctgataccctctgcatcaagcgtaagaaggtcccaaatcataaccattttaagaacagatgactcagaaacctccagaggaatctgtttgcttcctgattagatccagtcaatgttttaaaggtattgtcagagaaaaacagagggtctgtactagccatgcaaggagtcgctctagctggtacccgtaaaagttgtgggaattgtgacccccatcccaaggggatgccaaaatttctctcattcttttggtataaacttaacattagccagggaggttctggctaacgttaaatgctgctatacaactgctttgcaacagttgctggtatatttaaatcattaaatttcagcatttactaatactgcaaaaaaaaaaaaaaaaaa

SEQ ID NO: 13763 - DNA, 5201 bp, Homo sapiens
cgcgctctcttcctccctcagacaactcgccccccgccctccgcccccctccacgtaattccgaaagagcagaagaaagagaaggagaacaggaaaagaagagctagtaagcgagagcgagagcacagaaaagaaaaaaaaaagccttaagaggaccgaaggggaggaaaggaaaaggatggacaaccacaaaacgcagcgattgcggaaattttccagcgccattggctgggcagcgtgagtccttcggtcgggcgtgatttcagcaccgggggaactggacagcacctcggggggacttctgggcaacccgcaaccacagcaagaactccaccagcagcctcaacaacagaagccgcggaaaaccctgctttgtatcagagaggcaaggtcagtccgacgcacagccatgcacaggcagtgcgcctgtactacgctgcaaaccctctgcttgtttctctaacatgcacttgcttctaattactagcattgtttcatttctgatcagtgaagatcagtagatgagattctgtaagggtgtacttttaatttatatgtatatatttaacttctttttctgttatttttaaagtgttgtgggggagtggggtttttttcctacttttttttttttttttttttctttgcttgccttgcactacgtgcctggatagtttgtggatataattattgactggcgtctgggctattgcagtgcgggggggttagggaggaaggaatccacccccacccccccaaacccttttcttctcctttcctggcttcggacattggagcactaaatgaacttgaattgtgtctgtggcgagcaggatggtcgctgttactttgtgatgagatcggggatgaattgctcgctttaaaaatgctgctttggattctgttgctggagacgtctctttgttttgccgctggaaacgttacaggggacgtttgcaaagagaagatctgttcctgcaatgagatagaaggggacctacacgtagactgtgaaaaaaagggcttcacaagtctgcagcgtttcactgccccgacttcccagttttaccatttatttctgcatggcaattccctcactcgacttttccctaatgagttcgctaacttttataatgcggttagtttgcacatggaaaacaatggcttgcatgaaatcgttccgggggcttttctggggctgcagctggtgaaaaggctgcacatcaacaacaacaagatcaagtcttttcgaaagcagacttttctggggctggacgatctggaatatctccaggctgattttaatttattacgagatatagacccgggggccttccaggacttgaacaagctggaggtgctcattttaaatgacaatctcatcagcaccctacctgccaacgtgttccagtatgtgcccatcacccacctcgacctccggggtaacaggctgaaaacgctgccctatgaggaggtcttggagcaaatccctggtattgcggagatcctgctagaggataacccttgggactgcacctgtgatctgctctccctgaaagaatggctggaaaacattcccaagaatgccctgatcggccgagtggtctgcgaagcccccaccagactgcagggtaaagacctcaatgaaaccaccgaacaggacttgtgtcctttgaaaaaccgagtggattctagtctcccggcgccccctgcccaagaagagacctttgctcctggacccctgccaactcctttcaagacaaatgggcaagaggatcatgccacaccagggtctgctccaaacggaggtacaaagatcccaggcaactggcagatcaaaatcagacccacagcagcgatagcgacgggtagctccaggaacaaacccttagctaacagtttaccctgccctgggggctgcagctgcgaccacatcccagggtcgggtttaaagatgaactgcaacaacaggaacgtgagcagcttggctgatttgaagcccaagctctctaacgtgcaggagcttttcctacgagataacaagatccacagcatccgaaaatcgcactttgtggattacaagaacctcattctgttggatctgggcaacaataacatcgctactgtagagaacaacactttcaagaaccttttggacctcaggtggctatacatggatagcaattacctggacacgctgtcccgggagaaattcgcggggctgcaaaacctagagtacctgaacgtggagtacaacgctatccagctcatcctcccgggcactttcaatgccatgcccaaactgaggatcctcattctcaacaacaacctgctgaggtccctgcctgtggacgtgttcgctggggtctcgctctctaaactcagcctgcacaacaattacttcatgtacctcccggtggcaggggtgctggaccagttaacctccatcatccagatagacctccacggaaacccctgggagtgctcctgcacaattgtgcctttcaagcagtgggcagaacgcttgggttccgaagtgctgatgagcgacctcaagtgtgagacgccggtgaacttctttagaaaggatttcatgctcctctccaatgacgagatctgccctcagctgtacgctaggatctcgcccacgttaacttcgcacagtaaaaacagcactgggttggcggagaccgggacgcactccaactcctacctagacaccagcagggtgtccatctcggtgttggtcccgggactgctgctggtgtttgtcacctccgccttcaccgtggtgggcatgctcgtgtttatcctgaggaaccgaaagcggtccaagagacgagatgccaactcctccgcgtccgagattaattccctacagacagtctgtgactcttcctactggcacaatgggccttacaacgcagatggggcccacagagtgtatgactgtggctctcactcgctctcagactaagaccccaaccccaataggggagggcagagggaaggcgatacatccttccccaccgcaggcaccccgggggctggaggggcgtgtacccaaatccccgcgccatcagcctggatgggcataagtagataaataactgtgagctcgcacaaccgaaagggcctgaccccttacttagctccctccttgaaacaaagagcagactgtggagagctgggagagcgcagccagctcgctctttgctgagagccccttttgacagaaagcccagcacgaccctgctggaagaactgacagtgccctcgccctcggccccggggcctgtggggttggatgccgcggttctatacatatatacatatatccacatctatatagagagatagatatctatttttcccctgtggattagccccgtgatggctccctgttggctacgcagggatgggcagttgcacgaaggcatgaatgtattgtaaataagtaactttgacttctgacaaaaaacaaaaagtgctgcatggctcgcatggaatccacgcgctccagggactctgcccgcccccgcgactggagacggcatctcgttcacagcacccaccctcttacctgataagttccatcgtatcaaactttctataaacaaaatacagtataatcagaaagtgccatttcgccattatttgtgatcggtaggcagttcagagcataagttaactgtgaaaaaaatgtaaaggttttatttaggacatttgcatggctagtcatcagtccattttatgagttaacaatgtattttgttgagggaagtttttaggggttgttttgggttcttttattttgatggtgatgttttattttattttatttttttcagggggtcttttttttaatacatatccaataatgccttccatctgaatgtaaaataagtacccatgatttctattatagtatcagtgtaattatttaaaaaatgattttgaggcagttaagcatgaccaattaatgtcactctagtgcttaggctgcgatcctatggtagcaattctgtgctggtataaatcttacttataaagtaggaaaagagaaccgaggaagcacgtgaaacttactaattctattcgaggattttataatggcatattttttcagtattaaagcgaaaatgttttcaactctgggtccttacctttttccagcttcatatttgcaagtggtaaattggatttgcggtggaagagacaggggagggaaacggttggggttagatcccttcctgagctacattaaggctctttctctaatcgccttacttagctttttaccctttaagtagctcctcttccctcgcccccaccctctaccccacccccaccttcgctcagactttaccggctttccccagtccataaaggtcttgccccaacactcaccccttctttttttcccctctccaaatgcagcagtgaatccctttattaatactggaaatccctctctgctgcttttgttggtgctgcccacactgcagatatattaaggatgttaggagagatttgatttaattgactctgcctagataggtctcattaaacagagtggagatttcattggtcagcactcctcaatgaaagacagacctaatgactggcatttgagatgctgctggcattttgaattcaacatctgctgaaaacggtaaaactaattagtgcccacccaccctccccgccccagcaactgcatattgaaatttgttaaagcactcatctttatggaaattaatcattatcctaaagaagtgtttctctcccatcatccggatttctggttgtggcccagcaattaacaaaaacagcttcaactgttcgaattttatgaaccaatgtaactctggcctcaatcatattcctctgggatttctaaacagcagttaagctacaaaaagcaaacaaaaccacacatattgatggagtctgcattccaccacatatccacccttgagaagtatgtcaaaagactgcagactatagatttttttttaatataggattataaatcagctagtgaaagacctcagagcagttgtaagtagatctgccatctagaactcatattctaaagggaagtgatttctcagaacagtgatgttctggaatatgtattatttattttaacacttttttaataaaatctttattataaaccaaaaaaaaaaaaaaaa

SEQ ID NO: 13764 - DNA, 2334 bp, Homo sapiens
gtcccggccgccgggaggaagtggccgggcggtcgcagggactccggggcgaccgccgcgagtccgcagtagttcgggccatggaggcggagccgccgctctacccgatggcgggggctgcggggccgcagggcgacgaggacctgctcggggtcccggacgggcccgaggccccgctggacgagctggtgggcgcgtaccccaactacaacgaggaggaggaggagcgccgctactaccgccgcaagcgcctgggcgtgctcaagaacgtgctggctgccagcgccgggggcatgctcacctacggcgtctacctgggcctcctgcagatgcagctgatcctgcactacgacgagacctaccgcgaggtgaagtatggcaacatggggctgcccgacatcgacagcaaaatgctgatgggcatcaacgtgactcccatcgccgccctgctctacacacctgtgctcatcaggttttttggaacgaagtggatgatgttcctcgctgtgggcatctacgccctctttgtctccaccaactactgggagcgctactacacgcttgtgccctcggctgtggccctgggcatggccatcgtgcctctttgggcttccatgggcaactacatcaccaggatggcgcagaagtaccatgagtactcccactacaaggagcaggatgggcaggggatgaagcagcggcctccgcggggctcccacgcgccctatctcctggtcttccaagccatcttctacagcttcttccatctgagcttcgcctgcgcccagctgcccatgatttatttcctgaaccactacctgtatgacctgaaccacacgctgtacaatgtgcagagctgcggcaccaacagccacgggatcctcagcggcttcaacaagacggttctgcggacgctcccgcggagcggaaacctcattgtggtggagagcgtgctcatggcagtggccttcctggccatgctgctggtgctgggtttgtgcggagccgcttaccggcccacggaggagatcgatctgcgcagcgtgggctggggcaacatcttccagctgcccttcaagcacgtgcgtgactaccgcctgcgccacctcgtgcctttctttatctacagcggcttcgaggtgctctttgcctgcactggtatcgccttgggctatggcgtgtgctcggtggggctggagcggctggcttacctcctcgtggcttacagcctgggcgcctcagccgcctcactcctgggcctgctgggcctgtggctgccacgcccggtgcccctggtggccggagcaggggtgcacctgctgctcaccttcatcctctttttctgggcccctgtgcctcgggtcctgcaacacagctggatcctctatgtggcagctgccctttggggtgtgggcagtgccctgaacaagactggactcagcacactcctgggaatcttgtacgaagacaaggagagacaggacttcatcttcaccatctaccactggtggcaggctgtggccatcttcaccgtgtacctgggctcgagcctgcacatgaaggctaagctggcggtgctgctggtgacgctggtggcggccgcggtctcctacctgcggatggagcagaagctgcgccggggcgtggccccgcgccagccccgcatcccgcggccccagcacaaggtgcgcggttaccgctacttggaggaggacaactcggacgagagcgacgcggagggcgagcatggggacggcgcggaggaggaggcgccgcccgcagggcccaggcctggccccgagcccgctggactcggccgccggccctgcccgtacgaacaggcgcaggggggagacgggccggaggagcagtgaggggccgcctggtccccggactcagcctccctcctcgccggcctcagtttaccacgtctgaggtcggggggaccccctccgagtcccgcgctgtcttcaaaggcccctgtctcccctcccccacgttggggacgcccctcccagagcccaggtcacctccgggcttccgcagccccctccaaggcggagtggagccttgggaacccctcggccaagcacaggggttcgaaaatacagctgaaaccccgcgggcccttagcacgcgccccagcgccggagcacggtcagggtcttcttgcgacccggcccgctccagatccccacagctctcggccgcggacccgggccgcgtgtgagcgcactttgcacctcctatccccagggtccgccgagagccacgattttttacagaaaatgagcaataaagagattttgtactgtcaaaaaaaaaaaaaaaaaa

SEQ ID NO: 13765 - DNA, 2884 bp, Homo sapiens
tgcccgacccggaagtgcttctcttttccttggcggaggagggagaccacagagccctgggttgtggaagaggtggctgttccctgtcatcagtatgcagcgattgctctttccgccgttgagggccttgaaggggaggcagtatctgccgctcctggctcctagggcagcgcctagagcacagtgtgattgcatcaggcgccctttgaggccagggcaatacagcaccatctctgaagtagctttgcaatctggaaggggtacagtgtcccttccctcaaaggctgctgagcgggtggtgggccgatggctcctggtctgcagtggaacagtggctggagcagttattcttggtggagtaactaggttgacagagtctggcctctcgatggtagattggcatttaataaaggagatgaagccacctacaagccaagaggaatgggaagcagaattccaaagataccagcaatttccagaatttaaaatcttgaatcatgatatgacactgacagaattcaagttcatctggtacatggagtactcacaccgaatgtggggtcgccttgtaggccttgtgtacatcctgcctgctgcctacttttggagaaagggctggctcagccgtggcatgaaaggacgtgttcttgccctctgtggcctcgtctgcttccagggtctgttgggatggtatatggtgaaaagtggactagaagaaaaatcagactcccatgacatccctcgggtcagtcagtaccgccttgctgcccacctgggatcagccctggttctttattgtgccagcttgtggacctcactgtcactgctactccctccgcacaagttgcctgaaacccaccaactcctacagttgagacgatttgctcatggaacagcaggtctggtgttccttacggccctctcaggggcttttgtggcagggctagatgctgggcttgtttataactcctttcccaaaatgggagaatcctggatcccggaggacctctttaccttctcccccatcctgaggaatgtttttgagaatcccaccatggtgcagtttgatcaccggattctgggaatcacttcagtcactgccattacagtgctctacttcctctctcggagaattccccttcctagaaggaccaagatggcagcagtgactctgctggctttggcgtatacacagggccctgtcttattcaactttacttttaaaatcagtgatttggatgaaggcatcagaaacatctgatttgaggatggagcaacccaatattgctaatataatagatgacagtggcaactgaaaacagtcccagaatgaccccatcgagatgaaattaaacagattagaaatgtaacatactcatttaaattaaataagttgtataagtttgggctgaagaaacctggccttatatcatttcatataaaaaagacgggattttagttgtcctcaggttcaatatgaaccaagtagtattcatgttgttattatatgataacagaaaaattagtggtacttcaggttttatcagtagaagtgtcacagccatagtcaaaatacccctaacatactgcatttcactctgggtaccaaatttaagcaagatattgatggccactaagtgtgtatccagaagaagagatcagaatgatgagtccagaacccctgtcacacagggaataggtgaaggaactagggatatttaactggagcagagaacatctggagagagagcaagattcctgtccttgagaagttgaagccgtctcatgcagaagagggaatgagcttccattatgctgcagagctggcagcaatggatgaaagttgcaggaagttagttttagttctgtagaaggcaagagtagggtagaccaaatcaaatgctcactggggtcaggctgatggagacagtaacactggcgagcaggtgccccagctcggactatactgctgagttctggtctgttgctgccactctacaggtccagggttgttagatcttctgggtttttgttttgctttttgaaataaggaaaataagcttatcttaagtttatttttccttggatatacctagattccatacagtgacaatacaaatacaaaggaagaacatctggatttcatccttgacctcatttacaaagcaaaaagagatgctggattcagatataaatgtttaattttgcagtgtttaagtcagcaaatcttctgttttttaaaaataagccacatatctagatttttctgtgaaagctctcaattaagtgttgggaactaatttcaagattttaaaaaatgttatgcaggcttaacgtgtctgagagccataaatgacctaacgtttcccgttagtctctgaactaggtgatctcagttctctttcaactccagtactctgtaagtttctgtgacctgtagtgtaccattctcaggtggtgatatggtttggatgttttgtcccctccaaatctcatgttcaaagtgtgacattcagtgttagaggtgggcctagtaggaggtatttgggtcatgggggcggatcccttatgtatgactttgtgccatccccatagtaatgagtgagttctcactctggttgtttatgcaagagctggttgtttaaaagagcctggaacttcctcctctctcgcttgctctctctcaccatgtgacacactggctccccttcaccttctgccatgattgtaagcttcgtgaggccctcaccagaagcagatgccagcgccatgcttcctatacagttctatgcagaacagtgagccaaataaacctcttttctttctaaaaaaaaaaaaaaaaaaaaaaaaaaaaaaaaaaaaaaaaaaaaaaaaaaaaaaaaaa

SEQ ID NO: 13766 - DNA, 2240 bp, Homo sapiens
gtccttcggtgtctgggtgtggtgagtagaggtgtgtgtcacaaagtacagaccattgtgtgtgacaaagcccatcgtgtgtctgtgtgtgtctttatccacgtggatggacgtctctttcttgctctgccccaagacacaccctagcccctccttattctcaaaagggggagctggggagcctccccctaccctggggcctcccctgcccctccccgccctgcctggccgtcaccactccccagagggcacagggctctgctgtgcctcagagcaaaagtcccagagccagcagagcaggctgacgacctgcaagccacagtggctgccctgtgcgtgctgcgaggtgggggaccctgggcaggaagctggctgagccccaagaccccgggggccatgggcggggatctggtgcttggcctgggggccttgagacgccgaaagcgcttgctggagcaggagaagtctctggccggctgggcactggtgctggcaggaactggcattggactcatggtgctgcatgcagagatgctgtggttcggggggtgctcgtgggcgctctacctgttcctggttaaatgcacgatcagcatttccaccttcttactcctctgcctcatcgtggcctttcatgccaaagaggtccagctgttcatgaccgacaacgggctgcgggactggcgcgtggcgctgaccgggcggcaggcggcgcagatcgtgctggagctggtggtgtgtgggctgcacccggcgcccgtgcggggcccgccgtgcgtgcaggatttaggggcgccgctgacctccccgcagccctggccgggattcctgggccaaggggaagcgctgctgtccctggccatgctgctgcgtctctacctggtgccccgcgccgtgctcctgcgcagcggcgtcctgctcaacgcttcctaccgcagcatcggcgctctcaatcaagtccgcttccgccactggttcgtggccaagctttacatgaacacgcaccctggccgcctgctgctcggcctcacgcttggcctctggctgaccaccgcctgggtgctgtccgtggccgagaggcaggctgttaatgccactgggcacctttcagacacactttggctgatccccatcacattcctgaccatcggctatggtgacgtggtgccgggcaccatgtggggcaagatcgtctgcctgtgcactggagtcatgggtgtctgctgcacagccctgctggtggccgtggtggcccggaagctggagtttaacaaggcagagaagcacgtgcacaacttcatgatggatatccagtataccaaagagatgaaggagtccgctgcccgagtgctacaagaagcctggatgttctacaaacatactcgcaggaaggagtctcatgctgcccgcaggcatcagcgcaagctgctggccgccatcaacgcgttccgccaggtgcggctgaaacaccggaagctccgggaacaagtgaactccatggtggacatctccaagatgcacatgatcctgtatgacctgcagcagaatctgagcagctcacaccgggccctggagaaacagattgacacgctggcggggaagctggatgccctgactgagctgcttagcactgccctggggccgaggcagcttccagaacccagccagcagtccaagtagctggacccacgaggaggaaccaggctactttccccagtactgaggtggtggacatcgtctctgccactcctgacccagccctgaacaaagcacctcaagtgcaaggaccaaagggggccctggcttggagtgggttggcttgctgatggctgctggaggggacgctggctaaagtgggtaggccttggcccacctgaggccccaggtgggaacatggtcacccccactctgcataccctcatcaaaaacactctcactatgctgctatggacgacctccagctctcagttacaagtgcaggcgactggaggcaggactcctgggtccctgggaaagagggtactaggggcccggatccaggattctgggaggcttcagttaccgctggccgagctgaagaactgggtatgaggctggggcggggctggaggtggcgccccctggtgggacaacaaagaggacaccatttttccagagctgcagagagcacctggtggggaggaagaagtgtaactcaccagcctctgctcttatctttgtaataaatgttaaagccagaa

SEQ ID NO: 13767 - DNA, 1714 bp, Homo sapiens
gctcgggcgccgagtctgcgcgctgacgtccgacgctccaggtactttccccacggccgacagggcttggcgtgggggcggggcgcggcgcgcagcgcgcatgcgccgcagcgccagcgctctccccggatcgtgcggggcctgagcctctccgccggcgcaggctctgctcgcgccagctcgctcccgcagccatgcccaccaccatcgagcgggagttcgaagagttggatactcagcgtcgctggcagccgctgtacttggaaattcgaaatgagtcccatgactatcctcatagagtggccaagtttccagaaaacagaaatcgaaacagatacagagatgtaagcccatatgatcacagtcgtgttaaactgcaaaatgctgagaatgattatattaatgccagtttagttgacatagaagaggcacaaaggagttacatcttaacacagggtccacttcctaacacatgctgccatttctggcttatggtttggcagcagaagaccaaagcagttgtcatgctgaaccgcattgtggagaaagaatcggttaaatgtgcacagtactggccaacagatgaccaagagatgctgtttaaagaaacaggattcagtgtgaagctcttgtcagaagatgtgaagtcgtattatacagtacatctactacaattagaaaatatcaatagtggtgaaaccagaacaatatctcactttcattatactacctggccagattttggagtccctgaatcaccagcttcatttctcaatttcttgtttaaagtgagagaatctggctccttgaaccctgaccatgggcctgcggtgatccactgtagtgcaggcattgggcgctctggcaccttctctctggtagacacttgtcttgttttgatggaaaaaggagatgatattaacataaaacaagtgttactgaacatgagaaaataccgaatgggtcttattcagaccccagatcaactgagattctcatacatggctataatagaaggagcaaaatgtataaagggagattctagtatacagaaacgatggaaagaactttctaaggaagacttatctcctgcctttgatcattcaccaaacaaaataatgactgaaaaatacaatgggaacagaataggtctagaagaagaaaaactgacaggtgaccgatgtacaggactttcctctaaaatgcaagatacaatggaggagaacagtgagagtgctctacggaaacgtattcgagaggacagaaaggccaccacagctcagaaggtgcagcagatgaaacagaggctaaatgagaatgaacgaaaaagaaaaaggccaagattgacagacacctaatattcatgacttgagaatattctgcagctataaattttgaaccattgatgtgcaaagcaagacctgaagcccactccggaaactaaagtgaggctcgctaaccctctagattgcctcacagttgtttgtttacaaagtaaactttacatccaggggatgaagagcacccaccagcagaagactttgcagaacctttaattggatgtgttaagtgtttttaatgagtgtatgaaatgtagaaagatgtacaagaaataaattaggagagattactttgtattgtactgccattcctactgtatttttatactttttggcagcattaaatatttttgttaaataaaaaaaaaaaaaaa

SEQ ID NO: 13768 - DNA, 2477 bp, Homo sapiens
gctcgggcgccgagtctgcgcgctgacgtccgacgctccaggtactttccccacggccgacagggcttggcgtgggggcggggcgcggcgcgcagcgcgcatgcgccgcagcgccagcgctctccccggatcgtgcggggcctgagcctctccgccggcgcaggctctgctcgcgccagctcgctcccgcagccatgcccaccaccatcgagcgggagttcgaagagttggatactcagcgtcgctggcagccgctgtacttggaaattcgaaatgagtcccatgactatcctcatagagtggccaagtttccagaaaacagaaatcgaaacagatacagagatgtaagcccatatgatcacagtcgtgttaaactgcaaaatgctgagaatgattatattaatgccagtttagttgacatagaagaggcacaaaggagttacatcttaacacagggtccacttcctaacacatgctgccatttctggcttatggtttggcagcagaagaccaaagcagttgtcatgctgaaccgcattgtggagaaagaatcggttaaatgtgcacagtactggccaacagatgaccaagagatgctgtttaaagaaacaggattcagtgtgaagctcttgtcagaagatgtgaagtcgtattatacagtacatctactacaattagaaaatatcaatagtggtgaaaccagaacaatatctcactttcattatactacctggccagattttggagtccctgaatcaccagcttcatttctcaatttcttgtttaaagtgagagaatctggctccttgaaccctgaccatgggcctgcggtgatccactgtagtgcaggcattgggcgctctggcaccttctctctggtagacacttgtcttgttttgatggaaaaaggagatgatattaacataaaacaagtgttactgaacatgagaaaataccgaatgggtcttattcagaccccagatcaactgagattctcatacatggctataatagaaggagcaaaatgtataaagggagattctagtatacagaaacgatggaaagaactttctaaggaagacttatctcctgcctttgatcattcaccaaacaaaataatgactgaaaaatacaatgggaacagaataggtctagaagaagaaaaactgacaggtgaccgatgtacaggactttcctctaaaatgcaagatacaatggaggagaacagtgagagtgctctacggaaacgtattcgagaggacagaaaggccaccacagctcagaaggtgcagcagatgaaacagaggctaaatgagaatgaacgaaaaagaaaaaggtggttatattggcaacctattctcactaagatggggtttatgtcagtcattttggttggcgcttttgttggctggagactgttttttcagcaaaatgccctataaacaattaattttgcccagcaagcttctgcactagtaactgacagtgctacattaatcataggggtttgtctgcagcaaacgcctcatatcccaaaaacggtgcagtagaatagacatcaaccagataagtgatatttacagtcacaagcccaacatctcaggactcttgactgcaggttcctctgaaccccaaactgtaaatggctgtctaaaataaagacattcatgtttgttaaaaactggtaaattttgcaactgtattcatacatgtcaaacacagtatttcacctgaccaacattgagatatcctttatcacaggatttgtttttggaggctatctggattttaacctgcacttgatataagcaataaatattgtggttttatctacgttattggaaagaaaatgacatttaaataatgtgtgtaatgtataatgtactattgacatgggcatcaacacttttattcttaagcatttcagggtaaatatattttataagtatctatttaatcttttgtagttaactgtactttttaagagctcaatttgaaaaatctgttactaaaaaaaaaaattgtatgtcgattgaattgtactggatacattttccatttttctaaaaagaagtttgatatgagcagttagaagttggaataagcaatttctactatatattgcatttcttttatgttttacagttttccccattttaaaaagaaaagcaaacaaagaaacaaaagtttttcctaaaaatatctttgaaggaaaattctccttactgggatagtcaggtaaacagttggtcaagactttgtaaagaaattggtttctgtaaatcccattattgatatgtttatttttcatgaaaatttcaatgtagttggggtagattatgatttaggaagcaaaagtaagaagcagcattttatgattcataatttcagtttactagactgaagttttgaagtaaacacttttcagtttctttctacttcaataaatagtatgattatatgcaaaccttaaaaaa

SEQ ID NO: 13769 - DNA, 1623 bp, Homo sapiens
gctcgggcgccgagtctgcgcgctgacgtccgacgctccaggtactttccccacggccgacagggcttggcgtgggggcggggcgcggcgcgcagcgcgcatgcgccgcagcgccagcgctctccccggatcgtgcggggcctgagcctctccgccggcgcaggctctgctcgcgccagctcgctcccgcagccatgcccaccaccatcgagcgggagttcgaagagttggatactcagcgtcgctggcagccgctgtacttggaaattcgaaatgagtcccatgactatcctcatagagtggccaagtttccagaaaacagaaatcgaaacagatacagagatgtaagcccatatgatcacagtcgtgttaaactgcaaaatgctgagaatgattatattaatgccagtttagttgacatagaagaggcacaaaggagttacatcttaacacagggtccacttcctaacacatgctgccatttctggcttatggtttggcagcagaagaccaaagcagttgtcatgctgaaccgcattgtggagaaagaatcggttaaatgtgcacagtactggccaacagatgaccaagagatgctgtttaaagaaacaggattcagtgtgaagctcttgtcagaagatgtgaagtcgtattatacagtacatctactacaattagaaaatatcaatagtggtgaaaccagaacaatatctcactttcattatactacctggccagattttggagtccctgaatcaccagcttcatttctcaatttcttgtttaaagtgagagaatctggctccttgaaccctgaccatgggcctgcggtgatccactgtagtgcaggcattgggcgctctggcaccttctctctggtagacacttgtcttgttttgatggaaaaaggagatgatattaacataaaacaagtgttactgaacatgagaaaataccgaatgggtcttattcagaccccagatcaactgagattctcatacatggctataatagaaggagcaaaatgtataaagggagattctagtatacagaaacgatggaaagaactttctaaggaagacttatctcctgcctttgatcattcaccaaacaaaataatgactgaaaaatacaatgggaacagaataggtctagaagaagaaaaactgacaggtgaccgatgtacaggactttcctctaaaatgcaagatacaatggaggagaacagtgagaggccaagattgacagacacctaatattcatgacttgagaatattctgcagctataaattttgaaccattgatgtgcaaagcaagacctgaagcccactccggaaactaaagtgaggctcgctaaccctctagattgcctcacagttgtttgtttacaaagtaaactttacatccaggggatgaagagcacccaccagcagaagactttgcagaacctttaattggatgtgttaagtgtttttaatgagtgtatgaaatgtagaaagatgtacaagaaataaattaggagagattactttgtattgtactgccattcctactgtatttttatactttttggcagcattaaatatttttgctaaaaaaaaaaaaaaaaaaaaaaaaaaaaaa

SEQ ID NO: 13770 - DNA, 2326 bp, Homo sapiens
caaccctgaatgtcatagttagctactttcaactggaagctacaacatggatttatggaatctgtcttggtttctgttcttggatgctcttctcgtgatttctggcttggcaactccagaaaactttgatgtagatggcggaatggaccaggacatatttgatatcaatgaaggtttgggactggatctttttgagggtgacatcagacttgatagggcacaaattagaaattccatcattggagaaaagtatagatggcctcataccattccatatgttctagaagatagcttggaaatgaatgctaagggagttatcctcaatgcatttgaacgttatcgccttaaaacatgtattgactttaagccttgggctggagaaacaaactatatatcagtgttcaagggcagtggctgctggtcttcagtaggaaataggcgggttgggaagcaagaactttccatcggggcaaactgtgaccgaatagcaacagttcaacacgagttcctccacgctctgggattctggcatgagcagtcgcgttctgaccgggatgactatgtcaggataatgtgggacagaattctgtcaggcagagagcacaattttaacacctatagtgacgatatatcagattccctgaatgttccctatgattacacttcagtaatgcactacagtaaaactgcattccaaaatggaacagagccgacaattgtcacaagaatctcagactttgaggatgtgatcggccaacgaatggatttcagtgactctgatctcctaaagttgaatcaactgtataactgctcctcttccttgagttttatggactcatgcagttttgaactggaaaatgtgtgtggcatgatccaaagttcaggagataatgctgactggcaacgggtttcacaggttcccagggggccagagagtgatcactccaacatgggccagtgccaaggttctggtttcttcatgcatttcgatagcagctctgtaaatgtgggggccacagcagtgctggaaagtagaacgctgtaccctaaaagaggatttcagtgcctgcaattttacttatataacagtggcagtgaaagtgatcaactgaacatctatatcagggagtattctgcagacaatgtggatggcaatttaacccttgtggaagaaataaaagaaatacccactgggagctggcaactttatcatgtaacattgaaagtgaccaagaagtttagagtggtgtttgaaggacgcaaaggctctggtgcatcactgggtggtctgtctattgatgacatcaatctttcggaaacacggtgccctcatcatatctggcatataaggaatttcacacagttcattggcagcccaaatggaactctgtatagccctccattttactcttctaaaggttatgcctttcagatttacttaaatctagcccatgtgactaatgcagggatatatttccacttgatctctggagccaatgatgatcaattacagtggccatgtccttggcaacaagccacaatgacacttttggatcaaaatcctgacattcgacagcgtatgtccaatcagcggagtataactacagacccatttatgaccaccgataatggaaactatttctgggacaggccttctaaagtgggaacagtggctttgttctctaatggaactcagtttagaagaggtgggggctatggaaccagtgcctttataacccacgaaaggctgaaaagcagagattttataaaaggagatgatgtttatatcctactgacagtggaagacatatctcacctcaactctacacaaatccagctaacaccagcccctagtgttcaagacctctgctcaaaaaccacctgtaaaaatgacggtgtctgcactgttcgagatggcaaagctgagtgcaggtgccagtcaggggaagactggtggtacatgggagaaaggtgtgaaaagagaggctccacccgagacaccatagtcattgctgtttcatctactgttgctgtgtttgccttgatgctgatcatcacccttgtcagtgtctattgcaccaggaagaaatatcgtgaaaggatgagctcaaatcgaccaaatttgactctgcaaaatcatgctttttgaagattaactcgacaatatggccagctaatgaaattaaaaaggattcttcatcatggatttcgcctaagtgatattacagccacctcattcttctaaaagtggatatttttctgtaaatagctggaaatattataaatcactattttggtcaaagtcaaaaaaaaaaaaaaaaaaaaa

SEQ ID NO: 13771 - DNA, 4665 bp, Homo sapiens
agccagcccgaggacgcgagcggcaggtgtgcacagaggttctccactttgttttctgaactcgcggtcaggatggttttctctgtcaggcagtgtggccatgttggcagaactgaagaagttttactgacgttcaagatattccttgtcatcatttgtcttcatgtcgttctggtaacatccctggaagaagatactgataattccagtttgtcaccaccacctgctaaattatctgttgtcagttttgccccctcctccaatgaggttgaaacaacaagcctcaatgatgttactttaagcttactcccttcaaacgaaacagaaaaaactaaaatcactatagtaaaaaccttcaatgcttcaggcgtcaaaccccagagaaatatctgcaatttgtcatctatttgcaatgactcagcattttttagaggtgagatcatgtttcaatatgataaagaaagcactgttccccagaatcaacatataacgaatggcaccttaactggagtcctgtctctaagtgaattaaaacgctcagagctcaacaaaaccctgcaaaccctaagtgagacttactttataatgtgtgctacagcagaggcccaaagcacattaaattgtacattcacaataaaactgaataatacaatgaatgcatgtgctgcaatagccgctttggaaagagtaaagattcgaccaatggaacactgctgctgttctgtcaggataccctgcccttcctccccagaagagttgggaaagcttcagtgtgacctgcaggatcccattgtctgtcttgctgaccatccacgtggcccaccattttcttccagccaatccatcccagtggtgcctcgggccactgtgctttcccaggtccccaaagctacctcttttgctgagcctccagattattcacctgtgacccacaatgttccctctccaataggggagattcaacccctttcaccccagccttcagctcccatagcttccagccctgccattgacatgcccccacagtctgaaacgatctcttcccctatgccccaaacccatgtctccggcaccccacctcctgtgaaagcctcattttcctctcccaccgtgtctgcccctgcgaatgtcaacactaccagcgcacctcctgtccagacagacatcgtcaacaccagcagtatttctgatcttgagaaccaagtgttgcagatggagaaggctctgtccttgggcagcctggagcctaacctcgcaggagaaatgatcaaccaagtcagcagactccttcattccccgcctgacatgctggcccctctggctcaaagattgctgaaagtagtggatgacattggcctacagctgaacttttcaaacacgactataagtctaacctccccttctttggctctggctgtgatcagagtgaatgccagtagtttcaacacaactacctttgtggcccaagaccctgcaaatcttcaggtttctctggaaacccaagctcctgagaacagtattggcacaattactcttccttcatcgctgatgaataatttaccagctcatgacatggagctagcttccagggttcagttcaatttttttgaaacacctgctttgtttcaggatccttccctggagaacctctctctgatcagctacgtcatatcatcgagtgttgcaaacctgaccgtcaggaacttgacaagaaacgtgacagtcacattaaagcacatcaacccgagccaggatgagttaacagtgagatgtgtattttgggacttgggcagaaatggtggcagaggaggctggtcagacaatggctgctctgtcaaagacaggagattgaatgaaaccatctgtacctgtagccatctaacaagcttcggcgttctgctggacctatctaggacatctgtgctgcctgctcaaatgatggctctgacgttcattacatatattggttgtgggctttcatcaatttttctgtcagtgactcttgtaacctacatagcttttgaaaagatccggagggattacccttccaaaatcctcatccagctgtgtgctgctctgcttctgctgaacctggtcttcctcctggactcgtggattgctctgtataagatgcaaggcctctgcatctcagtggctgtatttcttcattattttctcttggtctcattcacatggatgggcctagaagcattccatatgtacctggcccttgtcaaagtatttaatacttacatccgaaaatacatccttaaattctgcattgtcggttggggggtaccagctgtggttgtgaccatcatcctgactatatccccagataactatgggcttggatcctatgggaaattccccaatggttcaccggatgacttctgctggatcaacaacaatgcagtattctacattacggtggtgggatatttctgtgtgatatttttgctgaacgtcagcatgttcattgtggtcctggttcagctctgtcgaattaaaaagaagaagcaactgggagcccagcgaaaaaccagtattcaagacctcaggagtatcgctggccttacatttttactgggaataacttggggctttgccttctttgcctggggaccagttaacgtgaccttcatgtatctgtttgccatctttaataccttacaaggatttttcatattcatcttttactgtgtggccaaagaaaatgtcaggaagcaatggaggcggtatctttgttgtggaaagttacggctggctgaaaattctgactggagtaaaactgctactaatggtttaaagaagcagactgtaaaccaaggagtgtccagctcttcaaattccttacagtcaagcagtaactccactaactccaccacactgctagtgaataatgattgctcagtacacgcaagcgggaatggaaatgcttctacagagaggaatggggtctcttttagtgttcagaatggagatgtgtgccttcacgatttcactggaaaacagcacatgtttaacgagaaggaagattcctgcaatgggaaaggccgtatggctctcagaaggacttcaaagcggggaagcttacactttattgagcaaatgtgattcctttcttctaaaatcaaagcatgatgcttgacagtgtgaaatgtccaattttaccttttacacaatgtgagatgtatgaaaatcaactcattttattctcggcaacatctggagaagcataagctaattaagggcgatgattattattacaagaagaaaccaagacattacaccatggtttttagacatttctgatttggtttcttatctttcattttataagaaggttggttttaaacaatacactaagaatgactcctataaagaaaacaaaaaaaggtagtgaactttcagctaccttttaaagaggctaagttatctttgataacatcatataaagcaactgttgacttcagcctgttggtgagtttagttgtgcatgcctttgttgtatataagctaaattctagtgacccatgtgtcaaaaatcttacttctacatttttttgtatttattttctactgtgtaaatgtattcctttgtagaatcatggttgttttgtctcacgtgataattcagaaaatccttgctcgttccgcaaatcctaaagctccttttggagatgatataggatgtgaaatacagaaacctcagtgaaatcaagaaataatgatcccagccagactgagaaaatgtaagcagacagtgccacagttagctcatacagtgcctttgagcaagttaggaaaagatgcccccactgggcagacacagccctatgggtcatggtttgacaaacagagtgagagaccatattttagccccactcaccctcttgggtgcacgacctgtacagccaaacacagcatccaatatgaatacccatcccctgaccgcatccccagtagtcagattatagaatctgcaccaagatgtttagctttataccttggccacagagagggatgaactgtcatccagaccatgtgtcaggaaaattgtgaacgtagatgaggtacatacactgccgcttctcaaatccccagagcctttaggaacaggagagtagactaggattccttctcttaaaaaggtacatatatatggaaaaaaatcatattgccgttctttaaaaggcaactgcatggtacattgttgattgttatgactggtacactctggcccagccagagctataattgttttttaaatgtgtcttgaagaatgcacagtgacaaggggagtagctattgggaacagggaactgtcctacactgctattgttgctacatgtatcgagccttgattgctcctagttatatacagggtctatcttgcttcctacctacatctgcttgagcagtgcctcaagtacatccttattaggaacatttcaaaccccttttagttaagtctttcactaaggttctcttgcatatatttcaagtgaatgttggatctcagactaaccatagtaataatacacatttctgtgagtgctgacttgtctttgcaatatttcttttctgatttatttaattttcttgtatttatatgttaaaatcaaaaatgttaaaatcaatgaaataaatttgcagttaaga

SEQ ID NO: 13772 - DNA, 5190 bp, Homo sapiens
ccagaagttctccagggcttccgcagagcactttttcgctgcctgtgagctgcagcgcgggagagctcgggctcgcgcggaccccagcgcctggcaggctgacagcgctctctcgccccaggtgcccgcgcgcgtggtgagcagctgcaccaggtggcgtccggggtggggtcaatgaagtgcagcctgaggaagatgtggcgccctggagaaaagaaggagccccagggcgttgtctatgaggatgtgccggacgacacggaggatttcaaggaatcgcttaaggtggtttttgaaggaagtgcatatggattacaaaactttaataagcaaaagaaattaaaaacatgtgacgatatggacaccttcttcttgcattatgctgcagcagaaggccaaattgagctaatggagaagatcaccagagattcctctttggaagtgctgcatgaaatggatgattatggaaatacccctctgcattgtgctgtagaaaaaaaccaaattgaaagcgttaagtttcttctcagcagaggagcaaacccaaacctccgaaacttcaacatgatggctcctctccacatagctgtgcagggcatgaataatgaggtgatgaaggtcttgcttgagcatagaactattgatgttaatttggaaggagaaaatggaaacacagctgtgatcattgcgtgcaccacaaataatagcgaagcattgcagattttgcttaacaaaggagctaagccatgtaaatcaaataaatggggatgtttccctattcaccaagctgcattttcaggttccaaagaatgcatggaaataatactaaggtttggtgaagagcatgggtacagtagacagttgcacattaactttatgaataatgggaaagccacccctctccacctggctgtgcaaaatggtgacttggaaatgatcaaaatgtgcctggacaatggtgcacaaatagacccagtggagaagggaaggtgcacagccattcattttgctgccacccagggagccactgagattgttaaactgatgatatcgtcctattctggtagcgtggatattgttaacacaaccgatggatgtcatgagaccatgcttcacagagcttcattgtttgatcaccatgagctagcagactatttaatttcagtgggagcagatattaataagatcgattctgaaggacgctctccacttatattagcaactgcttctgcatcttggaatattgtaaatttgctactctctaaaggtgcccaagtagacataaaagataattttggacgtaattttctgcatttaactgtacagcaaccttatggattaaaaaatctgcgacctgaatttatgcagatgcaacagatcaaagagctggtaatggatgaagacaacgatgggtgtactcctctacattatgcatgtagacaggggggccctggttctgtaaataacctacttggctttaatgtgtccattcattccaaaagcaaagataagaaatcacctctgcattttgcagccagttatgggcgtatcaatacctgtcagaggctcctacaagacataagtgatacgaggcttctgaatgaaggtgaccttcatggaatgactcctctccatctggcagcaaagaatggacatgataaagtagttcagcttcttctgaaaaaaggtgcattgtttctcagtgaccacaatggctggacagctttgcatcatgcgtccatgggcgggtacactcagaccatgaaggtcattcttgatactaatttgaagtgcacagatcgcttggatgaagacgggaacactgcacttcactttgctgcaagggaaggccacgccaaagccgttgcgcttcttctgagccacaatgctgacatagtcctgaacaagcagcaggcctcctttttgcaccttgcacttcacaataagaggaaggaggttgttcttacgatcatcaggagcaaaagatgggatgaatgtcttaagattttcagtcataattctccaggcaataaatgtccaattacagaaatgatagaatacctccctgaatgcatgaaggtacttttagatttctgcatgttgcattccacagaagacaagtcctgccgagactattatatcgagtataatttcaaatatcttcaatgtccattagaattcaccaaaaaaacacctacacaggatgttatatatgaaccgcttacagccctcaacgcaatggtacaaaataaccgcatagagcttctcaatcatcctgtgtgtaaagaatatttactcatgaaatggttggcttatggatttagagctcatatgatgaatttaggatcttactgtcttggtctcatacctatgaccattctcgttgtcaatataaaaccaggaatggctttcaactcaactggcatcatcaatgaaactagtgatcattcagaaatactagataccacgaattcatatctaataaaaacttgtatgattttagtgtttttatcaagtatatttgggtattgcaaagaagcggggcaaattttccaacagaaaaggaattattttatggatataagcaatgttcttgaatggattatctacacgacgggcatcatttttgtgctgcccttgtttgttgaaataccagctcatctgcagtggcaatgtggagcaattgctgtttacttctattggatgaatttcttattgtatcttcaaagatttgaaaattgtggaatttttattgttatgttggaggtaattttgaaaactttgttgaggtctacagttgtatttatcttccttcttctggcttttggactcagcttttacatcctcctgaatttacaggatcccttcagctctccattgctttctataatccagaccttcagcatgatgctaggagatatcaattatcgagagtccttcctagaaccatatctgagaaatgaattggcacatccagttctgtcctttgcacaacttgtttccttcacaatatttgtcccaattgtcctcatgaatttacttattggtttggcagttggcgacattgctgaggtccagaaacatgcatcattgaagaggatagctatgcaggtggaacttcataccagcttagagaagaagctgccactttggtttctacgcaaagtggatcagaaatccaccatcgtgtatcccaacaaacccagatctggtgggatgttattccatatattctgttttttattttgcactggggaaataagacaagaaataccaaatgctgataaatctttagaaatggaaatattaaagcagaaataccggctgaaggatcttacttttctcctggaaaaacagcatgagctcattaaactgatcattcagaagatggagatcatctctgagacagaggatgatgatagccattgttcttttcaagacaggtttaagaaagagcagatggaacaaaggaatagcagatggaatactgtgttgagagcagtcaaggcaaaaacacaccatcttgagccttagctcctcagaccttcagtgaggcttctaatggggggtgcatgacttgctggttctaactttcaatttaaaaagagtgaggaagaagcagaatgattgattttactgcgtgtgaaatcatggttcctgcatgctatataaaagtaaaccatcttttatcctctattcatattttctaccaatcactatgtattggggatatctttgcagatatgttcaaattggactggactttgatgagatataatctcattatttgaatgggtagaaaatgaatttgctagaacacacatttttaatgaaaagaagtaataaatgtaactattaagctaaaatgcaaatgtcagtactgaattcctgcttgttaattacataatatgtgatgctctagaaaatagtcacaagtattaataatgccttagatgatagtcttaaatattaggttgaggtctacctaacctaagctgcttcctggaaagcttcatgttgaaagaacctatgggtggcaccatgtggacttttctgtccctactgtgatgaatagccccacccttcttgctgtccccaacacacctgatgtcactttgagccatatagttgaagtacaaattaataggccttatgatatgcacgaattttactatagataatatatgttgtttctggttttgtttgccaatgagcataataaatgtaaaacctatatagtatccctgtgattattgtatgagcctttgtttgagatttgaaaaaaacatggctccatcacatattcccttttttcttttgatgtctactcaaatcatgaattaatcacatacctcatcattaatcttttcaaggtccttctattgttttgtctgattttctccatcatcctgattagcatgtttattccctcactacccccaggagatattcactgtaatgaatatgtctttggctatgtatgtgtccttgtgttatgttgtacagtgttgttttgagtctgttattatttacacagatgttattatgctatagcttctatttctgtttttgcttcttatttctcttataattctcacttatttcctattttttctactcatttctatttgttactcctttttactggacatgatgtttacaagatacaactgtgttactgtattccatctagtacggggcctttggtgtggcttactatttcattgtgtgcacccacccacccaccacactggacttttctagagatggacagcttggttacctccaccttcctgcactcattctcaaacatactgatgttcatacaaaccagcagagtgctgagggacgatatgtactattacaaaaccagacacttttacattcatggtccaacagaacacatggcctagaggcaatgttgcatataccttaatctttgatatgaataatatctttgttctttatatttcttaaaacagaaagggtggaaaatcactatacagaagcaatatccaaagatctcctgatcataaagacaaggggtcttttcagtcttccctctcctcaaaccttgtgtagcattgcacaatatagatctcagtcaacattcactgagtgccaagaatgtgagaaacactgtaccatgcctgtcatgcgaaatatttaaataaacagattgtcttacag

SEQ ID NO: 13773 - DNA, 3861 bp, Homo sapiens
ccacgcgtccgggacggggcaaactagcttttgggagtgaagcgggtacgcagttatccaacaatgtctggtgagtcaggacagcctgaggctggtccctcacatgcagggctagattggccgaaccctgagaggaatcgggctggggtcccgggaggggtgatccgaagagctggttcccaagggcccaggtcctggatccaaaaggttcttgagcagattatggactcacctcgccagtgtgtcaccccctcggaggtggtgcctgtaactgtgctggccgtccagaggtacctgttagaggatgagccacgcgacacggtgcccaagcctcccctttattgctatgatgtgacgatctcagatggggtgtaccaggagaagtgctacctggaccccagcttgaactctctcgtatatcaaaatattcttaaagttggcattcaaatgagaatttccagggtctcatgtctttacaatgagaaaaggataggccaggggatcctgtgcatagataacgtccactgtggggagacttcagacagtatttctttagaaactcccttcagaaatagagcgcaccaggagaaaccagagaggcctttaagaggcgggaagagtcattacctggcgctgtggaataacgaagatccctatggagatatctggttaacagacaagcaacctgaggaacacaactttagcgataccaaaataatttccctttctcatcttgaaatgacctggactaacagaagaaattttcctgcattgcttgtgaggatcttacataaatcaaaactgcgatactatggaaaacctgataaaaagatgattgaaccatatcagacctttttggaagttgctgacagttcaggcacagtgtcagtgattatgtggaatgccctgtgtcctgagtggtataaaagtttgcgggttggtttagttcttctgcttcaagactattctgttaaaaagagttatccattcagaatacagcctgtccccgtggatccacagatcaaactaatttctacaatggaaatctgcctgaatcttcgagatcccccaacaaatataattatcattccagaaaagcaggtgaaaccagaatggagactgccaaagctaaatcaccgatttaccacaaggtcagaactggatgatatgccagaaaattgcatctgtgatgttattggccttttagtttttgtaggaagggtccagcggtcaaaaaagaaagaaaaccgtgaagatttttggtcatatcgctggattcacattgctgacggtacttcagaacaaccatttatagtggaactgttttcaacatcgcagccagaaatctttgaaaatatttacccaatggcatattttgtgtgtacacagttgaaagttgtcagaaatgacaatcaagtacctaagctgctttacctcaccactacaaatgagagtggagtgtttattactggtcatagaggccagccgtatacgtatgatgccaaggtaaaaaactttattcaatggattagaacaaagtctgattccggggaacagaagaatatggttattggtggatattacccctatccaccagtgccagagacattttccaagtatagtagttctattaaagttgagtcgctcttgacagctataagtgaagtcaggaaggagattgaagacttgcagtatagggaacaaaagcgcattgcaattcaggggataattactgctataaagtatatcccccatagcagtgcgactgaaagtgcctcagcatcagaaacacttcggaatgctaacagaccctcgacctctcaagcagctagagtagaaatgcaagaaagaaatggtaaacggcatcaagatgatgagcctgtgaattctcagtatttccaaactacatctacaaatttaagtctgagcaataaaataagaattcttcaaggcccacacgctaatccagttgctgtacctcaaccaggagcttctgtacaaacaaagggaattaaaccgggcatgccaagcatcttcaaccgtcgagcaaatataaatgctaatctgcaagggaaagccagaaaaactataagtgataggtgggagagtcagctgtggagagagaaaaagtttggcttaatagatcacctacactacagccgtgtttatcctgaaagtattccacggaaatttatgtttgaacacagaaagtttcttagtgaccagtataattctcagcctgcgaaatatgtaccaccagaaggaaggcccccaaaacttgatgattttaagagcgcccgaagccttggacattttgaagtaaccatactaggtctgaaccatgagatagcaatcgatgttgctttcctacccatgtattgtccagaagatattcgaacatctcaaatagacacactgttgacctccatgaattacagctgtgcatatccacaggacacaactggaaatgaccgattgccaggtccaagagcggttgcaggtgatattataaaagcagcaactgaactggatagagtgcatatcgtcggtatcttggatatctgtaatttgggtaataataaagtggaagtctatttgcacaagatttatagtccagagaatacttcttaaaagttagcaaatgaaattattacagattatacgagtgtactgctttaaagatattccatcattttgctggtaatttcagtaactgttttcagcaagaatattacatgagctctaaagttattaagcagttttatgttcgttttgtgtttagggagctttttaaaacacttcatttcagattcattattgaaaaaggtcatcaaaataatttttgtgtataagggaatttaccttgcttaccttactagtatgactattatcttgacttctggtaatttatgttcactattccatttgtgaagtgtactttcattctaaagcctcagtataaggcatcctaacttacaagagtaactttccatggacatttaacatccttccaattttattcacatataatgggaaattttgaattgccagtttgaagactgttctcctaaagtgttcaacctgcacttcttacaaccaaggtagtttgtatcattttcaaaagtacacattattagggtctagttgcccctggtccttagcttgctcagctgcaaaataagcgtgctaaattaaattgtcttaaggtttttccacttcattttgtgactttgtgtggttcgaatttctcagtattttaaccagtgtgttgatgttaaagtcaaaggccgcagtatgtctatattcttgctgtactcattggtagtttcagtatatgtaatgtgagtttaaatagtgaaattgtatctcatattaacatttcaaatgctcatattgaaaatggaaaatagtaaacacaggaattgattttattctggttgtctataatacttcattttaaatgtaaatggccactctgcatttgcaaggcccggtggttgacatctgtgtggtttgttagatgagacaaaatgaccattaaatgagtttatagattattctgtatcaagataaatctgattccagttaagctataaacttgtgggattttcttgtagccctatagttctgtgacttcatttgctatacgctttaaatgtgttgagcagcctatgaacctaaagacatactgcagtttgttcataaatgtattcagtcttttattctttataattgtgtgtaaatgttaactaaacagtggattcctctcgtgttacagttttgagtgaattattaaagaagttaaaatgcaataaaaaaaaaaaaaaaaaaaaaaaaaaaaaaaaaaaaaaaaaaaaaaaa

SEQ ID NO: 13774 - DNA, 4582 bp, Homo sapiens
ccagggtgaaagttcagcgcgccggcggcacttccaacatggcggcggccggggcggcggtagcgcgcagcccgggaatcggagcgggacctgcgctgagagcccggcgctcgcccccgccgcgggccgcacggctgccgcggctgctagtgctgctagcggcggcggcggtggggccgggcgcgggcggtgcggcgcggctgtaccgcgcgggcgaggacgccgtgtgggtgctggacagcggcagcgtgcgcggggccaccgccaacagctcggccgcgtggctcgtgcagttctactcgtcgtggtgtggccactgcatcgcgtacgcgcccacttggcgggccctggctggggatgtgcgagactgggccagtgccattcgcgtcgcagctctggactgcatggaagagaagaaccaggccgtgtgccatgactacgacatccacttctaccccaccttccggtattttaaagcatttacaaaggagtttacaactggagaaaattttaaaggacctgaccgagagctgcgaacagtcagacagacgatgattgacttcctgcagaaccacacggaaggaagccggccccctgcctgcccgcgcctagaccccattcagcccagtgatgttctttcccttcttgacaaccgtggcagccattacgtggctattgtctttgaaagcaacagctcctaccttggacgggaggtgatcttagacctgatcccgtatgaaagcatcgtggtgacccgagcactggacggggacaaagcatttctggagaaacttggtgtttcttcagtcccttcgtgttacctgatctacccaaatgggtcgcatggattgattaacgtcgtgaagcctctgcgggccttcttttcgtcttatttgaagtcattgccggatgtgaggaaaaaatcgcttcccttgcctgaaaagccacacaaagaagaaaattcagaaatcgtggtttggagagaatttgacaagtcgaagctgtacacggtggacctggagtcagggctacactacctcctgcgggtggagctggcagcccacaagtccctggccggagcagagctgaagacgctcaaggactttgtgactgtcttggccaagctgttccctggacggccgccagtcaagaagctgttggagatgctgcaggagtggctggccagccttcccctggacaggatcccctacaacgccgtgcttgacctggtcaacaacaagatgcggatttctggaatattccttactaatcacataaagtgggttggatgtcaaggaagccgatctgagttgaggggttacccgtgttctctctggaaactgttccacactttgactgttgaagcctcgacccacccagatgcactggttggcacaggctttgaagacgacccccaggctgtgctgcagacaatgaggaggtacgttcacaccttctttgggtgtaaggaatgtggtgagcactttgaggaaatggctaaagaatccatggactcggtgaaaaccccagaccaagccatcctctggctgtggaagaagcataatatggtgaacggccgcctggcaggccatctgagtgaggatccccggtttccaaagcttcagtggcccactccggacctctgcccagcctgccatgaggaaattaagggcctggccagctgggatgaaggccacgtgctcacattcttgaagcagcactatggccgcgacaacctcttagacacgtattccgcagaccagggggattccagtgaaggaggaaccctggccaggggtgaggaagaggagaaaagactcactcccccagaggtgtcccatggagaccgagacacccagagcgtccgtccacctggtgcactgggccccaggcctgcccttccagagagcttgcatcacagcttggacgggaaactccagagtctggatgggcccggggcccacaaggaggtgggcggggccgcacccttcctcggggttgacttctccagcctggacatgagtctctgtgtcgtgctgtacgtggcttcatccctgttcctcatggtgatgtacttcttcttccgggtgaggtccaggcggtggaaggtcaagcaccaccacccggccgtgtgagtgcccgggtgctgccagccacggcggaagctcccttggaggcagccctgccccgtgccacctgcagctttaatatttatgatcagggattttataaacatgcgggcctggtttcacatcggatggcaccttttggcttcaaagtcctggttttacaaacgctcttctaacaagggaagaacacggggtaattttgtggggatatttgcattcctggcgtactcaagtctgttcatgctccttttgcaggtcttacagcaaaaagacttctgtatttttactcttctagatgtgaaaagagggtgcagagtccaggccagatagtcttccccacacactttcatctcgtttcctccactccgccccatcctgcagggccttgtttttgtatttggagaacctcgcccatcccccccgcggctcctggctcccccccccccaccttggccctccctgcaccctccactcccctcgctccccctccccccgctccccccacgccccctgctccaggctgccaagtgttttcctttagccgggcggggacagacagagccggaagcgcagtcggcctctgcagcccctccaagcaagtgctccagggactatcctgtgtttgtagctgcttccctagggcaggttcctgagggctctccttgttcctccgggtgttcgacaccagacgtggggatttcaacaggggaggagccaaggaattctgtggctgtgctgcgtttcagaaaataacccccagaggccttgggctgtggacctgggggttggaaggatgggggctcatttaaccctcagaggcagcgcctttgtctgtctatctggtgacaagagagagacaagtaaatgggggccgttgggacggcgggtgcctggagggcagctctgggctcagcgggcagtgcttagagcacaggcccctctgttgggggatggggaggagagcagtctgcccttgggagcgtaggccccagggagacttctaaagccccccctgtcgtctgctcttcacccagcaccacagaggcacctgctgcacacacaagcatctcactcggcccacggagggggccaggcttcctttgcctgaagctgttttgggaagggtctccacacaggcactgatctcccaagcttttgtcatgatgtcttttaccatttgataattttaaacattgtttttaaacccaaaacatttagtggtccgttgcctctgaagatgtaaacaaacaaatacactatttctgggaacatttatattgagattctttgtggctattggtgtgtctcacaggcaaaatttgatttggctaaaataggctcagatgtatttgtgtgcccgtgtgtgtgtgtgtgtgtgtgtgtgtgtgtgtgtgtgtatgagagagagagagactttgacggttgtagatattttttccgctttgcctactttatgttgtataatcatgtgtttactaacaagttgatgacatggatgtattcataagaccatgtaatattgatgtgattgttgtcgcttgagaaaaaaaggcaacagctgattctttcaacaactgtcacagaatggctgggctgagaacgctgcccagggccctgcagctggcgggagaggtgtctggtgggagcggtgtctggtgcgtcagcctgctgcttcgtgtctcactcgagagttgcttctggtttcacactttttaacccctctgtgctttagcagccgtgaccttgccttcattgcttcatccagtgcaggcctgggttattgaagacaccaaagtgtttctcttccagtttgaaaaccaggcaggtttacacgtgggtttcagtgtatttgcctttgaacccttcaaactaaactttagccttttggctggtgttgaatgtctttagctggggtgacctggagtgacctgggacggtgttgtggtttaccgtctccagcttcagcctttccagaaacccttgtggagggcagtgttggctgcaggtttcatcatattgcagtttgaggtcaccactatttggggaacaagcttgcgtcctgctgaggggcaggattttcagcagagcgtcggtggggctgggccgtcgtggaggtggccccaggagtcatatggccatactcagacacaccttgtgtggcctgctcagagctggatgccacctttaggcaatgtttagagtctattttctaaagttttaagtattttaagaggtattgagactaatgaatataatagttcagtaatttaaatgcttatttattttcagtggaaggatttttattaaaaagaagctaattgacatggaaatgtcagtgaaatttcttacctgcaaggaaagtgaacattttgtatttaagtaaactataatgtgcacattttaataaagaaatctgacatttgaaaaaaaaaaaaaaaaaaaaaaaaaaaaaa

SEQ ID NO: 13775 - DNA, 3122 bp, Homo sapiens
cgctgcggccgctatcccctccggaccatggccgacgacgacgtgctgttcgaggatgtgtacgagctgtgcgaggtgatcggaaagggtcccttcagtgttgtacgacgatgtatcaacagagaaactgggcaacaatttgctgtaaaaattgttgatgtagccaagttcacatcaagtccagggttaagtacagaagatctaaagcgggaagccagtatctgtcatatgctgaaacatccacacattgtagagttattggagacatatagctcagatggaatgctttacatggttttcgaatttatggatggagcagatctgtgttttgaaatcgtaaagcgagctgacgctggttttgtgtacagtgaagctgtagccagccattatatgagacagatactggaagctctacgctactgccatgataataacataattcacagggatgtgaagccccactgtgttctccttgcctcaaaagaaaactcggcacctgttaaacttggaggctttggggtagctattcaattaggggagtctggacttgtagctggaggacgtgttggaacacctcattttatggcaccagaagtggtcaaaagagagccttacggaaagcctgtagacgtctgggggtgcggtgtgatcctttttatcctgctcagtggttgtttgcctttttacggaaccaaggaaagattgtttgaaggcattattaaaggaaaatataagatgaatccaaggcagtggagccatatctctgaaagtgccaaagacctagtacgtcgcatgctgatgctggatccagctgaaaggatcactgtttatgaagcactgaatcacccatggcttaaggagcgggatcgttacgcctacaagattcatcttccagaaacagtagagcagctgaggaaattcaatgcaaggaggaaactaaagggtgcagtactagccgctgtgtcaagtcacaaattcaactcattctatggggatccccctgaagagttaccagatttctccgaagaccctacctcctcagggcttctagcagcagaaagagcagtctcacaggtgctggacagcctggaagagattcatgcgcttacagactgcagtgaaaaggacctagattttctacacagtgttttccaggatcagcatcttcacacactactagatctgtatgacaaaattaacacaaagtcttcaccacaaatcaggaatcctccaagcgatgcagtacagagagccaaagaggtattggaagaaatttcatgttaccctgagaataacgacgcaaaggaactaaagcgtattttaacacaacctcatttcatggccttacttcagactcacgacgtagtggcacatgaagtttacagtgatgaagcattgagggtcacacctcctcccacctctccctatttaaacggcgattctccagaaagtgctaacggaggcatggatatggagaatgtgaccagagttcggctggtacagtttcaaaagaacacagatgaaccaatgggaatcactttaaaaatgaatgaactaaatcattgtattgttgcaagaattatgcatgggggcatgattcacaggcaaggtacacttcatgttggtgatgaaattcgagaaatcaatggcatcagtgtggctaaccaaacagtggaacaactgcaaaaaatgcttagggaaatgcgggggagtattaccttcaagattgtgccaagttaccgcactcagtcttcgtcctgtgagagagattccccttccacttccagacagtccccagctaatggtcatagcagcactaacaattctgtttcggacttgccatcaactacccaaccaaaaggacgacagatctatgtaagagcacaatttgaatatgatccagccaaggatgacctcatcccctgtaaagaagctggcattcgattcagagttggtgacatcatccagattattagtaaggatgatcataattggtggcagggtaaactggaaaactccaaaaatggaactgcaggtctcattccttcttctgaacttcaggaatggcgagtagcttgcattgccatggagaagaccaaacaggagcagcaggccagctgtacttggtttggcaagaaaaagaagcagtacaaagataaatatttggcaaagcacaatgcagatcttgtcacatatgaagaagtagtaaaactgccagcattcaagaggaaaacactagtcttattaggcgcacatggtgttgggagaagacacataaaaaacactctcatcacaaagcacccagaccggtttgcgtaccctattccacatacaaccagacctccaaagagagacgaagaaaatggaaagaattattactttgtatctcatgaccaaatgatgcaagacatctctaataacgagtacttggagtacggcagccacgaggatgcgatgtatgggacaaaactggagaccatccggaagatccacgagcaggggctgattgcaatactggacgtggagcctcaggcactgaaggtcctgagaactgcagagtttgctccttttgttgttttcattgctgcaccaactattactccaggtttaaatgaggatgaatctcttcagcgtctgcagaaggagtctgacatcttacagagaacatatgcacactacttcgatctcacaattatcaacaatgaaattgatgagacaatcagacatctggaggaagctgttgagctcgtgtgcacagccccacagtgggtccctgtctcctgggtctattaggcctctccccagatatctgagcataactgggagcacctcatttgtggaaaagcctctttgttatcggccttgtgtcagcaggtcatggtccctagagactacctagttgtagtgtgacctacatttataattattgtcatgtccgaatagataggaggagaaaaacaattacacactaatttaaagagacagtatcttttttaatcagttctcctaaactttaataaaatgtatctttaaatgtatgtattattcaatcctttggaatgttatatttttggaaatcatagctttttatttccaaggcccctaaaactgcacaaaataga

SEQ ID NO: 13776 - DNA, 11692 bp, Homo sapiens
caccctcggagcccccggagctccccgccaagcgccatccccgcgggcggaggggagcgcgggtcgcgcgccgtggagagccgggacgcggattagcgcccgcaggagcctcctgcgcccgttgaggcgctaaagggcttaccccggaggcgggtggaagggcgggcagaggctcctcttaaataccgctcccggccgcacttcgcgctcaccccggcgtccgctttctccctcgcccacagctgccggatagtgctgaagaggagggggcgttccccagaccatggcatctacggaaggtgccaacaatatgcccaagcaggtggaagtgcgaatgcacgacagtcatcttggctcagaggaacccaagcaccggcacctgggcctgcgcctgtgtgacaagctggggaagaatctgctgctcaccctgacggtgtttggtgtcatcctgggagcagtgtgtggagggcttcttcgcttggcatctcccatccaccctgatgtggttatgttaatagccttcccaggggatatactcatgaggatgctaaaaatgctcattctccctctaatcatctccagcttaatcacagggttgtcaggcctggatgctaaggctagtggccgcttgggcacgagagccatggtgtattacatgtccacgaccatcattgctgcagtactgggggtcattctggtcttggctatccatccaggcaatcccaagctcaagaagcagctggggcctgggaagaagaatgatgaagtgtccagcctggatgccttcctggaccttattcgaaatctcttccctgaaaaccttgtccaagcctgctttcaacagattcaaacagtgacgaagaaagtcctggttgcaccaccgccagacgaggaggccaacgcaaccagcgctgttgtctctctgttgaacgagactgtgactgaggtgccggaggagactaagatggttatcaagaagggcctggagttcaaggatgggatgaacgtcttaggtctgatagggtttttcattgcttttggcatcgctatggggaagatgggagatcaggccaagctgatggtggatttcttcaacattttgaatgagattgtaatgaagttagtgatcatgatcatgtggtactctcccctgggtatcgcctgcctgatctgtggaaagatcattgcaatcaaggacttagaagtggttgctaggcaactggggatgtacatggtaacagtgatcataggcctcatcatccacgggggcatctttctccccttgatttactttgtagtgaccaggaaaaaccccttctccttttttgctggcattttccaagcttggatcactgccctgggcaccgcttccagtgctggaactttgcctgtcacctttcgttgcctggaagaaaatctggggattgataagcgtgtgactagattcgtccttcctgttggagcaaccattaacatggatggtacagccctttatgaagcggtggccgccatctttatagcccaaatgaatggtgttgtcctggatggaggacagattgtgactgtaagcctcacagccaccctggcaagcgtcggcgcggccagtatccccagtgccgggctggtcaccatgctcctcattctgacagccgtgggcctgccaacagaggacatcagcctgctggtggctgtggactggctgctggacaggatgagaacttcagtcaatgttgtgggtgactcttttggggctgggatagtctatcacctctccaagtctgagctggataccattgactcccagcatcgagtgcatgaagatattgaaatgaccaagactcaatccatttatgatgacatgaagaaccacagggaaagcaactctaatcaatgtgtctatgctgcacacaactctgtcatagtagatgaatgcaaggtaactctggcagccaatggaaagtcagccgactgcagtgttgaggaagaaccttggaaacgtgagaaataaggatatgagtctcagcaaattcttgaataaactccccagcgtatcctatggtaactgatggtataaacaagctttctttaaaaaggaaaaaaatgcgtatatttctatgtttacttaatctgttagccgaggcttagaggagctcttctgagtcagtgatgacaggcacggtgctgtgtctttgccaaataatgctttataaccgtctaattttctcacttgtattattatttgaatggatgctgctggaggaatcagttggaattgaagacacgttcttgccagcttcccttttctcccaagatgcagaaatgtggatgctcttttcccaggggacatgagtaaagcagtgtggtacactccagggacttgggaaaatgagcaaacacacagcgtgttattccttaaagtgttctccatgtctcgccttgttatgcacaagagattctattaaaagcctctagaagtaactccccttaaaatgtctagtaaagcttgcacatggattgattaaaagcaaatacctgtcttagggaattctgacaatttatcttccatatgctcttcaagtaaaatgtttcaaagacagttttaaagggagccatgctcttaaaggcagttgattaaagaacctgttacatctctgccttaccctgtgtaatctgtgagaacaatggttgaaatttcaaagtatgtttcattattctttctaaatttgataattgattaggaagtattttatatataaccactgtagatattgacaaaagtaagagagcacagtcaacataaagtttaaccagagttaaatattcaaatttatttatgttcggtttgccttcacctggtgtagtaaaatcaaatgagattatttggtatgtgttttgctttgtttaacccaaaagattattttttggttcctaaagaataagatatttttaatctgtcaattatttcagtcatcatctcatcgtcctagaaagcctggtcattttactgtcctcacacatggaagacacttgtgttggctgtgcctcttttaatgtcatctcttgatgaaacaaaaatactggtatttatccaatatgttgaaagcgttttgttatcttctatcaaagcacataaaaccagttataggacacagttggaagcagagccagtcttcctcctcagtcttctcagtagaaaggaacagaaaacaaacatctgtgcaaaaccctataaaagtgatattcctatggcagtgtccaggcagccttgaacaatgacatggcaacaaaggatggctctgtacaacttcacagatggaatcttgtttaaggctgtgaagttttaaggaaaaaataatataattggtgtagcacagtgccttgcatgcagtaggcagccaacaaatccttaatgattggtaatgcaagctaaaatttttaatgtctctactatccttttttattgaataacgcacagtattttcctaaggttgctgggtttgggagtaagcttgggacttgaatcattgagaaataaagcacatttgactctaagaagtatgtagaaccttgtttataggtgagaataggctgtattacatgaaaccagcggagggatgctgagacagtcatggtttatagaatccaaattctctgagatgagggtgcttatggacctcaaatagcctttcttatctgctccttgtgacttctctcttttaaatcagatacctttgaaacatacaagagacatgagattccagttgtttttgtctcccaaaccctagtgatttttggataaggatcactactgaacagtattaggcaacttttcatttttgcttttcaaatgacattggtctttatttccagtagatgggcagtaaacagggtcagggtggtcaagggatatgattaagtgtagtagtagaaaatgcattctttttttttttttttagacagagtcttgctctgttgctcaggctggagtacagtggcacgatctcagctcactgcactgcaatgtccacctttctagttcaagcgattctcctgtctcagccacccgagtagctgggactacaggcacatgccaccatgcctgggtaattttttgtatttttagtacagatgggtttcattatgttagccaggatgggctcgatctcctgacctcatgatccacccgccatggcctcccaaagtgctgggattacaggcgtgagccaccatgcccggccagaaaatacattctttacagcaaatgttataggttaaggagacagttcctgggtttagctgtgaaactgtttaggattttctctaagtggtgttcccaagagcttttttctggtaagttggaggctataggcaaagcgtctaggagcttgttgttttttgctatggaaggccagctttgggatctatatacatgggcatgtttctcaatggagtggtcacaggattctcttctcagaactccgcctgaaacctttccggtgtgttttgtcttcaactttttcctagctatcctattagcctgtaaatatgtcagcagacaatgtgtttggaagaaacaaggtgtacaacttcacaaagcaagttttttctggtctgagacttactgtgtgcaggaagtctcgtgagaatatacttagaaaatcacacttatctggaaattcaataagtcatattaaaaatatacaatttcttgaactcaggactagcctgaaaatccaaaatgcatgtagagttgacatgttgacatatgtctatgtcctctgtttttatgtaagcctcatttatttctcccttgccatgcccatttgggattttctttgcccagcatatgtgccataaacagaacaaatggatccagggtatacctctaataacctttatctaaatagaatacatttaacctgtcaattatatgtatagatttatcctaattggttcaacatatatatgaatgcttgtaatagtctgttactatttgataatgcataaatgttatatttatatacagttacagcaggccagaaacatacatacactgcatcctgtaaggtctgtaaatcagggcttcggcaatgccattttgctatagactcattcatgttttttaggaatcagaatcatttcaggagaaaaccaactaagtagactttaattcttctctttctcattcttgccctttgagaaacccaagtggaatcatcacttaattacttactcaaattcaatgaatcaaatccaatccaatcagtgagaagaatagcttatctttcaaggtaatactttaccttagatctttgagggcatgcttcccatacaaagagcatcagaaaatcagggcaatcatctagatctcacagatcttcaacataggactctaggttatgagagctgaaccacatagctatcagtttcagtttttacttcctattgagtgtgtagaaacacagcctatggttttgctgtctgcagaagttaccataccctgtaaaagacaaatatttctttctcctctcgaaccactagtcagcctggatattcatgaaagctgaaagaaggggtgccaaaatgcctagctcctggatttagactcatggaatatgagaaaggcttagggaaaattcaagtcatggggagattcctgctaggtgatgccaggaatctcaatgacctgttgattagagggtctctggtcatttccacttgtgtgtggagaaatacatcatttgcatatgtatctagtcaagaagcccttttggagcaaagtggttgggaaactcatttactgggtccaccaaaggaaacccaattctgccatggttttgcaaatactacacgtccctttgctctcaatagcaaaagtgatgttatagttttttttacttttgtcagaatcaaggcttcggccacctgtgcaatattttcccatggagtgcagcagtaaatccaagtaggtatatccgtgctcagagagaattctccatagttctgactcctgaaaaacaagtctcattagctctcatctagtttgatgactaaaagtgcacagcagttataccccagtggaagtgatttttctcacctagctgctctctaactcttacggctatctagttgtctgagctgctggtttgttttacttattctccaactgaactcattccaaaccaagaaaaaggaccaaatgaaattttcagttattatcatacttgctccttgaataagaatgctagagtctggaggcagaagaagactaagttaaaaaaacagcctgaaggaattctggagtgagttttgtaagtctaattgtcaaagaagataaatggtctcagtatctgtagtaatttctgggtaagcctagagggatcactgagtgccaatccaagcaggtggcactagaggcagattgttctcctagcatagagtgagtttccagctgctcatgacacattttcttatgattttccctaaaagaaaaccaaattttctactccacctcttcctttcctatcattccacttattgttgctgctttgctaacagccagcttagtaagccatcacacaagttagtgtgaggcttggttttaaaatagataacagagaatcttgattaaatagtatccaactttgtagcataacacagctaattcaggcaatgacatagagatgataagaaacaacatggtttggtagagggaacatttgatttagactctgcccatttttagctgtatgacttacataagtcattttgtgtccaagcctcattttctcccatatgaaaagtgaaggggttggattaaatgactaaaatccccttccagccctatgagcccaatgtattatgatctctgctttgtttccttcttaagaggcttcctactataaaatgtgacctatttacattttaagttgaagtagcccacaataatgaataatcaatttagatttttctcatctcctttgggagaaattaaattcaagcctctattcatttgatgttttacaacaagcttcaaagttggccatgttcattcacagtttgatattttgagacaccaataaaagttttttaataaaagttcccttgacttaaactcaccttcctaatagaagtagtgatttggctcacggaaaaatgtttccagagtcaacatgagaggactggatgaacctacagcctcactcaagctgttgcatcattgctgctgtagcaacagagccctctctgaatacccaaaacacacaattttctccaacaattctaattgcccacccagtatgggaatttgagagcctttggtgaataaccttgatcactcttttgaaatttggtgcaacacttgcacaatcacggcaactgtttgtaaatatcttttcttctccgccagtatgtagacatgcacacccattcacaagtaagcccgcaaattcattttcacattttcctcttggtttgtttttatcatgggtatcacattgcaggaagagatgctctaacttacaagaatggaattttctgactatcattgccctcttcaaggcctgattagtttgtagggtggatgggatacaatgcatggtctacaaggtccatgtcaccagccatgatctttaaacaacctcttgcactttctggcactgctgcaatggcccatggtggacacctctgctgtttgtccaaacttctgctaaatagagtagtgttggtatttgttgtgttgtgaactcctttgttgtcagagaagacttcagctcttcaggtttgcaagggcaagatgtaaagctaggactgaaaggattgggttttgtttttcggccggcttttttccattagtgcaaaaaacctgatgcaagggcagcaagataaacacaatttcttcattgacccagataagaacctgtagaaaagtgagagatgcccctaagttcctatttcatttatcctaaataatatcctgaataactactgattagtttttttctatgtccagccttgcttcactttccaacctccaggccaaatattcattttgatattttacaaaatccttctggtttttacacagggcccttttgtgctgagaataaaaccagctattggaacagacctcactgctttgtagagtcagaagttgacctagagaatgggtagcaacaggtcctcagtttctctggagacacccccaatccttgggtgagtgttgaaacccgacaactgactgttagccttgtcatcatcctcactggagatggagatgttgcagtcggagcctcactccttctggggcactgtttcttctcatggcaaccattttgcctgcctggaaacagcctgttgcctttgctagggggcaaatacacacactagccaaggaagttgatccagcacatctctgaggtttctcccccatggacccatggagcgaattccctgagataaatgatcagaaagttggctgtctggtggtttaatactccataagagttacttcccttatagaaagtcatcctttggcatctagatttttctacaaatcaccttaactccctccctttctctttctcctggaaaacctcagcattgcatctccatgttgcacaacacagatcagattatctggtcactatagagattttgtatataaaaaaactacttttttgaggattttggatattgggttttctatttgttttccacagcttgaggaaagagctggcaaatctgtgaatctaacttgatcttgttgccagcagatatattttggcttcctggtaagagtctgtgttcccagggacaatatattgccctctgatcagtattgcaccctaaatccacaaattcctccagcccagccttacatttttttaaacaaatcccctagcttgtttgctattatttataaagagcattagaaaatgtatttatagacctggatgttatatgtttaatattaatttagcctttaataatgttataggtttgtaactattcttcagaaattataaagaactcagtgtagactgaattaatctatttagtatctgtaattttgcagacatattttcttacagtattttctatgtaaccacacatgtagaattataactaattagagcacaagaagtttcttcagcaatttagagctaccaattgtttcttgactatatagtcacatttgacaaatttaagaacccagtctttagtgatgcaataaacaaaatgaaccattaagaacaaggaattgcttaaatcccttagctggtgaggatatacatctaaataattcatctttctaactcaaggaatggtgctgattttttaaatgtttgacaccaggccttgtttttccagctgagcattctcattttgcttttctctaagactatcaaagacaaggtattaatagtaggattacttcctagatcagaatgtttcatacattcctaaaggtttatgtggaaattggcttaggaaaactttgagtagcagagtctgaggatgagtgctagagatgaaatcaggacagatttgttgcggttaattcttgccaagcaaattagtggtaaatgtcacgttgttatgtgaattgagcacacatttttaaagaaagtttacaaaaaatttttagaaccaactatgaggcaatactgtatcactgggggctgggagtgggggcttagaatcatactgaaattgtttaaaagcagcccaggtagtttctgtcctcaggtgaataacagactatataacttccccgaaaggtaaaacgatagccactgcagagacgaggtgtcttccttccaccaaatactttctgagatggtggtaggagtagtatttttaccgtggtttaaaaagtagtcagttacatagaaagtgtattggtatgtatttgaacctgctcttcattaaacaagcagattagatgtaccctcgactggcaataattgtatctattttcaagtacagctagctgtcaaagcatgaagctcttgtgtatacacactgacacttggttcacgcatgaagaacagtgcctatgcactttgtgtagctataatgtaggtatctaggtgtaatttcagtgaaatggtgtatagatgtattgtaatttaaatgtatatgttatttttggctattcatctaaatgcagtagacatgttgatcggtgttttgcaaacatttctttttccttcttagataactagtcgtgaatcatttctcctctttctcagtgtggcttgggaatatatatgagtgaagaatttatctgtgaatcctttgtactgatgattgtttgaaagtctgtgtgtgtccagcacctttgtaaatacgcaattcagagcagggatgggctgggtgtgtgtcctggttcttagtgaaaggtcatctcatgtctgtttaatacatggtgaatgcaactgtggaacttttgattacctagacttaggtaggtttagaatgagaacatccatctacagtcctcctttgcttggtggattgggctcagaggaacaaaaagttagtctgactctgtgcatattagcatcatgtctttagagaaaggtcagcctctctggttgccaaatacccatcatgatgctcatgacttaaaggttctgaggagccttgtctcccttggatttttgagtcagggtacaggaaaaaacattgccgactaactaactgcaaatgcatctgcaggtgaaaccctacgaaagcacagttctggctataaacttcagagttctctgtaaaaaacttagagcactagaagcacaggaatagtgagtgtacagcttatgcggttgtagaggggcaactgatgaacacaggtcccacatatatgagggagtatgacgttctctacctaatatgttctgtgtgcatgttttgaatgattgaagatgggattaactaatgcaagtttacagttgcctcctaaaacacacattctgtataattatcgctaatacaatgctgtgaggtctatagttcctgtaacccctttctcctccccaaggacagagaagaactagccatgtgctatagggaaccctgagtgccctactcttttcccaagaagggtaaagcctacaatatcatcagggggcatgaagcacattaatttgcagtggctgcttcatatgaggagatatggtggacaggctaatttttccttgaaaatgtggcttcttcaactcctttcaaatttaggatggaatacttcctgaaataaaactgggctttatgcaggattctctttgaaaattcttgtatgtccagaacaaaagataaaactaattgtattcctcacattcacaatccccattggtctgaagtcacgtagcacagagcatctatagcacatagtgtttaaagactaatgaatgcaaaaagataaaatcttcaactaatttttgaattgtttctcatatatgctactagaaaatgccttgttgatgaagcacattttgggtagttgaggtcttttgttttcgcctttagctttctaagctttcttacaatgtggactgattactgtaacatttcacgtgtaaaataactggatattctttatatactggaaataacctgtgaatccaatatttcactaagtgttttaacttttgtgtatatatctctcatcaataaatgtggatttcaattt

SEQ ID NO: 13777 - DNA, 1497 bp, Homo sapiens
agcggcgccgcgggcctgcgtgctggggcagcgggcacttcttcgacctcgtcctcctcgtcctgtgcggccggccgggtgaggccgggcccgcgtagggggcagtcggcggctgcctccggcggaggtgcctcgcggcgcccgggccggcccgcgcctcggcggcgtgctccatgcatccggagcccgccccgcccccgagccgcagcagtcccgagcttcccccaagcggcggcagcaccaccagcggcagccgccggagccgccgccgcagcggggacggggagcccccgggggccccgccaccgccgccgtccgccgtcacctacccggactggatcggccagagttactccgaggtgatgagcctcaacgagcactccatgcaggcgctgtcctggcgcaagctctacttgagccgcgccaagcttaaagcctccagccggacctcggctctgctctccggcttcgccatggtggcaatggtggaggtgcagctggacgctgaccacgactacccaccggggctgctcatcgccttcagtgcctgcaccacagtgctggtggctgtgcacctgtttgcgctcatgatcagcacctgcatcctgcccaacatcgaggcggtgagcaacgtgcacaatctcaactcggtcaaggagtccccccatgagcgcatgcaccgccacatcgagctggcctgggccttctccaccgtcatcggcacgctgctcttcctagctgaggtggtgctgctctgctgggtcaagttcttgcccctcaagaagcagccaggccagccaaggcccaccagcaagccccccgccagtggcgcagcagccaacgtcagcaccagcggcatcaccccgggccaggcagctgccatcgcctcgaccaccatcatggtgcccttcggcctgatctttatcgtcttcgccgtccacttctaccgctcactggttagccataagactgaccgacagttccaggagctcaacgagctggcggagtttgcccgcttacaggaccagctggaccacagaggggaccaccccctgacgcccggcagccactatgcctaggcccatgtggtctgggcccttccagtgctttggccttacgcccttccccttgaccttgtcctgccccagcctcacggacagcctgcgcagggggctgggcttcagcaaggggcagagcatggagggaagaggatttttataagagaaatttctgcactttgaaactgtcctctaagagaataagcatttcctgttcttccagctccaggtccacctcctgttgggaggcggtggggggccaaagtggggccacacactcgctgtgtcccctctcctcccctgtgccagtgccacctgggtgcctcctcctgtcctgtccgtctcaacctccctcccgtccagcattgagtgtgtacatgtgtgtgtgacacataaatatactcataaggaaaaaaaaaaaaaaaaaaaaaaaaaaaaa

SEQ ID NO: 13778 - DNA, 1999 bp, Homo sapiens
ggcagccagaagcacctgtgctcccaggataagggtgagcactcaggatgactgtggagaaggaggcccctgatgcgcacttcactgtggacaaacagaacatctccctctggccccgagagcctcctcccaagtccggtccatctctggtcccggggaaaacacccacagtccgtgctgcattaatctgcctgacgctggtcctggtcgcctccgtcctgctgcaggccgtcctttatccccggtttatgggcaccatatcagatgtaaagaccaatgtccagttgctgaaaggtcgtgtggacaacatcagcaccctggattctgaaattaaaaagaatagtgacggcatggaggcagctggcgttcagatccagatggtgaatgagagcctgggttatgtgcgttctcagttcctgaagttaaaaaccagtgtggagaaggccaacgcacagatccagatcttaacaagaagttgggaagaagtcagtaccttaaatgcccaaatcccagagttaaaaagtgatttggagaaagccagtgctttaaatacaaagatccgggcactccagggcagcttggagaatatgagcaagttgctcaaacgacaaaatgatattctacaggtggtttctcaaggctggaagtacttcaaggggaacttctattacttttctctcattccaaagacctggtatagtgccgagcagttctgtgtgtccaggaattcacacctgacctcggtgacctcagagagtgagcaggagtttctgtataaaacagcggggggactcatctactggattggcctgactaaagcagggatggaaggggactggtcctgggtggatgacacgccattcaacaaggtccaaagtgtgaggttctggattccaggtgagcccaacaatgctgggaacaatgaacactgtggcaatataaaggctccctcacttcaggcctggaatgatgccccatgtgacaaaacgtttcttttcatttgtaagcgaccctatgtcccatcagaaccgtgacaggacaggctcccaagctcactctttgagctccaacgcttgttaaacatgaggaaatgcctctttcttccccagactccaggatgactttgcacgttaatttttcttgcttcaaaattgtcccacagtggcattctggagtccgtctgtcttggctggaaattctctgacgtcttggaggcagctggaatggaaaggagaattcaggttaaagtgggaggggtgggtagagaggatttagaagttccaattgccctgctaaggaggatcaagacccgtaatccggcataacaccctggggttttccactctttcagagaaacctcagcttcatcacatcaaagttactccagagcaaccaagcaattctcctgatattgtcatccagggcttttcttggccaaaccccctagaatttccatgtctctgcttagctgtgctggcagctagcagctggctgtgtttgcagtgcaaatagctctgttcttggaaatcctgctcatggtatgtccccagtggtttcttcatccacatcatctaaagcctgaacccgttcttctctggttcaagtcagtggctgacacggacttgtatctccttcagagctcggctggcacccagcctcccttctccttccactcccttagtacactggagtgccgagccctgccttccacccagcgtccatccagcccctgtcctcacctctccggcacctcctcctccttctgcatttcctatcttcctgtgtcttgtgcatgggaagcagccttcagtgccttcatgaattcaccttccagcttcctcagaataaaatgctgcctgggtcaaggaaaaaaaaaaaaaaaaaaaaaaaaaaaaaaaaaaaaaaaaaaaaaaaaaaaaaaaaaaaaaaaaaaaaaaaaaaaaaaaaaaaaaaaaaaaaaaaaaaaaaaaaaaaaaaaaaaaaaaaaaaaaaaaaaaaa

SEQ ID NO: 13779 - DNA, 6253 bp, Homo sapiens
ctccccgccagtccgggcgaacgcggccgggcccttggggaccgagtctcggcgccgccggggaacgggcgcgggccgcgccacagccggagcggggcagggccccgccaccgccttcttccgccggccccgccgccggccatgcattcttccggctcctctgactcccaaagccccggctggggcccggccagcccgagaaagacaggacggagtccagtgtgagaatggctataactttggaagaagctccgtggctgggctggctcttggtgaaagcactgatgaggtttgccttcatggtcgtcaacaacctggttgctattccatcctacatctgctatgtaattatacttcagccccttcgagtgctggacagtaagcggttctggtatatcgaaggaatcatgtataaatggcttttaggaatggtagcttcctggggatggtatgctggatatacagtgatggaatggggagaagatattaaagcagtttcaaaagatgaagcagtgatgttggtgaatcatcaggcaacaggagatgtgtgcacactgatgatgtgcctccaggacaaaggactggttgttgctcagatgatgtggttgatggatcatatttttaagtacacaaactttggaattgtttctctagttcatggagacttctttataagacagggaagatcttatcgtgaccaacagctgctgcttctcaagaagcacttagaaaataattacaggagcagagatcgaaaatggattgttttgtttccagaagggggcttcctcaggaagaggcgagaaacaagtcaggcatttgccaagaaaaataacttgccatttcttacaaatgttactctgccaaggtctggggcaacaaaaattattttgaatgcacttgtagcacaacagaaaaatggaagtccagcaggaggagatgctaaagaattagacagcaaatcaaaaggcctccagtggataatagatacaacgatagcttatcccaaagctgaacctatagatattcaaacctggatccttggatacaggaaaccaacagtcacacatgtacattacaggatctttccaattaaagatgtacccctggagactgatgaccttaccacttggctctatcagcggtttgttgaaaaagaagacctcttatcacatttttatgaaacaggagcttttccaccttccaagggccataaggaagctgtttccagggagatgaccctcagcaacttgtggatatttctcatacagtcttttgcatttttgtcaggctatatgtggtacaacatcattcagtatttttaccattgcctgttttaggaattgacgtggacttgtcaaggtcaccgtaggagttcagactttctttcataagtgtgcattattttacatgtgcaaatcagaatatatttaaaaaaaagcaaaagaaattcaatggatggattaatatttatccccctttgggatattttaaaatctactaaaatgaggattagtaatataatgacctgctaatatattttaagaacatgttttaaaaagatacactctatcacatatttaagcaaacatcacatttggagaagaggaaatcataaaatcatcctagaagactatctgagagaaattctgttgccaccagttatacttgacaatttagttgaagctcagaaagttatattcatccctcttagctgtagtctatattagggcagttctctagaacgcccacatttccaccaactcagtaaacttgaggggagctggttggcacctcgtgaagaactctttccctgtcgtttgcagtaacaaactccagtctgttgcagtaacaaactccagtctgttgcagtaacaaactctagaatattgacattctctgtgggggaaaagcagtgtccactggaccccttctggtactggatgtgttctttacaaaggctagctcagtccaacattgtgtttacatacactcgtgcttttccttatctgacttctcattttgtatcagaggcatatcataaattgataattttgcaaaatgcacttttttgagatgcagatatagcaaaggattagtaatatagcctgaaaacaaatgggagcatagcagtgtgtgaggttctcgagaactgtcttgtctctgtgtgtttatttgcctgccagtgctctccagcgccatcctgccctggacaccaccctgacgtgatgcctctattgcagctcagaggctttattttttccattttgacattggcactaaatgcatttggggatggttaaaacaaattactatagaacatttaaatgatcagtttaaggggaaataggctagtttatagaaaaataagagctagtggcttataatggtgacaggttctcatgtggcacccctaggacctgtgcagacagtagtctgttgaatcattacatcaaggagctgcccctgtcagggtgagtgtaattaggaacgataccagcacataaggctccccccaatctcttccagttgctttttcttttttctttttttttttagacaggtcttactctgtcacccaggctgtagtgcagtggcataatctcagctcactgcagtctctgcctcccgggttcgagcgattctcctgcctcagcctcccgagtagctgggactacaggcacccaccatcatgcttggctaatttttgtatttttagtagagatggggtttcaccatgttggccaggctggcctcgaactcctgacctcaggtgatctgcccacctcggcttcctaaagtgctgggattgcaggcgtgagccaccacgcccggcctccagttgcttttgaagagggtaaagtcaagtttctatttctagaaaacattttttagaaatttgttgcgatgtttgtacaatttacctcataagagaaccacacccttctccaaaagtgctggtactgcatcagtgagatgagtagggtttttgtttgggattgtaagactattaagatcctagtaagtcagtggtagtttactgtgatgtgagcattgtagattcccccgttgtcactaatcacacaacaattttgagaagtaggctataaaacaaaaaaaggttgctgttttctatttttaaataaaccaaaaaaaaacagaaaagatgtgaattttccccagttatgtgggaaaggtaaagcaacaccaaataaaagcccacagcagcttcatctttacgataactcagtgcatatgtgaaagagaatgatgcattaactgaaatacctcattgaatattatactactactggtaaaatgcagaagacagtgttaatgtgtttggtttgggtactggttgttataaaatgcaatttttttttaaatctaagcatttcattatgtgttctacagtgtcggtgaataaatgaaaccaatctcaatttagaggtatggatgatgacagaaagcccaatagaagcttaatgatgcttctgtttgaggcccagcaagcaccactaaattactggatgaaatgaaattgttcacttgagggattagtcaaccatctgggggagaagttgctcactgtcaaatacagcatgcacggtcctagctgatagaccttttcctcattgctacagcaagccacagggtagagtgaccagttctcctatccaaaaataaatgcgaacatgcatacataaatgtggctgagggccacttttgccatcactgtgctccaaaggaacatgatattgttaaatatactgtacacattaaactattctataagatgctttacttttcaagtacggtgtcattttcacagtctccagggtgacaaatgccaatagatatgtgagttaatttttttaaatatctccgtgagttgtaaatagatgtgtatttgatctgccctatccttctttgattctttaacatgttctctctcttttgtttgcaaaatatgtttgaaagcattggtagtgctttccttatcagtaactggagttctcctgcttgcactagagaaggtaaagagagaatcagtattcttatatggcaatctggggaagcagcaatatgccactgtacaaaactgaagaaaagttcctaatttgtactttgtgaagggagatgaaaggacgtttaaagtatatatattttgtcaagaggaaagaagataaaactatgccagttttatatcaatagcttgtagaagctcagctcttcttggtcttggctagactgcctagattcccacagcagacaaggttgagaatccattgctggaatcttggtattgatgagttacagtgatggaacatgtgcttggccacaggcaggtccagtcactgcaaaagtgaccaagccagcaggtcacccttaacttcagaaacaattattggtggtgaactgtacttaaattgcagagaaacctgtaagtaatggaaggtaaagaaaaattacagaatggaaaataatattttgggcaagcaaacaaattcactgagaattccaaaagtatattaaaaaagaagatagctatgagttcagatctatcttattggtctttaatattacaaccaatccttaactttccactataaaggaaggattactagattgattactttctgggtagataatctggtaataaatgataggtaaatcaaaaattacttttatttaggagtttgaattcttactctcatcagacattttttttctagggacgcttactaattaaatgatttaagttgtttcttaggggttttttgcctatatatttatgactgtgttaatgagtagtgaaatgatgcggaaagacagctatcaggaagaggaaatacagaagcctgaataatctatgggttagaaaagcatccctgaataatcaaaaattggcagtattggcattgttctcaagcctttttatgaaaatgaaatctgaaatcaccaaatgtaaacctgggaacattattctagtgttgctgtcttggattcatgttaagaagcgtcttcattctttgctcatgttgcccacttcttgtggatttgtctgagtgttttttgacaatcacttccttaaagactcttctgaactagttggacctggttaatcatagagagtagcctttaatcatggatagtcttcttggattatttttatatttgaaaagaaaatgttttatttgcactactgagtaggaagagttaattgttttctttgttctttttttgaagtcattacacaggacttcactccagagttaccattatgagtgtgttcagctctggtccacagaggatggataaaaatggtttgttatgtttttttgctctgcagtgctatgagccttatatctgttaatatgaaggacaaagtcaaaagcagcagtggatagcaggaagggtagagactaatatgtttgggaccaaaaccatctaagttagagatttccagatcacagaggggctgggcattctctggagcagtcattggttggtgctttattgtaatcattttgcgccaatccccaacaattaggaactggaccctgggaataagctgagggtgctgaactgttggggaagggtgactgtagccacatggaagataaaatatgggtttttctgcaaaatttccatctgagggtttttacatttaatatttttttaagacagtttaaagagcaaacgttttttaagtgtattctagttgcaaagtatgcacacatatcttgaatggctttatttttattgtgtaaaactgttgaacacatgactgtgatgcacaaattctttacgtgtaaggagtctatgcattttacagtaacttattttatgatcgggtgatgagacagttatactttcaactgccattatttttattaagtgctttcattttctttacagttattataaaattgtatttattttatacagatgggttttcattttcctgatgctgtaatgtttacttcagcttgttgacctttctttgtgttatctgcatgttgtaacgtgtgataagaatgaatgtaaaggctgtggcaactgtaattaatttttgtaaagggctggtcacacgtggatctggtttatgaatgcatttgggatgattttggtaaccagatcaccttttcagaaatttagatgtgaacaccaaaagaagcattttctcaacaaaaattaatagctggttctattttttttaaacctagaaaaaataaagttgatttttttc

SEQ ID NO: 13780 - DNA, 2031 bp, Homo sapiens
ccggctccccgcactctccgggtccacgcatcgtcctcccgcgcgcccgcccgcccatggccgggaaggtgcggtcactgctgccgccgctgctgctggccgccgcgggcctcgccggcctcctactgctgtgcgtccccacccgcgacgtccgggagccgcccgccctcaagtatggcatcgtcctggacgctggttcttcacacacgtccatgtttatctacaagtggccggcagacaaggagaacgacacaggcattgtgggccagcacagctcctgtgatgttccaggtgggggcatctccagctatgcagacaacccttctggggccagccagagtcttgttggatgcctcgaacaggcgcttcaggatgtgcccaaagagagacacgcgggcacacccctctacctgggagccacagcgggtatgcgcctgctcaacctgaccaatccagaggcctcgaccagtgtgctcatggcagtgactcacacactgacccagtacccctttgacttccggggtgcacgcatcctctcgggccaggaagagggggtgtttggctgggtgactgccaactacctgctggagaacttcatcaagtacggctgggtgggccggtggttccggccacggaaggggacactgggggccatggacctggggggtgcctctacccagatcacttttgagacaaccagtccagctgaggacagagccagcgaggtccagctgcatctctacggccagcactaccgagtctacacccacagcttcctctgctatggccgtgaccaggtcctccagaggctgctggccagcgccctccagacccacggcttccacccctgctggccgaggggcttttccacccaagtgctgctcggggatgtgtaccagtcaccatgcaccatggcccagcggccccagaacttcaacagcagtgccagggtcagcctgtcagggagcagtgacccccacctctgccgagatctggtttctgggctcttcagcttctcctcctgccccttctcccgatgctctttcaatggggtcttccagcccccagtggctgggaactttgtggccttctctgccttcttctacactgtggactttttgcggacttcgatggggctgcccgtggccaccctgcagcagctggaggcagccgcagtgaatgtctgcaaccagacctgggctcagcagctgctgagtcgcggctacggcttcgacgagcgcgccttcggcggcgtgatcttccagaagaaggccgcggacactgcagtgggctgggcgctcggctacatgctgaacctgaccaacctgatccccgccgacccgccggggctgcgcaagggcacagacttcagctcctgggtcgtcctcctgctgctcttcgcctccgcgctcctggctgcgcttgtcctgctgctgcgtcaggtgcactccgccaagctgccaagcaccatttaggggccgacgggggcagctgccccatccctcccccaacccctgtatccccaccccgtactcccacccctcccacaacccctgtacctcccacccctgtatccccacccctccacccacccctctcccaacctctctccccgcccctgtatcctgcattcctccacccaccctctatcccccaccgctccaccccaccactgtcttctccatccttccaccccaccctcagcgtctctgcccctaaggcagcccaggaaataggaactgagactctggtacccacaggagcctgggtgggcaaagagcgctcaatccagctccttgaacccctccagcccgcttcagcctgggcatcactgcaggccccgtgctcctcctcctcctcctcagggctgggtctccagagagtggggccttggtcctgagaatcagcccttagaggctccttctgtgtagtctgggtctgtactggggagggtcacagcccacgggctggcagccagcccagcacctacttgtaaaaattttgtaataaaaagtttttcctagagacgtg

SEQ ID NO: 13781 - DNA, 2941 bp, Homo sapiens
ctccaccgccgccgccgccgccgccgctgccgctgccgctgccgcacctccgtagctgactcggtactctctgaagatggcagaagctcaccaagctgtggcctttcagttcacggtcactccggacgggattgacctgcggctgagccatgaagctcttagacaaatctatctctctggacttcattcctggaaaaagaagttcatcagattcaagaacggcatcatcactggcgtgtacccggcaagcccctccagttggcttatcgtggtggtgggcgtgatgacaacgatgtacgccaagatcgacccctcgttaggaataattgcaaaaatcaatcggactctggaaacggccaactgcatgtccagccagacgaagaacgtggtcagcggcgtgctgtttggcaccggcctgtgggtggccctcatcgtcaccatgcgctactccctgaaagtgctgctctcctaccacgggtggatgttcactgagcacggcaagatgagtcgtgccaccaagatctggatgggtatggtcaagatcttttcaggccgaaaacccatgttgtacagcttccagacatcgctgcctcgcctgccggtcccggctgtcaaagacactgtgaacaggtatctacagtcggtgaggcctcttatgaaggaagaagacttcaaacggatgacagcacttgctcaagattttgctgtcggtcttggaccaagattacagtggtatttgaagttaaaatcctggtgggctacaaattacgtgagcgactggtgggaggagtacatctacctccgaggacgagggccgctcatggtgaacagcaactattatgccatggatctgctgtatatccttccaactcacattcaggcagcaagagccggcaacgccatccatgccatcctgctttacaggcgcaaactggaccgggaggaaatcaaaccaattcgtcttttgggatccacgattccactctgctccgctcagtgggagcggatgtttaatacttcccggatcccaggagaggagacagacaccatccagcacatgagagacagcaagcacatcgtcgtgtaccatcgaggacgctacttcaaggtctggctctaccatgatgggcggctgctgaagccccgggagatggagcagcagatgcagaggatcctggacaatacctcggagcctcagcccggggaggccaggctggcagccctcaccgcaggagacagagttccctgggccaggtgtcgtcaggcctattttggacgtgggaaaaataagcagtctcttgatgctgtggagaaagcagcgttcttcgtgacgttagatgaaactgaagaaggatacagaagtgaagacccggatacgtcaatggacagctacgccaaatctctactacacggccgatgttacgacaggtggtttgacaagtcgttcacgtttgttgtcttcaaaaacgggaagatgggcctcaacgctgaacactcctgggcagatgcgccgatcgtggcccacctttgggagtacgtcatgtccattgacagcctccagctgggctatgcggaggatgggcactgcaaaggcgacatcaatccgaacattccgtaccccaccaggctgcagtgggacatcccgggggaatgtcaagaggttatagagacctccctgaacaccgcaaatcttctggcaaacgacgtggatttccattccttcccattcgtagcctttggtaaaggaatcatcaagaaatgtcgcacgagcccagacgcctttgtgcagctggccctccagctggcgcactacaaggacatgggcaagttttgcctcacatacgaggcctccatgacccggctcttccgagaggggaggacggagaccgtgcgctcctgcaccactgagtcatgcgacttcgtgcgggccatggtggacccggcccagacggtggaacagaggctgaagttgttcaagttggcgtctgagaagcatcagcatatgtatcgcctcgccatgaccggctctgggatcgatcgtcacctcttctgcctttacgtggtgtctaaatatctcgctgtggagtcccctttccttaaggaagttttatctgagccttggagattatcaacaagccagacccctcagcagcaagtggagctgtttgacttggagaataacccagagtacgtgtccagcggagggggctttggaccggttgctgatgacggctatggtgtgtcgtacatccttgtgggagagaacctcatcaatttccacatttcttccaagttctcttgccctgagacggattctcatcgctttggaaggcacctgaaagaagcaatgactgacatcatcactttgtttggtctcagttctaattccaaaaagtaattccactggagctgctgggaaggaaaacgagctcttctgatgcaaaccaaatgaaaaataggcattaatcctgaccttagctcgggatgaaacactgctcttaaaaaaactcagttttccttccagaaaatgtgggtgtttttttttcctagaacagtatctctcccctgtgaagcataaccccactacttccagacttgccctcccttgggggacatctgataaagtctcccctgatgtctccgcatcggcttggatttattaagggatgcaaatcttgttgagttaatgaaggaattagtagggttgtggcttcacacacagtggaatggaaatggtgtgctttctcagtggcaaccgaaggcctagtgcttaagggcatttagcatcatccaagcagggtaaacttttgttttgttaaaagaaaaatgtgttattcaagttggtgtccccagttgtagctaacacatctggaatgcactaaccaaaatgctgtgctttggagacctgcttttgtcaccgtgggtaaccgttcccgtctgg

SEQ ID NO: 13782 - DNA, 6293 bp, Homo sapiens
atcatgggaccgggtgagcgctgagaatcgcggccgcagccatcagccctggagatgaccaggagcggccactgctgagaactatgtggagagaggctgcgagccctgctgcagagcctccggctgggatagccgccccccgtgggggcgatgcggacagcgcgggacagccaggggagcgcgctggggccgcagcatgcgggaacccgctaaacccggtggctgctgaggcggccgagatgctcgtgcgcgcagcgcgccccactgcatcctcgaccttctcgggctacagggaccgtcagtggcgactatgggcagagtgggctattggaccctgctggtgctgccggcccttctggtctggcgcggtccggcgccgagcgcggcggcggagaagggtccccccgcgctaaatattgcggtgatgctgggtcacagccacgacgtgacagagcgcgaacttcgaacactgtggggccccgagcaggcggcggggctgcccctggacgtgaacgtggtagctctgctgatgaaccgcaccgaccccaagagcctcatcacgcacgtgtgcgacctcatgtccggggcacgcatccacggcctcgtgtttggggacgacacggaccaggaggccgtagcccagatgctggattttatctcctcccacaccttcgtccccatcttgggcattcatgggggcgcatctatgatcatggctgacaaggatccgacgtctaccttcttccagtttggagcgtccatccagcagcaagccacggtcatgctgaagatcatgcaggattatgactggcatgtcttctccctggtgaccactatcttccctggctacagggaattcatcagcttcgtcaagaccacagtggacaacagctttgtgggctgggacatgcagaatgtgatcacactggacacttcctttgaggatgcaaagacacaagtccagctgaagaagatccactcttctgtcatcttgctctactgttccaaagacgaggctgttctcattctgagtgaggcccgctcccttggcctcaccgggtatgatttcttctggattgtccccagcttggtctctgggaacacggagctcatcccaaaagagtttccatcgggactcatttctgtctcctacgatgactgggactacagcctggaggcgagagtgagggacggcattggcatcctaaccaccgctgcatcttctatgctggagaagttctcctacatccccgaggccaaggccagctgctacgggcagatggagaggccagaggtcccgatgcacaccttgcacccatttatggtcaatgttacatgggatggcaaagacttatccttcactgaggaaggctaccaggtgcaccccaggctggtggtgattgtgctgaacaaagaccgggaatgggaaaaggtgggcaagtgggagaaccatacgctgagcctgaggcacgccgtgtggcccaggtacaagtccttctccgactgtgagccggatgacaaccatctcagcatcgtcaccctggaggaggccccattcgtcatcgtggaagacatagaccccctgaccgagacgtgtgtgaggaacaccgtgccatgtcggaagttcgtcaaaatcaacaattcaaccaatgaggggatgaatgtgaagaaatgctgcaaggggttctgcattgatattctgaagaagctttccagaactgtgaagtttacttacgacctctatctggtgaccaatgggaagcatggcaagaaagttaacaatgtgtggaatggaatgatcggtgaagtggtctatcaacgggcagtcatggcagttggctcgctcaccatcaatgaggaacgttctgaagtggtggacttctctgtgccctttgtggaaacgggaatcagtgtcatggtttcaagaagtaatggcaccgtctcaccttctgcttttctagaaccattcagcgcctctgtctgggtgatgatgtttgtgatgctgctcattgtttctgccatagctgtttttgtctttgaatacttcagccctgttggatacaacagaaacttagccaaagggaaagcaccccatgggccttcttttacaattggaaaagctatatggcttctttggggcctggtgttcaataactccgtgcctgtccagaatcctaaagggaccaccagcaagatcatggtatctgtatgggccttcttcgctgtcatattcctggctagctacacagccaatctggctgccttcatgatccaagaggaatttgtggaccaagtgaccggcctcagtgacaaaaagtttcagagacctcatgactattccccaccttttcgatttgggacagtgcctaatggaagcacggagagaaacattcggaataactatccctacatgcatcagtacatgaccaaatttaatcagaaaggagtagaggacgccttggtcagcctgaaaacggggaagctggacgctttcatctacgatgccgcagtcttgaattacaaggctgggagggatgaaggctgcaagctggtgaccatcgggagtgggtacatctttgccaccaccggttatggaattgcccttcagaaaggctctccttggaagaggcagatcgacctggccttgcttcagtttgtgggtgatggtgagatggaggagctggagaccctgtggctcactgggatctgccacaacgagaagaacgaggtgatgagcagccagctggacattgacaacatggcgggcgtattctacatgctggctgccgccatggcccttagcctcatcaccttcatctgggagcacctcttctactggaagctgcgcttctgtttcacgggcgtgtgctccgaccggcctgggttgctcttctccatcagcaggggcatctacagctgcattcatggagtgcacattgaagaaaagaagaagtctccagacttcaatctgacgggatcccagagcaacatgttaaaactcctccggtcagccaaaaacatttccagcatgtccaacatgaactcctcaagaatggactcacccaaaagagctgctgacttcatccaaagaggttccctcatcatggacatggtttcagataaggggaatttgatgtactcagacaacaggtcctttcaggggaaagagagcatttttggagacaacatgaacgaactccaaacatttgtggccaaccggcagaaggataacctcaataactatgtattccagggacaacatcctcttactctcaatgagtccaaccctaacacggtggaggtggccgtgagcacagaatccaaagcgaactctagaccccggcagctgtggaagaaatccgtggattccatacgccaggattcactatcccagaatccagtctcccagagggatgaggcaacagcagagaataggacccactccctaaagagccctaggtatcttccagaagagatggcccactctgacatttcagaaacgtcaaatcgggccacgtgccacagggaacctgacaacagtaagaaccacaaaaccaaggacaactttaaaaggtcagtggcctccaaataccccaaggactgtagtgaggtcgagcgcacctacctgaaaaccaaatcaagctcccctagagacaagatctacactatagatggtgagaaggagcctggtttccacttagatccaccccagtttgttgaaaatgtgaccctgcccgagaacgtggacttcccggacccctaccaggatcccagtgaaaacttccgcaagggggactccacgctgccaatgaaccggaaccccttgcataatgaagaggggctttccaacaacgaccagtataaactctactccaagcacttcaccttgaaagacaagggttccccgcacagtgagaccagcgagcgataccggcagaactccacgcactgcagaagctgcctttccaacatgcccacctattcaggccacttcaccatgaggtcccccttcaagtgcgatgcctgcctgcggatggggaacctctatgacatcgatgaagaccagatgcttcaggagacaggtaacccagccaccggggagcaggtctaccagcaggactgggcacagaacaatgcccttcaattacaaaagaacaagctaaggattagccgtcagcattcctacgataacattgtcgacaaacctagggagctagaccttagcaggccctcccggagcataagcctcaaggacagggaacggcttctggagggaaatttttacggcagcctgtttagtgtcccctcaagcaaactctcggggaaaaaaagctcccttttcccccaaggtctggaggacagcaagaggagcaagtctctcttgccagaccacacctccgataaccctttcctccactcccacagggatgaccaacgcttggttattgggagatgcccctcggacccttacaaacactcgttgccatcccaggcggtgaatgacagctatcttcggtcgtccttgaggtcaacggcatcgtactgttccagggacagtcggggccacaatgatgtgtatatttcggagcatgttatgccttatgctgcaaataagaataatatgtactctacccccagggttttaaattcctgcagcaatagacgcgtgtacaagaaaatgcctagtatcgaatctgatgtttaaaaatcttccattaatgttttatctatagggaaatacacgtaatggccaatgttctggagggtaaatgttggatgtccaatagtgccctgctaagaggaagaagatgtagggaggtattttgttgttgttgttgttggctcttttgcacacggcttcatgccataatcttccactcaaggaatcttgtgaggtgtgtgctgagcatggcagacaccagataggtgagtccttaaccaaaaataactaactacataagggcaagtctccgggacatgcctactgggtatgttggcaataatgatgcattggatgccaatggtgatgttatgatttcctatattccaaattccattaaggtcagcccaccatgtaattttctcatcagaaatgcctaatggtttctctaatacagaataagcaatatggtgtgcatgtaaacctgacacagacaaaataaaaacagttaagaatgcatctgcactgtagtcggatttgaacatgtgcaagagattaggaagtttggctcgtaacagtttcagctttcttgttatgccttccatcacagcccaggctcaccccaagaactccaggctcccctaaagaatagcaaatcagtgtgttcgtgatgactgtgctaccttcattatagttcatttccaagacacatctggagccaaaggcccgagggaccctcaggtggggagagctacaggaatctctttggatgttgatgtgtgtttctctctaccctcggcttcgatggtcttgttcagagctgcataaactaacacatttatgtctccgagatctaagtgtggatcttctgtctgtgacacagtggccattgtagtttatcccgaagacgcctatgtacgtaagtttgcatttcctcccttctggtgatgactcagggttgtatagtatctgttaccccttccctcccagagtaaccataactcgttccgtttccaaacagccatggtggtgtccaattagctgtgtatcgctcttcccagagttgttaatgtggtgacatgcaccaacagccgtatgtgtactgtgatctgtaagaagtacaatgccatctgtctgccgaaggctagcatggttttaggtttatcttccttcacatccagaaattctgttggacactcacttccaccccaaactcctcaaatcaaaagccttcaaaacacgaggcactcttggatctaccctgagtatcctccaaactgtggatacagtttagtgagacaagcaatttctcccttctgagttattctctctgttggtggcaaaccacttcatagcaccaacagagatgtaggaaaaattcctcaaagtatttgtcatttctgagtcgcctgcattatcccattcttattctcctcaaacctgtgcatatatgacatgaaatgatatccattttttttttaagttagaaacagagaggggaatacttatgcatggggagcctgttagcacagtgcctgccacaaaaacaagtgcccccgacaagatagttgctatgttatgacactttctcagatcaggattttctagtttaaaaattaaatatcataaaacg

SEQ ID NO: 13783 - DNA, 900 bp, Homo sapiens
atgataacttttctgcccatcattttttccattctaatagtggttacatttgtgattggaaattttgctaatggcttcatagcattggtaaattccattgagtggtttaagagacaaaagatctcttttgctgaccaaattctcactgctctggcagtctccagagttggtttactctgggtattagtattaaattggtatgcaactgagttgaatccagcttttaacagtatagaagtaagaattactgcttacaatgtctgggcagtaatcaaccatttcagcaactggcttgctactagcctcagcatattttatttgctcaagattgccaatttctccaaccttatttttcttcacttaaagaggagagttaagagtgttgttctggtgatactattggggcctttgctatttttggtttgtcatctttttgtgataaacatgaatcagattatatggacaaaagaatatgaaggaaacatgacttggaagatcaaactgaggagtgcaatgtacctttcaaatacaacggtaaccatcctagcaaacttagttcccttcactctgaccctgatatcttttctgctgttaatctgttctctgtgtaaacatctcaaaaagatgcagctccatggcaaaggatctcaagatcccagcatgaaggtccacataaaagctttgcaaactgtgacctccttcctcttgttatgtgccatttactttctgtccataatcatgtcagtttggagttttgagagtctggaaaacaaacctgtcttcatgttctgcgaagctattgcattcagctatccttcaacccacccattcatcctgatttggggaaacaagaagctaaagcagacttttctttcagttttgtggcaaatgaggtactga

SEQ ID NO: 13784 - DNA, 4753 bp, Homo sapiens
atgctgctgctaggggtggtgggagcagccgtgggacgcgtggccgggagcgggggtgacagcctgggattccgggggcttctcttccttgtcctcctcctctcctctctattcccagtgtggccgtggctgacactaaagactttgtagccatcaacccgagtgcagtttcgatggaaaatgaaggttgcacgttttcaaaaaatacctaatggtgaaaatgagacaatgattcctgtattgacatcaaaaaaagcaagtgaattaccagtcagtgaagttgcaagcattctccaagctgatcttcagaatggtctaaacaaatgtgaagttagtcataggcgagcctttcatggctggaatgagtttgatattagtgaagatgagccactgtggaagaagtatatttctcagtttaaaaatccccttattatgctgcttctggcttctgcagtcatcagtgttttaatgcatcagtttgatgatgccgtcagtatcactgtggcaatacttatcgttgttacagttgcctttgttcaggaatatcgttcagaaaaatctcttgaagaattgagtaaacttgtgccaccagaatgccattgtgtgcgtgaaggaaaattggagcatacacttgcccgagacttggttccaggtgatacagtttgcctttctgttggggatagagttcctgctgacttacgcttgtttgaggctgtggatctttccattgatgagtccagcttgacaggtgagacaacgccttgttctaaggtgacagctcctcagccagctgcaactaatggagatcttgcatcgagaagtaacattgcctttatgggaacactggtcagatgtggcaaagcaaagggtgttgtcattggaacaggagaaaattctgaatttggggaggtttttaaaatgatgcaagcagaagaggcaccaaaaacccctctgcagaagagcatggacctcttaggaaaacaactttccttttactcctttggtataataggaatcatcatgttggttggctggttactgggaaaagatatcctggaaatgtttactattagtgtaagtttggctgtagcagcaattcctgaaggtctccccattgtggtcacagtgacgctagctcttggtgttatgagaatggtgaagaaaagggccattgtgaaaaagctgcctattgttgaaactctgggctgctgtaatgtgatttgttcagataaaactggaacactgacgaagaatgaaatgactgttactcacatatttacttcagatggtctgcatgctgaggttactggagttggctataatcaatttggggaagtgattgttgatggtgatgttgttcatggattctataacccagctgttagcagaattgttgaggcgggctgtgtgtgcaatgatgctgtaattagaaacaatactctaatggggaagccaacagaaggggccttaattgctcttgcaatgaagatgggtcttgatggacttcaacaagactacatcagaaaagctgaatacccttttagctctgagcaaaagtggatggctgttaagtgtgtacaccgaacacagcaggacagaccagagatttgttttatgaaaggtgcttacgaacaagtaattaagtactgtactacataccagagcaaagggcagaccttgacacttactcagcagcagagagatgtgtaccaacaagagaaggcacgcatgggctcagcgggactcagagttcttgctttggcttctggtcctgaactgggacagctgacatttcttggcttggtgggaatcattgatccacctagaactggtgtgaaagaagctgttacaacactcattgcctcaggagtatcaataaaaatgattactggagattcacaggagactgcagttgcaatcgccagtcgtctgggattgtattccaaaacttcccagtcagtctcaggagaagaaatagatgcaatggatgttcagcagctttcacaaatagtaccaaaggttgcagtattttacagagctagcccaaggcacaagatgaaaattattaagtcgctacagaagaacggttcagttgtagccatgacaggagatggagtaaatgatgcagttgctctgaaggctgcagacattggagttgcgatgggccagactggtacagatgtttgcaaagaggcagcagacatgatcctagtggatgatgattttcaaaccataatgtctgcaatcgaagagggtaaagggatttataataacattaaaaatttcgttagattccagctgagcacgagtatagcagcattaactttaatctcattggctacattaatgaactttcctaatcctctcaatgccatgcagattttgtggatcaatattattatggatggacccccagctcagagccttggagtagaaccagtggataaagatgtcattcgtaaacctcctcgcaactggaaagacagcattttgactaaaaacttgatacttaaaatacttgtttcatcaataatcattgtttgtgggactttgtttgtcttctggcgtgagctacgagacaatgtgattacacctcgagacacaacaatgaccttcacatgctttgtgttttttgacatgttcaatgcactaagttccagatcccagaccaagtctgtgtttgagattggactctgcagtaatagaatgttttgctatgcagttcttggatccatcatgggacaattactagttatttactttcctccgcttcagaaggtttttcagactgagagcctaagcatactggatctgttgtttcttttgggtctcacctcatcagtgtgcatagtggcagaaattataaagaaggttgaaaggagcagggaaaagatccagaagcatgttagttcgacatcatcatcttttcttgaagtatgatgcatattgcattattttatttgcaaactaggaattgcagtctgaggatcatttagaagggcaagttcaagaggatatgaagatttgagaactttttaactattcattgactaaaaatgaacattaatgttaaagacttaagactttaacctgctggcagtcccaaatgaaattatgcaactttgatatcatattccttgatttaaattggcttttgtgattgagtgaaactttataaagcatatggtcagttatttaattaaaaaggcaaaacctgaaccaccttctgcacttaaagaagtctaacagtacaaatacactatctatcttagatagatatatttttttttatttttaaatattgtactatttatggtggtggggctttcttactaatacacaaataaatttaatcatttcaaaggcattctatttggtttagaagttgattcccaggagtgccatatttcagctactgtatttcctttttcttgtaatgtaagcagctcagataccatgtgctatcatttttgtatcaagttttttgcacaggatgtgaccactgtcagatcactgttcttttctttctttttgtgattgaaaagcctatactacaatttgaagtaaatttttgtttttcttagtaagtgtaaatggttgctttatttttattttaaaaaggtatgtctttggtttggcagaattcatgcagggctatcaagtggtgttctagggtaacagtgtccataattaacgcttagtcatagagtcaaaaacatttaagactgattgggttgaagtttataataaattatattaacatgtcttcctttttgaggtaaagatatatactttgtcaaatatcattttgtcatcctctaaatataaatccaaatacctcagctaagtaattctattttattatttttactgttatgtatgtttttaatcatatttcttaggaagtataggctactggacttagaataaaaagtccccaaacccaaacaaatggtttatgaaccagagtatatgtggaagattctttgctggtcttgctctgtgtgcatctgaagcttctttggcctagattttagcacaaacctgagtatatctcttctactttcatcatgtgttctgtaccttctttttgtttcattgggcatgctagggaaataggtggattttgtgtgtaatgccatcagtttttatgaaagcttgatgaggtataggtcatttgttttgagtatgtgggccagaaatttaaaattagaaatttgtttttctgttgagtatataaacaaaaattggtcccaattctaacaggtttaatccttcttgaagccaataagttttatcttttataatctgtcaggatgaaccactccttagcttttatccaatattaaactgcaagtgttagcactgaaatattgtcattgatagggaaaatatctattctttgagtcattgttactgaggcagttgagtgtaaggagctggctgcagtttattctacttaaccctttaaggctgaattgtcaaatgtacattgttccatgtcgttagatggaacatggaagccattgtctaatcaactctatcattagtgacttgatgtctcataccttaattttgtaatgatttttattctctgttacaaagacttgaaatacgtattaaatgcacgttaatgttttgctttgcattttaggttcagattatgacttgattgaaataaatgtgcctatacattcatttgctttgtactataaaaataaaaatgatttcttaagttaaaaaaaaaaaaaaa

SEQ ID NO: 13785 - DNA, 8044 bp, Homo sapiens
gtctctccaagggaatgaaaggtgaggggagcgtgagtgcaggcatgatgggaatctccgtgacttgtgaaccaaggactgggttttgctctggaagcctgtcctgattgcttctgtaatctggcgctatgcatccggatcttggacccttatgtacactgctgtatgttactcttacaattctgtgctcttctgtgagttcagacttggcaccttattttacttctgagccgctctctgctgtccagaaacttggtggacctgtagtactgcattgttctgctcaacctgtgaccactcgtatctcatggctgcataacggaaaaacattggatggaaacctggaacatattaagattcatcaggggactctgacaattctttctctcaactcctctcttttgggttactaccagtgccttgccaacaatagcatcggtgccattgtgagtggccctgcgacagtatctgtggcagttcttggtgattttggttcatccacaaagcatgttattacagcagaagaaaaaagtgctggtttcattggctgcagggtaccggagagtaaccccaaagctgaggtgcgctataaaatccggggaaaatggctggaacattccacagagaattacttaatccttccatcaggaaatcttcagattttgaatgtatccttagaggacaagggatcatacaaatgtgcagcttataatcctgtcacacatcaattaaaagttgaacctattggccgaaagctccttgtgagtcgtccttcttcagatgatgttcacattcttcaccccacccattcacaggcattagctgttctttctcgtagccctgtaaccttggagtgtgtggtgagtggggtcccggctcctcaagtgtattggctaaaggacgggcaggacattgcaccaggaagcaactggagaaggttgtattctcatcttgccactgatagcgttgacccggcggactccggaaactattcctgcatggcgggaaacaagtctggagatgtaaaatatgtgacttacatggttaatgtacttgaacatgcttccatttctaaaggactacaggatcagatagtgtctctgggtgccacagtacactttacctgcgacgttcatgggaacccagcccccaactgtacctggtttcacaatgcacagcctattcatccttctgcacgacatctaactgcaggaaacggactgaaaatcagtggggttactgtggaagatgttgggatgtatcagtgtgtagcagataatgggattggatttatgcactctactggaagacttgaaattgaaaatgacggtggattcaagccagttataattacggcaccagtaagtgcaaaggttgcagacggagactttgttactctgtcctgcaatgccagtgggctgccggttccggtcattcgttggtatgacagccatggattgataaccagccatccatctcaagtcctgagatcgaaatcccgaaaatcacagttatcaagacctgagggcttgaacctggagcctgtgtacttcgtcctgtcccaagctggtgcaagctctctccatattcaggctgtgactcaggaacatgcggggaaatacatctgcgaagctgcaaatgaacatggtaccacacaggcagaagcatctctcatggttgttccttttgaaacaaatacaaaagcagagacagtcacacttcctgatgctgctcagaatgatgacagaagtaagagagatggttcagaaactgggttactgagctcatttccggtgaaggtccatcccagtgcagtggaatcagcaccagagaaaaacgccagcggcatctctgttcctgatgcccccatcatactgagccccccacagacccacacaccagacacgtacaacctggtgtggagggcaggcaaggatggtgggctgcccatcaatgcttactttgtgaagtatcgaaagctggatgatggggttggcatgctgggaagctggcacacggttcgagtcccaggaagtgaaaatgagctccatttagctgagctggagccatctagtctttatgaagtcttgatggtagcaagaagcgcagcaggtgaaggccaacctgccatgcttaccttccgaaccagcaaagaaaaaacagcgtcatcaaaaaacacccaggcatcctctccacccgtgggcatccctaagtatcccgttgtttcagaggctgcaaacaacaattttggagtggtacttacagattcctctaggcacagtggagttccagaggcaccagatcggcctaccatctccactgcatcagagacatcagtctatgtcacttggattcctcgggcaaacgggggttctccaatcactgccttcaaagtcgaatataaacggatgaggaccagcaattggctggtggcagctgaagacatccctccttccaaactttcagtggaagttcgtagtttagaaccaggttcaacatacaaatttagggtcattgccatcaaccattatggtgagagttttcggagttcagcatctcgtccttatcaagtggttgggttccccaatcgcttttccagccgtccaataactggacctcacattgcatacacagaggctgtcagcgatactcagatcatgctaaagtggacgtacattccatcaagtaacaataacactcccattcaaggattttatatctattaccgaccaacagatagtgacaatgacagtgattacaagagggatgttgtagaaggttcaaagcagtggcacatgattggccacctgcagccagaaacctcctatgacattaaaatgcaatgcttcaatgaaggaggagaaagtgaatttagcaatgtgatgatctgcgagactaaagtgaaacgtgttcctggagcttctgaatatcctgtcaaagacttgagtacccctccaaattctttgggaagtggaggaaatgtggggcctgcaaccagccctgccagaagcagtgacatgttatatctgatcgttggctgtgtgctgggcgtcatggtcctcattctgatggttttcattgcaatgtgcctgtggaagaatcgccagcagaataccatacaaaaatatgacccaccaggatatctctaccaaggatcagatatgaacgggcagatggtggactacaccactctctcaggagcaagtcagataaatggaaatgttcacggaggcttcctaaccaatggcggtctcagcagtggctattcccaccttcaccataaggtccccaatgcagtcaatggaattgtgaatgggagcctaaatggagggctttactccgggcacagcaactctctaaccaggacacacgtggattttgaacatcctcatcatctagtgaatggtggtggaatgtacacggccgtgcctcagattgaccctctggagtgtgttaactgccgaaattgtcgaaacaacaataggtgtttcaccaaaaccaacagcactttcagcagcagccctcctcctgtggtccctgtggtagcaccttatcctcaggatggtttggaaatgaagcccctcagtcacgtgaaggtgcctgtatgcctgacttccgcagtccctgattgtggccagttgccggaggagagcgtcaaggacaatgtggaaccagtccctactcagcgtacctgctgtcaggacattgtaaatgacgtcagctctgatggctcagaagatccagcagagttcagcagaggagacagctgtgcccattcagaaacagagatcaacattgtaagttggaatgctcttattttgccacctgtccccgagggctgtgctgagaagacaatgtggtctccacctggcattcctttagacagcccgacagaggtccttcagcagccccgggaaacctgaggacatgcaaacaaccagtcatgttccaacttcaagccggtaactgcacacaacaggcctgggagcgaactgtgtgaaggaccttaattcaaatcagagaaaatcattatttatttttttgtagtagtaatgtcatatgaatgtatcttaaaacgtgtgcccttttatattatttatgccttaaatgttttcttccccattccttcctccccctcggtaggaaacaaccttgttttgcatagtattcagtcacctggagggcagaggggtccttccatgttttctaacagctatagtgacagcaagagctcctcatgcaaaggatcccatctcttggctgcttcggctaggagggaatgcaggggcccgttgaaggttgccaccagctgggttttcaggtggaaaatggtctttcaatagtgtattctcagacttttttttgtttgttttttgagatggagtcttgctgtcatccaggctggagtgcaatggctcgatcttggctcactgcaacctccgcctcccaggttcaagcaattctcccgcctcagcctcctgagtagctgggactacaggcacctgccaccacgtccagctaattgtcttgtatttttattagagacaaggtttcaggctggttttgaactcctgacctcaagtgatccacccgcctccgcctcccaaagtgcgaggattacaggcgtgagccaccacgtctggcctgtattatcagacttcctgagaacactttgaaatcaactgcagttgtgacccatgtttataataacagacctggctgacggattttacaagagtgccttccacagaagtggtaatgtgacctgttgactttgtatctgcacgtgggcacgagtgatgttcagtttgctaggcactagtcatagtgttatggacgtggtggagtgtaaggtcttgatgaattacggcagtatgcagaaaaggaaccaaggccagagagacaaataatgcctcatgtcccactgctttaaaattacattaatttataaaatggccactatgggctctttttgactgtttctcggagtaggaacaaaataagacattaaatggtggcttgaagagaaagatacacattttcagaagaaagaaaggggagggctgcagggagcctgtcttggcgggagctctccagtctgttggattagcacagggacacgcttatggtgccatgacgccgaaactagtcatcccccatctccagcataggcaacggcctgcaggggtgagtgtcagaaaagacttactttggaagaaaagggtttttttttgtttgtttgttttttgtttttttttgtttgtttgttttgggtttttttcctgaaatttcctgatacctttttcagaatgtcacccttgtaaataggcacctaaagccaagttggtcagcagagctcctgaccacggctgcctctgcgtgacaaggacatttgcagctgcctttggaaggctcttcacattaaaaaacaataattatgtaagtgtgtttcatagcttgagtcaagctttcaaggatcactgctcctttgtgcattgtgcatccctttggggaaagaaacagaaaattattctctttctatagagtcaagcaattccagcagaagtgaagaaatgttagtttcccagaaatcgcagtggaatagaatacaatactgtgttaaccaactttctgtataaatgcatcagtattcccttacatatgtctatatattttataatagaactgttagtgaaaatgtgcttgtttaagctgggtcactatgcaagagttacttccagtagaatgtagtgaatgtaattccctagtcggatattagggatgctgtagacccaagttctacattccagatgtccgtgcctatagtatactggatttattcttcatgttgcttaaatgcagttagctctggagggggatagctgcatcccttacttctgtgactagcaaaggacaaagtcccagcgcacagaatatgaaaacataccctgtgttagccaatcaagttacagcaatgctgtcacaaagggagttttagaaaactggggagtcattgtccgtagacagccattttgatttaggaaacaggtgtattagcatgagccttaggtcatgaactgcttttaaagattgagtttgaatatgggatctgtccacgaggaagagaaaatggctttacctttaggacaatctcattgtggactgctttatttatattattagtaacgctgttttaagtgttattctttttattgtattttatttataaaaaatgcctttatatattgaaatatataaatatatatatataaacacacacacacacacacacacacacatatatatatatatatataattgcctttatatttaggcggtatgagttctccctaagcgtgagttggctctgccctgcacaggcacccaaacagtcctacctaatgtcacttcaccaggaaatgagaggacatggtacagtgtgggagacagcactaacacgtgctgaataactactgtgtaccaggcactgtgctcggtgcttgttactgttaactcatttaacccccacaactcatctacaaagttggcattaaaatccccaagtcactcagtgagccatgggacctgaatccgaacctagtttatctggagccataatctgggctcctcccatttttccatactgctttccaaaagcattgtggttcactctttggatggaaccagtcccgttccgtatgctgtgatctatccctgccgtggaattcctccgaggctccaactccgcagccagagaagctgctctctggcctccgcgggcagagctctgcttatgacttcgtcttccagaggtccacatttctccccttgacgccccctgtctaccacctccacctggaaatttgatctttactgtgctcagtgatcacgaaattggtcaagcctattcatgttccttctcatctagaattctgtgtgattgttttagcataaactgccccgctcccactgtatcatttcacgatctccttttaatgtttttctttcagttttgcactgacagtctggtgacaggtgctgccagggtgcaagttacattgcaatgttctaaaccttttgaagtgttcttagcaaaagcctttctttctgggtgtttttgtcgaatgagtctatgaagactcaatgcatccatcttgggctgatcatgccacagatctcattccagctatagtactgccaagaagtgaagtttatcattgaattttacctgtgttgctctcttttaaagtaatgactttgagatgcatgctttgtatcatattgaaaagtatgttttattttccttaaagttgtaatattgtgtgtgaaactgtacatattttaaatgatgtagctttggcaggttttatttggttgatatgattttatattaaaagagaaggctgctttcatatagcatagcccctgaaggtgggaatactccctgtttgtacaacgctgcttatagtttgtgattggggtgggcgaatgtcttcctctgaaattctttggaaccccccacccctgtcctcccctgaaactcccctgtgcacacccctctgttctgactgcagagatcaaggccctgaaggagcaggatcttgggcaagtgttttaggggacgctgagaacatacctgaccctgggggcgatgtggaggcaggcccacctcctcggggcaactttgcgtttccttggagggaagggaggtgggtaggagaggagcttgggaggatgaggaggagcggtcccgcctcacacattgtctatttttaccattaaccgagcgccacatgtttatgaacttcaggatagaaatttagcctccttgtgaaaacgttttgttttactgccctaagaaaatacacatctctaggcttgtctgaccagaaagccagcaaagtcttttgcatcgggtgtggcccttttgtattttatttcccatatttaaataagccttccttaaaccctagccccagtcctgagagctttgagggtagccgaaaccccttatctaataaagtctaactctgtgagaaccaca

SEQ ID NO: 13786 - DNA, 3063 bp, Homo sapiens
aaagggggcagtgactgcggctgggcgggagtccgggtcggcttggctgagcgggggcggtgctgggcagggcggcggccgctccctcccggactcccggcctcccggcctccctggtcccgcctgggaagggatgcaaggaagccctccggcgctgcgctccgaggcgggagacagcgtccccctccgcccctcgggtcctggcgcctcagagcccggcccaggccgcggaacggtgatgctcgggccggacgggcgggcgcggatccctgcgtcccgctgaaaatgtgtgtctgacatgcaagctcagtggggcagagacccgtggattgctgtgccctgccctccggacctggatcatgaaggtgttgggaagaagcttcttctgggtgctgtttcccgtccttccctgggcggtgcaggctgtggagcacgaggaggtggcgcagcgtgtgatcaaactgcaccgcgggcgaggggtggctgccatgcagagccggcagtgggtccgggacagctgcaggaagctctcagggcttctccgccagaagaatgcagttctgaacaaactgaaaactgcaattggagcagtggagaaagacgtgggcctgtcggatgaagagaaactgtttcaggtgcacacgtttgaaattttccagaaagagctgaatgaaagtgaaaattccgttttccaagctgtctacggactgcagagagccctgcagggggattacaaagatgtcgtgaacatgaaggagagcagccggcagcgcctggaggccctgagagaggctgcaataaaggaagaaacagaatatatggaacttctggcagcagaaaaacatcaagttgaagcccttaaaaatatgcaacatcaaaaccaaagtttatccatgcttgacgagattcttgaagatgtaagaaaggcagcggatcgtctggaggaagagatagaggaacatgcttttgacgacaataaatcagtcaagggggtcaattttgaggcagttctgagggtggaggaagaagaggccaattctaagcaaaatataacaaaacgagaagtggaggatgacttgggtcttagcatgctgattgactcccagaacaaccagtatattttgaccaagcccagagattcaaccatcccacgtgcagatcaccactttataaaggacattgttaccataggaatgctgtccttgccttgtggctggctatgtacagccataggattgcctacaatgtttggttatattatttgtggtgtacttctgggaccttcaggactaaatagtattaagtctattgtgcaagtggagacattaggagaatttggggtgttttttactctttttcttgttggcttagaattttctccagaaaagctaagaaaggtgtggaagatttccttacaagggccgtgttacatgacactgttaatgattgcatttggcttgctgtgggggcatctcttgcggatcaaacccacgcagagcgtcttcatttccacgtgtctgtccttgtcaagcacacccctcgtgtccaggttcctcatgggcagtgctcggggtgacaaagaaggcgacattgactacagcaccgtgctcctcggcatgctggtgacgcaggacgtgcagctcgggctcttcatggccgtcatgcggactctcatacaggcgggcgccagtgcatcttctagcattgtcgtggaagttctccgaatcctggttttgattggtcagattcttttttcactagcggcggtttttcttttatgtcttgttataaagaagtatctcattggaccctattatcggaagctgcacatggaaagcaaggggaacaaagaaatcctgatcttgggaatatctgcctttatcttcttaatgttaacggtcacggagctgctggacgtctccatggagctgggctgtttcctggctggagcgctcgtctcctctcagggccccgtggtcaccgaggagatcgccacctccatcgaacccatccgcgacttcctggccatcgttttcttcgcctccatagggctccacgtgttccccacgtttgtggcgtacgagctcacggtgctggtgttcctcaccttgtcagtggtggtgatgaagtttctcctggcggcgctggtcctgtctctcattctgccgaggagcagccagtacatcaagtggatcgtctctgcggggcttgcccaggtcagcgagttttcctttgtcctggggagccgggcgcgaagagcgggcgtcatctctcgggaggtgtacctccttatactgagtgtgaccacgctcagcctcttgctcgccccggtgctgtggagagctgcaatcacgaggtgtgtgcccagaccggagagacggtccagcctctgatggctcggagatgatggaccgtggaagggaagcgtctgtggggagtgagcgcttagatggccagcagctgctccttctgggaagctcgcaccttggcaacagaacagccctctagcagagcgtcagtgcagtcgtgttatcccggcttttacagaatattcttgtcctattttagaattttccggagtagtttatttgcagtctgttgattatgtgcagtagacccgggacactgcgttttaccgatcaccttgaatgtggtgcctggatgtgcctttttttttttttccctgaaattattattaattttctattgtgagttcatcagttcatagtttttttagtaaagaagcaaaattaaaaggcttttaaaaatgtacaacttcagaattataatctgttagtcaaatatttgttattaaacatttctgtaatatgaagttgtaatcctggccgtgagcttggaagcttacttttgattcttaaagcctatgttttctaaaatgagacaaatacggatgtctatttgccttttattgtaacttttaaatgaaataatttcatgtcaatttctattagatatatcacttaaaatatttggttttaaatcacaagaatatgtattctttaataaagataatttatgatcatggtaaaaaaaaaaaaaaaa

SEQ ID NO: 13787 - DNA, 2875 bp, Homo sapiens
agaactagtccgctcggcgcccagagcctcgcattacttcccctagctccgccaagcctcgctgcatacgcgcccgcgcgcagtccgccgtcgcgcccctatgacgtcacccacgcgccaccgcttccgggctggggactgggggcggggccgcgcggagggcaagccgggggcggggccggggccagagcagatctccgggcctccgcggccatagctgactgtgccgtcccttcccctcacccgctccacgccctcctgggccgagtggagttgggtggtgtcgggagcctctccctgaggggcaccgcggcttcaggagctgggcctccagtgcggcgcgatgtcaggcgcggtgacagctctgtgagtccgaggccgcggccgtggcgctgggcggctgcggggcctgaccggtccgctcatggtgccgccacgacgccatcgcggggcaggaaggccaggggtgctgagttcttcacctccttttagactgagatctgccaagttttccggcattgctcttgaggatctcagaagggctcttaagacaagactgcaaatggtgtgtgtatttgtcatgaaccgaatgaattcccagaacagtggtttcactcagcgcaggcgaatggctcttgggattgttattcttctgcttgttgatgtgatatgggttgcttcctctgaacttacttcgtatgtttttacccagtacaacaaaccattcttcagcacctttgcaaaaacatctatgtttgttttgtaccttttgggctttattatttggaagccatggagacaacagtgtacaagaggacttcgcggaaagcatgctgctttttttgcagatgctgaaggttactttgctgcttgcacaacagatacaactatgaatagttctttgagtgaacctctgtatgtgcctgtgaaattccatgatcttccaagtgaaaaacctgagagcacaaacattgatactgaaaaaacccccaaaaagtctcgtgtgaggttcagtaatatcatggagattcgacagcttccgtcaagtcatgcattggaagcaaagttgtctcgcatgtcatatcctgtgaaagaacaagaatccatactgaaaactgtggggaaacttactgcaactcaagtagcgaaaattagcttttttttttgctttgtgtggtttttggcaaatttgtcatatcaagaagcactttcagacacacaagttgctatagttaatattttatcttcaacttccggactttttaccttaatccttgctgcagtatttccaagtaacagtggagatagatttaccctttctaaactattagctgtaattttaagcattggaggcgttgtactggtaaacctggcagggtctgaaaaacctgctggaagagacacagtaggttccatttggtctcttgctggagccatgctctatgctgtctatattgttatgattaagagaaaagtagatagagaagacaagttggatattccaatgttctttggttttgtaggtttgtttaatctgctgctcttatggccaggtttctttttacttcattatactggatttgaggacttcgagtttcccaataaagtagtattaatgtgcattatcattaatggccttattggaacagtactctcagagttcctgtggttgtggggctgctttcttacctcatcattgataggcacacttgcactaagccttacaatacctctgtccataatagctgacatgtgtatgcaaaaggtgcagttttcttggttattttttgcaggagctatccctgtatttttttcattttttattgtaactctcctatgccattataataattgggatcctgtgatggtgggaatcagaagaatatttgcttttatatgcagaaaacatcgaattcagagagttccagaagacagcgaacagtgtgagagtctcatttctatgcacagtgtttctcaggaggatggagctagttagctgtctgttgtctgtagcccagcttgataatggaactatacagcgaagagacaatctctggcaagtttttgtagaaaaaatgtttcagtgcctagtctgaaaaataacagtttgagttctttgaaactctaaaatatatttttctcatacctgttttcttcattttcataatgaagcactttgctatgtagctgtgtacatatcactacagttataggaagtttcagtctacagtccatccaaaggaccaacctgccttacacatctcaaggaattcagctgttgaaatcatttgaactaatcaaggaataaatcctaatgttctgggactttattttcacatgttaaatgctggaatatattatgaaaatgttttcaagaaatcacttaagtgttcatagaccagtatttctgacaggtaaaatgctaaaataagctacctgtaataagtgtggattatatttttgggttttgtagaatattgcaaattaaccacacaaaaaatgtttaatttatgcaacaagcatgtttgtgcaaatttcatgggactttaaaaagaataagtatttgagaaaatatctggttcacttacactacatttactgtattattcttttatagcattaggtgccttgtattttaaatctgtgacaaaccatggcaaatttttaaaggggaagtattattataaaatgaagaaatatgtatttctaaaggctatattgctgtaaacttaattgataaagctctgtttaatttagagttttgaagaaatagtctcccttcaattaagaaattttcataatggaatgatttaaattgaagtgacaaagagtattattaaaatacaatgtttatacgtgtaaaaaaaaaaaaaaa

SEQ ID NO: 13788 - DNA, 5428 bp, Homo sapiens
gccctggccaaggaggaggctgaaagagcctgagctgtgccctctccattccactgctgtggcagggtcagaaatcttggatagagaaaaccttttgcaaacgggaatgtatctttgtaattcctagcatgaaagactctaacaggtgttgctgtggccagttcaccaaccagcatatcccccctctgccaagtgcaacacccagcaaaaatgaagaggaaagcaaacaggtggagactcagcctgagaaatggtctgttgccaagcacacccagagctacccaacagattcctatggagttcttgaattccagggtggcggatattccaataaagccatgtatatccgtgtatcctatgacaccaagccagactcactgctccatctcatggtgaaagattggcagctggaactccccaagctcttaatatctgtgcatggaggcctccagaactttgagatgcagcccaagctgaaacaagtctttgggaaaggcctgatcaaggctgctatgaccaccggggcctggatcttcaccgggggtgtcagcacaggtgttatcagccacgtaggggatgccttgaaagaccactcctccaagtccagaggccgggtttgtgctataggaattgctccatggggcatcgtggagaataaggaagacctggttggaaaggatgtaacaagagtgtaccagaccatgtccaaccctctaagtaagctctctgtgctcaacaactcccacacccacttcatcctggctgacaatggcaccctgggcaagtatggcgccgaggtgaagctgcgaaggctgctggaaaagcacatctccctgcagaagatcaacacaagactggggcagggcgtgcccctcgtgggtctcgtggtggaggggggccctaacgtggtgtccatcgtcttggaatacctgcaagaagagcctcccatccctgtggtgatttgtgatggcagcggacgtgcctcggacatcctgtcctttgcgcacaagtactgtgaagaaggcggaataataaatgagtccctcagggagcagcttctagttaccattcagaaaacatttaattataataaggcacaatcacatcagctgtttgcaattataatggagtgcatgaagaagaaagaactcgtcactgtgttcagaatgggttctgagggccagcaggacatcgagatggcaattttaactgccctgctgaaaggaacaaacgtatctgctccagatcagctgagcttggcactggcttggaaccgcgtggacatagcacgaagccagatctttgtctttgggccccactggccgcccctgggaagcctggcacccccgacggacagcaaagccacggagaaggagaagaagccacccatggccaccaccaagggaggaagaggaaaagggaaaggcaagaagaaagggaaagtgaaagaggaagtggaggaagaaactgacccccggaagatagagctgctgaactgggtgaatgctttggagcaagcgatgctagatgctttagtcttagatcgtgtcgactttgtgaagctcctgattgaaaacggagtgaacatgcaacactttctgaccattccgaggctggaggagctttataacacaagactgggtccaccaaacacacttcatctgctggtgagggatgtgaaaaagagcaaccttccgcctgattaccacatcagcctcatagacatcgggctcgtgctggagtacctcatgggaggagcctaccgctgcaactacactcggaaaaactttcggaccctttacaacaacttgtttggaccaaagaggcctaaagctcttaaacttctgggaatggaagatgatgagcctccagctaaagggaagaaaaagaaaaagaagaaaaaggaggaagagatcgacattgatgtggacgaccctgccgtgagtcggttccagtatcccttccacgagctgatggtgtgggcagtgctgatgaaacgccagaaaatggcagtgttcctctggcagcgaggggaagagagcatggccaaggccctggtggcctgcaagctctacaaggccatggcccacgagtcctccgagagtgatctggtggatgacatctcccaggacttggataacaattccaaagacttcggccagcttgctttggagttattagaccagtcctataagcatgacgagcagatcgctatgaaactcctgacctacgagctgaaaaactggagcaactcgacctgcctcaaactggccgtggcagccaaacaccgggacttcattgctcacacctgcagccagatgctgctgaccgatatgtggatgggaagactgcggatgcggaagaaccccggcctgaaggttatcatggggattcttctaccccccaccatcttgtttttggaatttcgcacatatgatgatttctcgtatcaaacatccaaggaaaatgaggatggcaaagaaaaagaagaggaaaatacggatgcaaatgcagatgctggctcaagaaagggggatgaggagaacgagcacaaaaaacagagaagtattcccatcggaacaaagatctgtgaattctataacgcgcccattgtcaagttctggttttacacaatatcatacttgggctacctgctgctgtttaactacgtcatcctggtgcggatggatggctggccgtccctccaggagtggatcgtcatctcctacatcgtgagcctggcgttagagaagatacgagagatcctcatgtcagaaccaggcaaactcagccagaaaatcaaagtttggcttcaggagtactggaacatcacagatctcgtggccatttccacattcatgattggagcaattcttcgcctacagaaccagccctacatgggctatggccgggtgatctactgtgtggatatcatcttctggtacatccgtgtcctggacatctttggtgtcaacaagtatctggggccatacgtgatgatgattggaaagatgatgatcgacatgctgtactttgtggtcatcatgctggtcgtgctcatgagtttcggagtagcccgtcaagccattctgcatccagaggagaagccctcttggaaactggcccgaaacatcttctacatgccctactggatgatctatggagaggtgtttgcagaccagatagacctctacgccatggaaattaatcctccttgtggtgagaacctatatgatgaggagggcaagcggcttcctccctgtatccccggcgcctggctcactccagcactcatggcgtgctatctactggtcgccaacatcctgctggtgaacctgctgattgctgtgttcaacaataccttctttgaagtaaaatcaatatccaaccaggtgtggaagttccagcgatatcagctgattatgacatttcatgacaggccagtcctgcccccaccgatgatcattttaagccacatctacatcatcattatgcgtctcagcggccgctgcaggaaaaagagagaaggggaccaagaggaacgggatcgtggattgaagctcttccttagcgacgaggagctaaagaggctgcatgagttcgaggagcagtgcgtgcaggagcacttccgggagaaggaggatgagcagcagtcgtccagcgacgagcgcatccgggtcacttctgaaagagttgaaaatatgtcaatgaggttggaagaaatcaatgaaagagaaacttttatgaaaacttccctgcagactgttgaccttcgacttgctcagctagaagaattatctaacagaatggtgaatgctcttgaaaatcttgcgggaatcgacaggtctgacctgatccaggcacggtcccgggcttcttctgaatgtgaggcaacgtatcttctccggcaaagcagcatcaatagcgctgatggctacagcttgtatcgatatcattttaacggagaagagttattatttgaggatacatctctctccacgtcaccagggacaggagtcaggaaaaaaacctgttccttccgtataaaggaagagaaggacgtgaaaacgcacctagtcccagaatgtcagaacagtcttcacctttcactgggcacaagcacatcagcaaccccagatggcagtcaccttgcagtagatgacttaaagaacgctgaagagtcaaaattaggtccagatattgggatttcaaaggaagatgatgaaagacagacagactctaaaaaagaagaaactatttccccaagtttaaataaaacagatgtgatacatggacaggacaaatcagatgttcaaaacactcagctaacagtggaaacgacaaatatagaaggcactatttcctatcccctggaagaaaccaaaattacacgctatttccccgatgaaacgatcaatgcttgtaaaacaatgaagtccagaagcttcgtctattcccggggaagaaagctggtcggtggggttaaccaggatgtagagtacagttcaatcacggaccagcaattgacgacggaatggcaatgccaagttcaaaagatcacgcgctctcatagcacagatattccttacattgtgtcggaagctgcagtgcaagctgagcataaagagcagtttgcagatatgcaagatgaacaccatgtcgctgaagcaattcctcgaatccctcgcttgtccctaaccattactgacagaaatgggatggaaaacttactgtctgtgaagccagatcaaactttgggattcccatctctcaggtcaaaaagtttacatggacatcctaggaatgtgaaatccattcagggaaagttagacagatctggacatgccagtagtgtaagcagcttagtaattgtgtctggaatgacagcagaagaaaaaaaggttaagaaagagaaagcttccacagaaactgaatgctagtctgttttgtttctttaatttttttttttaacagtcagaaccactaatgggtgtcatcttggccatctaaacatcatcaatttctaaaaacattttccttaaaaaattttggaaattcagacttgatttacaatttaatgcactaaaagtagtattttgttagcatatgttagtaggcttagttttttcagttgcagtagtatcaaatgaaagtgatgatactgtaacgaagataaattggctaatcagtatacaagattatacaatctctttattactgagggccaccaaatagcctaggaagtgccctcgagcactgaagtcaccattaggtcacttaagaagtaagcaactagctgggcacagtggctcatgcctgtaatcctagcactttgggaggccaaggcagaaagatagcttgagtccaggagtttgagaccagcctgggcaacatagtgataccccatctcttaaaaaaaaaaaaaaaa

SEQ ID NO: 13789 - DNA, 2032 bp, Homo sapiens
cgcggggcgcggagtcggcggggcctcgcgggacgcgggcagtgcggagaccgcggcgctgaggacgcgggagccgggagcgcacgcgcggggtggagttcagcctactctttcttagatgtgaaaggaaaggaagatcatttcatgccttgttgataaaggttcagacttctgctgattcataaccatttggctctgagctatgacaagagaggaaacaaaaagttaaacttacaagcctgccataagtgagaagcaaacttccttgataacatgcttttgcgaagtgcaggaaaattaaatgtgggcaccaagaaagaggatggtgagagtacagcccccaccccccgtccaaaggtcttgcgttgtaaatgccaccaccattgtccagaagactcagtcaacaatatttgcagcacagacggatattgtttcacgatgatagaagaggatgactctgggttgcctgtggtcacttctggttgcctaggactagaaggctcagattttcagtgtcgggacactcccattcctcatcaaagaagatcaattgaatgctgcacagaaaggaacgaatgtaataaagacctacaccctacactgcctccattgaaaaacagagattttgttgatggacctatacaccacagggctttacttatatctgtgactgtctgtagtttgctcttggtccttatcatattattttgttacttccggtataaaagacaagaaaccagacctcgatacagcattgggttagaacaggatgaaacttacattcctcctggagaatccctgagagacttaattgagcagtctcagagctcaggaagtggatcaggcctccctctgctggtccaaaggactatagctaagcagattcagatggtgaaacagattggaaaaggtcgctatggggaagtttggatgggaaagtggcgtggcgaaaaggtagctgtgaaagtgttcttcaccacagaggaagccagctggttcagagagacagaaatatatcagacagtgttgatgaggcatgaaaacattttgggtttcattgctgcagatatcaaagggacagggtcctggacccagttgtacctaatcacagactatcatgaaaatggttccctttatgattatctgaagtccaccaccctagacgctaaatcaatgctgaagttagcctactcttctgtcagtggcttatgtcatttacacacagaaatctttagtactcaaggcaaaccagcaattgcccatcgagatctgaaaagtaaaaacattctggtgaagaaaaatggaacttgctgtattgctgacctgggcctggctgttaaatttattagtgatacaaatgaagttgacataccacctaacactcgagttggcaccaaacgctatatgcctccagaagtgttggacgagagcttgaacagaaatcacttccagtcttacatcatggctgacatgtatagttttggcctcatcctttgggaggttgctaggagatgtgtatcaggaggtatagtggaagaataccagcttccttatcatgacctagtgcccagtgacccctcttatgaggacatgagggagattgtgtgcatcaagaagttacgcccctcattcccaaaccggtggagcagtgatgagtgtctaaggcagatgggaaaactcatgacagaatgctgggctcacaatcctgcatcaaggctgacagccctgcgggttaagaaaacacttgccaaaatgtcagagtcccaggacattaaactctgataggagaggaaaagtaagcatctctgcagaaagccaacaggtactcttctgtttgtgggcagagcaaaagacatcaaataagcatccacagtacaagccttgaacatcgtcctgcttcccagtgggttcagacctcacctttcagggagcgacctgggcaaagacagagaagctcccagaaggagagattgatccgtgtctgtttgtaggcggagaaaccgttgggtaacttgttcaagatatgatgcat

SEQ ID NO: 13790 - DNA, 2209 bp, Homo sapiens
ctaaatgaagagcgcttgggacctgaacaaccagcagcgatacccaggtacaaaggacctccagaccagagccagccagcagcaaaaagagcatggagctgaggagtacagcagcccccagagctgagggctacagcaacgtgggcttccagaatgaagaaaactttcttgagaacgagaacacatcaggaaacaactcaataagaagcagagctgtgcaaagcagggagcacacaaacaccaaacaggatgaagaacaggtcacagttgagcaggattctccaagaaacagagaacacatggaggatgatgatgaggagatgcaacaaaaagggtgtttggaaaggaggtatgacacagtatgtggtttctgtaggaaacacaaaacaactcttcggcacatcatctggggcattttattagcaggttatctggttatggtgatttcggcctgtgtgctgaactttcacagagcccttcctctttttgtgatcaccgtggctgccatcttctttgttgtctgggatcacctgatggccaaatacgaacatcgaattgatgagatgctgtctcctggcagaaggcttctaaacagccattggttctggctgaagtgggtgatctggagctccctggtcctagcagttattttctggttggcctttgacactgccaaattgggtcaacagcagctggtgtccttcggtgggctcataatgtacattgtcctgttatttctattttccaagtacccaaccagagtttactggagacctgtcttatggggaatcgggctacagtttcttcttgggctcttgattctaaggactgaccctggatttatagcttttgattggttgggcagacaagttcagacttttctggagtacacagatgctggtgcttcatttgtctttggtgagaaatacaaagaccacttctttgcatttaaggtcctgccgatcgtggttttcttcagcactgtgatgtccatgctgtactacctgggactgatgcagtggattattagaaaggttggatggatcatgctagttactacgggatcatctcctattgaatctgtagttgcttctggcaatatatttgttggacaaacggagtctccactgctggtccgaccatatttaccttacatcaccaagtctgaactccacgccatcatgaccgccgggttctctaccattgctggaagcgtgctaggtgcatacatttcttttggggttccatcctcccacttgttaacagcgtcagttatgtcagcacctgcgtcattggctgctgctaaactcttttggcctgagacagaaaaacctaaaataaccctcaagaatgccatgaaaatggaaagtggtgattcagggaatcttctagaagctgcaacacagggagcatcctcctccatctccctggtggccaacatcgctgtgaatctgattgccttcctggccctgctgtcttttatgaattcagccctgtcctggtttggaaacatgtttgactacccacagctgagttttgagctaatctgctcctacatcttcatgcccttttccttcatgatgggagtggaatggcaggacagctttatggttgccagactcataggttataagaccttcttcaatgaatttgtggcttatgagcacctctcaaaatggatccacttgaggaaagaaggtggacccaaatttgtaaacggtgtgcagcaatatatatcaattcgttctgagataatcgccacttacgctctctgtggttttgccaatatcgggtccctaggaatcgtgatcggcggactcacatccatggctccttccagaaagcgtgatatcgcctcgggggcagtgagagctctgattgcggggaccgtggcctgcttcatgacagcctgcatcgcaggcatactctccagcactcctgtggacatcaactgccatcacgttttagagaatgccttcaactccactttccctggaaacacaaccaaggtgatagcttgttgccaaagtctgttgagcagcactgttgccaagggtcctggtgaagtcatcccaggaggaaaccacagtctgtattctttgaagggctgctgcacattgttgaatccatcgacctttaactgcaatgggatctctaatacattttgaggtcagccacttctccagtggaactctgaagtacagatgct

SEQ ID NO: 13791 - DNA, 5607 bp, Homo sapiens
aattccgggcgccagtcccgctccgcgccgcgccgctccgctccggctcgggctccggctcgcctcgggctgggctcgggctccgggggcggcgtccccgccgccgggccccgggacgggcggcgacgctccaaccatggcccgtgcccaggcgctcgtgctggcactcaccttccagctctgcgcgccggagaccgagactccggcagctggctgcaccttcgaggaggcaagtgacccagcagtgccctgcgagtacagccaggcccagtacgatgacttccagtgggagcaagtgcgaatccaccctggcacccgggcacctgcggacctgccccacggctcctacttgatggtcaacacttcccagcatgccccaggccagcgagcccatgtcatcttccagagcctgagcgagaatgatacccactgtgtgcagttcagctacttcctgtacagccgggacgggcacaggccgggcaccctgggcgtctacgtgcgcgttaatgggggccccctgggcagtgctgtgtggaatatgactggatcccacggccgtcagtggcaccaggctgagctggctgtcagcactttctggcccaatgaatatcaggtgctgtttgaggccctcatctccccagaccgcaggggctacatgggcctagatgacatcctgcttctcagctacccctgcgcaaaggccccacacttctcccgcctgggcgacgtggaggtcaacgcgggccagaacgcgtcgttccagtgcatggccgcgggcagagcggccatgcgccaacgcttcctcttgcaacggcagagcggggccctggtgccggcggcgggcgttcggcacatcagccaccggcgcttcctggccactttcccgctggctgccgtgagccgcgccgagcaggacctgtaccgctgtgtgtcccaggccccgcgcggcgcgggcgtctctaacttcgcggagctcatcgtcaaggagcccccaactcccatcgcgcccccacagctgctgcgtgctggccccacctacctcatcatccagctcaacaccaactccatcattggcgacgggccgatcgtgcgcaaggagattgagtaccgcatggcgcgcgggccctgggctgaggtgcacgccgtcagcctgcagacctacaagctgtggcacctcgaccccgacacagagtatgagatcagcgtgctgctcacgcgtcccggagacggcggcactggccgccctgggccacccctcatcagccgcaccaaatgcgcagagcccatgagggcccccaaaggcctggcttttgctgagatccaggcccgtcagctgaccctgcagtgggaaccactgggctacaacgtgacgcgttgccacacctatactgtgtcgctgtgctatcactacaccctgggcagcagccacaaccagaccatccgagagtgtgtgaagacagagcaaggtgtcagccgctacaccatcaagaacctgctgccctatcggaacgttcacgtgaggcttgtcctcactaaccctgaggggcgcaaagagggcaaggaggtcactttccagacggatgaggatgtgcccagtgggattgcagccgagtccctgaccttcactccactggaggacatgatcttcctcaagtgggaggagccccaggagcccaatggtctcatcacccagtatgagatcagctaccagagcatcgagtcatcagacccggcagtgaacgtgccaggcccacgacgtaccatctccaagctccgcaatgagacctaccatgtcttctccaacctgcacccaggcaccacctacctgttctccgtgcgggcccgcacaggcaaaggcttcggccaggcggcactcactgagataaccactaacatctctgctcccagctttgattatgccgacatgccgtcacccctgggcgagtctgagaacaccatcaccgtgctgctgaggccggcacagggccgcggtgcgcccatcagtgtgtaccaggtgattgtggaggaggagcgggcgcggaggctgcggcgggagcgaggtggacaggactgcttcccagtgccattgaccttcgaggcggcgctggcccgaggcctggtgcactacttcggggccgaactggcggccagcagtctacctgaggccatgccctttaccgtgggtgacaaccagacctaccgaggcttctggaacccaccacttgagcctaggaaggcctatctcatctacttccaggcagcaagccacctgaagggggagacccggctgaattgcatccgcattgccaggaaagctgcctgcaaggaaagcaagcggcccctggaggtgtcccagagatcggaggagatggggcttatcctgggcatctgtgcaggggggcttgctgtcctcatccttctcctgggtgccatcattgtcatcatccgcaaagggaagccggtgaacatgaccaaggccaccgtcaactaccgccaggagaagacacacatgatgagcgccgtggaccgcagcttcacagaccagagcaccctgcaggaggacgagcggctgggcctgtccttcatggacacccatggctacagcacccggggagaccagcgcagcggtggggtcactgaggccagcagcctcctggggggctccccgaggcgtccctgtggccggaagggctccccataccacacggggcagctgcaccctgcggtgcgtgtcgcagaccttctgcagcacatcaaccagatgaagacggccgagggttacggcttcaagcaggagtatgagagcttctttgaaggctgggacgccacaaagaagaaagacaaggtcaagggcagccggcaggagccaatgcctgcctatgatcggcaccgagtgaaactgcacccgatgctgggagaccccaatgccgactacattaatgccaactacatagatggttaccacaggtcaaaccacttcatagccactcaagggccgaagcctgagatggtctatgacttctggcgtatggtgtggcaggagcactgttccagcatcgtcatgatcaccaagctggtcgaggtgggcagggtgaaatgctcacggtactggccggaggactcagacacctacggggacatcaagattatgctggtgaagacagagaccctggctgagtatgtcgtgcgcacttttgccctggagcggagaggctactctgcccggcacgaggtccgccagttccacttcacagcgtggccagagcatggcgtcccctaccatgccacggggctgctggctttcatccggcgcgtgaaggcctccaccccacctgatgccgggcccattgtcatccactgcagcgcgggcaccggccgcacaggttgctatatcgtcctggatgtgatgctggacatggcagagtgtgagggcgtcgtggacatttacaactgtgtgaagactctctgctcccggcgtgtcaacatgatccagactgaggagcagtacatcttcattcatgatgcaatcctggaggcctgcctgtgtggggagaccaccatccctgtcagtgagttcaaggccacctacaaggagatgatccgcattgatcctcagagtaattcctcccagctgcgggaagagttccagacgctgaactcggtcaccccgccgctggacgtggaggagtgcagcatcgccctgttgccccggaaccgcgacaagaaccgcagcatggacgtcctgccgcccgaccgctgcctgcccttcctcatctccactgatggggactccaacaactacattaatgcagccctgactgacagctacacacggagtgcggccttcatcgtgaccctgcacccgctgcagagcaccacgcccgacttctggcggctggtctacgattacgggtgcacctccatcgtcatgctcaaccagctgaaccagtccaactccgcctggccctgcctgcagtactggccagagccaggccggcagcaatatggcctcatggaggtggagtttatgtcgggcacagctgatgaagacttagtggctcgagtcttccgggtgcagaacatctctcggttgcaggaggggcacctgctggtgcggcacttccagttcctgcgctggtctgcataccgggacacacctgactccaagaaggccttcttgcacctgctggctgaggtggacaagtggcaggccgagagtggggatgggcgcaccatcgtgcactgcctaaacgggggaggacgcagcggcaccttctgcgcctgcgccacggtcctggagatgatccgctgccacaacttggtggacgttttctttgctgccaaaaccctccggaactacaaacccaacatggtggagaccatggatcagtaccacttttgctacgatgtggccctggagtacttggaggggctggagtcaagatagcggggccctggcctggggcacccactgcacactcagggccagacccaccatcctggactggcgaggaagatcagtgcctcctgctctgcccaaacacactcccatggggcaagcactggagtggatgctgggctatcttgctcccccttccactgtgggcagggcctttcgcttgtcccatgggcgggtggtgggccaaggaggagcttagcaagtctgcagcccagccccacctccatagggtcctgcaggcctgtgctgagaggcctggtgctgcctggcagagtgacaaaggctcaggacggctggctctgggggactcaggccaagccccttggcaccatcctggcttttggcagggatgagtgaggccctgcagagagcatcccaggccaaggttcccactcagcctgccccctctgcatgtgggtagaggatgtactgggacttggcatttaggattccatctggcccagcccctgaaggtcctggggaagcaggtctcaattctgaatagccagtggggcacactgactgtcctccccaggggaactgcagcgccctcctccccactgccccctgcagcccctgagatattttgctcactatccctccccacttgcttccctgatatgtgctctgagcttccctgaaccaggatctgcctattactgctgtgccccatggggggctccttccctgcctgacccactgttgcagaatgaagtcacctcgcccccctcttcctttaatcttcaggcctcactggcctgtcctgctcagcttgggccagtgacaatctgcaaggctgaacaacagcccctggggttgaggcccctgtggctcctggtcaggctgcccgttgtggggaggggcagtgttagagcagggctggtcataccctctggagttcagaggaagaggtaggaccagtgcttttttgtttcttttgttatttttggttgggtgggtgggaaggtctctttaaaatggggcaggccacacccccattccgtgcctcaatttccccatctgtaaactgtagatatgactactgacctacctcgcagggggctgtggggaggcataagctgatgtttgtaaagcgctttgtaaataaacgtgctctctgaatgccaaaaaaaaaaaaaaaaaaaaaa

SEQ ID NO: 13792 - DNA, 5618 bp, Homo sapiens
aattccgggcgccagtcccgctccgcgccgcgccgctccgctccggctcgggctccggctcgcctcgggctgggctcgggctccgggggcggcgtccccgccgccgggccccgggacgggcggcgacgctccaaccatggcccgtgcccaggcgctcgtgctggcactcaccttccagctctgcgcgccggagaccgagactccggcagctggctgcaccttcgaggaggcaagtgacccagcagtgccctgcgagtacagccaggcccagtacgatgacttccagtgggagcaagtgcgaatccaccctggcacccgggcacctgcggacctgccccacggctcctacttgatggtcaacacttcccagcatgccccaggccagcgagcccatgtcatcttccagagcctgagcgagaatgatacccactgtgtgcagttcagctacttcctgtacagccgggacgggcacagcccgggcaccctgggcgtctacgtgcgcgttaatgggggccccctgggcagtgctgtgtggaatatgactggatcccacggccgtcagtggcaccaggctgagctggctgtcagcactttctggcccaatgaatatcaggtgctgtttgaggccctcatctccccagaccgcaggggctacatgggcctagatgacatcctgcttctcagctacccctgcgcaaaggccccacacttctcccgcctgggcgacgtggaggtcaacgcgggccagaacgcgtcgttccagtgcatggccgcgggcagagcggccgaggccgaacgcttcctcttgcaacggcagagcggggcgctggtgccggcggcgggcgtgcggcacatcagccaccggcgcttcctggccactttcccgctggctgccgtgagccgcgccgagcaggacctgtaccgctgtgtgtcccaggccccgcgcggcgcgggcgtctctaacttcgcggagctcatcgtcaaggagcccccaactcccatcgcgcccccacagctgctgcgtgctggccccacctacctcatcatccagctcaacaccaactccatcattggcgacgggccgatcgtgcgcaaggagattgagtaccgcatggcgcgcgggccctgggctgaggtgcacgccgtcagcctgcagacctacaagctgtggcacctcgaccccgacacagagtatgagatcagcgtgctgctcacgcgtcccggagacggcggcactggccgccctgggccacccctcatcagccgcaccaaatgcgcagagcccatgagggcccccaaaggcctggcttttgctgagatccaggcccgtcagctgaccctgcagtgggaaccactgggctacaacgtgacgcgttgccacacctatactgtgtcgctgtgctatcactacaccctgggcagcagccacaaccagaccatccgagagtgtgtgaagacagagcaaggtgtcagccgctacaccatcaagaacctgctgccctatcggaacgttcacgtgaggcttgtcctcactaaccctgaggggcgcaaagagggcaaggaggtcactttccagacggatgaggatgtgcccagtgggattgcagccgagtccctgaccttcactccactggaggacatgatcttcctcaagtgggaggagccccaggagcccaatggtctcatcacccagtatgagatcagctaccagagcatcgagtcatcagacccggcagtgaacgtgccaggcccacgacgtaccatctccaagctccgcaatgagacctaccatgtcttctccaacctgcacccaggcaccacctacctgttctccgtgcgggcccgcacaggcaaaggcttcggccaggcggcactcactgagataaccactaacatctctgctcccagctttgattatgccgacatgccgtcacccctgggcgagtctgagaacaccatcaccgtgctgctgaggccggcacagggccgcggtgcgcccatcagtgtgtaccaggtgattgtggaggaggagcgggcgcggaggctgcggcgggagccaggtggacaggactgcttcccagtgccattgaccttcgaggcggcgctggcccgaggcctggtgcactacttcggggccgaactggcggccagcagtctacctgaggccatgccctttaccgtgggtgacaaccagacctaccgaggcttctggaacccaccacttgagcctaggaaggcctatctcatctacttccaggcagcaagccacctgaagggggagacccggctgaattgcatccgcattgccaggaaagctgcctgcaaggaaagcaagcggcccctggaggtgtcccagagatcggaggagatggggcttatcctgggcatctgtgcaggggggcttgctgtcctcatccttctcctgggtgccatcattgtcatcatccgcaaagggaagccggtgaacatgaccaaggccaccgtcaactaccgccaggagaagacacacatgatgagcgccgtggaccgcagcttcacagaccagagcaccctgcaggaggacgagcggctgggcctgtccttcatggacacccatggctacagcacccggggagaccagcgcagcggtggggtcactgaggccagcagcctcctggggggctccccgaggcgtccctgtggccggaagggctccccataccacacggggcagctgcaccctgcggtgcgtgtcgcagaccttctgcagcacatcaaccagatgaagacggccgagggttacggcttcaagcaggagtacgagagcttctttgaaggctgggacgccacaaagaagaaagacaaggtcaagggcagccggcaggagccaatgcctgcctatgatcggcaccgagtgaaactgcacccgatgctgggagaccccaatgccgactacattaatgccaactacatagatattcggataaaccgagaaggttaccacaggtcaaaccacttcatagccactcaagggccgaagcctgagatggtctatgacttctggcgtatggtgtggcaggagcactgttccagcatcgtcatgatcaccaagctggtcgaggtgggcagggtgaaatgctcacggtactggccggaggactcagacacctacggggacatcaagattatgctggtgaagacagagaccctggctgagtatgtcgtgcgcacttttgccctggagcggagaggctactctgcccggcacgaggtccgccagttccacttcacagcgtggccagagcatggcgtcccctaccatgccacggggctgctggctttcatccggcgcgtgaaggcctccaccccacctgatgccgggcccattgtcatccactgcagcgcgggcaccggccgcacaggttgctatatcgtcctggatgtgatgctggacatggcagagtgtgagggcgtcgtggacatttacaactgtgtgaagactctctgctcccggcgtgtcaacatgatccagactgaggagcagtacatcttcattcatgatgcaatcctggaggcctgcctgtgtggggagaccaccatccctgtcagtgagttcaaggccacctacaaggagatgatccgcattgatcctcagagtaattcctcccagctgcgggaagagttccagacgctgaactcggtcaccccgccgctggacgtggaggagtgcagcatcgccctgttgccccggaaccgcgacaagaaccgcagcatggacgtcctgccgcccgaccgctgcctgcccttcctcatctccactgatggggactccaacaactacattaatgcagccctgactgacagctacacacggagtgcggccttcatcgtgaccctgcacccgctgcagagcaccacgcccgacttctggcggctggtctacgattacgggtgcacctccatcgtcatgctcaaccagctgaaccagtccaactccgcctggccctgcctgcagtactggccagagccaggccggcagcaatatggcctcatggaggtggagtttatgtcgggcacagctgatgaagacttagtggctcgagtcttccgggtgcagaacatctctcgggaggggcacctgctggtgcggcacttccagttcctgcgctggtctgcataccgggacacacctgactccaagaaggccttcttgcacctgctggctgaggtggacaagtggcaggccgagagtggggatgggcgcaccatcgtgcactgcctaaacgggggaggacgcagcggcaccttctgcgcctgcgccacggtcctggagatgatccgctgccacaacttggtggacgttttctttgctgccaaaaccctccggaactacaaacccaacatggtggagaccatggatcagtaccacttttgctacgatgtggccctggagtacttggaggggctggagtcaagatagcggggccctggcctggggcacccactgcacactcagggccagacccaccatcctggactggcgaggaagatcagtgcctcctgctctgcccaaacacactcccatggggcaagcactggagtggatgctgggctatcttgctcccccttccactgtgggcagggcctttcgcttgtcccatgggcgggtggtgggccaaggaggagcttagcaagtctgcagcccagccccacctccatagggtcctgcaggcctgtgctgagaggcctggtgctgcctggcagagtgacaaaggctcaggacggctggctctgggggactcaggccaagccccttggcaccatcctggcttttggcagggatgagtgaggccctgcagagagcatcccaggccaaggttcccactcagcctgccccctctgcatgtgggtagaggatgtactgggacttggcatttaggattccatctggcccagcccctgaaggtcctggggaagcaggtctcaattctgaatagccagtggggcacactgactgtcctccccaggggaactgcagcgccctcctccccactgccccctgcagcccctgagatattttgctcactatccctccccacttgcttccctgatatgtgctctgagcttccctgaaccaggatctgcctattactgctgtgccccatggggggctccttccctgcctgacccactgttgcagaatgaagtcacctcgcccccctcttcctttaatcttcaggcctcactggcctgtcctgctcagcttgggccagtgacaatctgcaaggctgaacaacagcccctggggttgaggcccctgtgctcctggtcaggctgcccgttgtggggaggggcagtgttagagcagggctggtcataccctctggagttcagaggaagaggtaggaccagtgcttttttgtttcttttgttatttttgggtgggtgggtgggaaggtctctttaaaatggggcaggccacacccccattccgtgcctcaatttccccatctgtaaactgtagatatgactactgacctacctcgcagggggctgtggggaggcataagctgatgtttgtaaagcgctttgtaaataaacgtgctctctgaatgccaaaaaaaaaaaaaaaaaaaaaa

SEQ ID NO: 13793 - DNA, 7259 bp, Homo sapiens
cactagaatgtgaaggatcttcgcggttctgggtgcccagaaaggcggcgacgcggcggatgacaacattaggccgcgacgcgctcctggccaggcggcggctgtagtgttagctttggacgccgcagtagccgctgccggtagcaagccgactgagggaaggtgggggtccgcccgggctggtggacctcggggccgaaagttcccgccccgctcgggggctgagccggcagtgcctccgcggccgctgggcagcgcccttcgtccaggctcgcgccccagctgccgccgacgacagcggccgagagaagttggggtctgactagacgcttacggggcctcggaccccggcgccgcggcgacctcggaggaaccggctccttgcgtcccgcctccctgggagctccgcacgggatttgcagatttacagaatggctgcacattaatggaaagagaagcataaacctatcttctttcattatggagggaggtttggcagatggagaacctgatcgaacttcgcttcttggtgatagcaaagatgtccttgggccatcaactgttgtagcaaacagtgacgaatctcagcttctgacaccaggaaagatgagtcagcgccaaggaaaagaagcttatccaacgccaaccaaagatttgcatcagccatctcttagtccagcaagtcctcatagccagggttttgaaagagggaaggaagatatttctcaaaataaagatgaatcttcactttctatgtcaaagagcaagtctgaatctaaactttataatggctcagagaaggacagttcaacttcaagcaaactcacaaaaaaagaatctcttaaggtacaaaagaaaaattaccgagaagaaaagaaaagagccacaaaggagctgctcagtacaatcacagatccttctgttattgttatggctgattggttaaagattcgtggtactctaaagagctggaccaagttatggtgtgtgttgaaacctggggtgctactgatctataaaacccaaaaaaatggtcagtgggtaggaacagttcttctgaatgcctgtgaaatcattgaacgtccatcaaaaaaggatggcttttgtttcaaacttttccatcctttggagcaatctatttgggcagtgaagggtccaaaaggtgaagcggttggatccattactcaacccttacctagcagttatttgatcatccgagctacttcagagtcagatggaaggtgctggatggatgctttggagttggctttgaaatgttctagtcttcttaaacgtacaatgatcagagaaggaaaggaacatgacctgagcgtttcatcagatagcacacatgtgactttctatggcttactacgtgctaacaatctccacagtggtgataacttccagttaaatgatagtgaaattgaacgacaacattttaaggaccaagatatgtattctgataaatctgataaagaaaatgatcaagaacatgatgagtctgataatgaggtgatggggaaaagtgaagaaagtgacacagatacatcagaaagacaagatgactcatatatcgaacctgagcctgttgagcctttaaaggagactacctacactgaacagagccatgaagaacttggagaggcaggtgaggcttctcaaacagaaactgtatctgaagaaaacaaaagccttatctggacactattgaaacaagtccgtcctggcatggacctatccaaggtggttctgcctacatttattttggaaccccgttctttcctggataaactttcagattactactatcatgcagatttcctatctgaggcagctcttgaagaaaatccttatttccgtttgaagaaagtagtgaaatggtatttgtcaggattctataaaaagccaaagggactgaagaaaccttataatcctatacttggcgagactttccgttgtttatggattcatcccagaacaaacagcaaaactttttatattgctgaacaggtgtcccatcatccaccaatatctgccttttatgttagtaatcgaaaagatggattttgccttagcggtagtatcctggctaagtctaagttttatggaaactcattatctgcaatattagagggagaagcacggttaactttcttgaatagaggtgaagattatgtaatgacaatgccatacgctcattgtaaaggaattctttatggtacaatgacactggagcttggtggaacagtcaatattacatgtcaaaaaactggatacagtgcaatacttgaatttaaactaaagccattcctagggagtagtgactgtgttaatcaaatatcagggaaacttaaactgggaaaagaagtcctagctactttggaaggtcattgggatagtgaagtttttattactgataaaaagactgataattcagaggttttctggaatccaacacctgacattaagcaatggagattaataaggcacactgtaaaatttgaagaacagggagattttgaatcagagaaactctggcaacgggtaactcgagccataaatgccaaagaccaaactgaagctacccaagagaagtatgttttggaagaagctcaaagacaagctgccagggatcggaaaacaaaaaatgaagagtggtcttgcaaattatttgaacttgatccactcacaggagaatggcattacaagtttgcagatacccgaccatgggacccacttaatgatatgatacagtttgaaaaagatggtgttattcagaccaaagtgaaacatcgtactccaatggttagcgtccccaaaatgaaacataagccaaccaggcaacagaagaaagtagcaaaaggctattcctccccagaacctgacattcaagactcctctggaagtgaagctcaatcagtaaaaccaagtacaagaagaaagaaaggaatagaactgggagacattcagagttccatcgaatctataaaacaaacacaggaagaaattaaaagaaatattatggctcttcgaaatcatttagtttcaagcacaccggccacggattattttctgcaacaaaaagactacttcatcattttcctcctgattttgcttcaagtcataataaacttcatgttcaagtagaagttctctaccattgaatcagtgaactagaaagatctgatttggcctgggaccagtgttcaagttggtttggtctttattaaaaatcacaatattccgaaaacaaaaaaacctaggagataaatgtagaggtattgacttttcgtatcttttatcttcacactgaaacaagagctatcctatttgattattaaagtgagctatgtgttaagtgccaggacatttctagcttttgtgagaatgtgtctacatatgagtataataaacccacatgtatacacaattgtctcttatgtactcctacctgacagtagtctttgtattctatagtatgttctgagatataatgttaacattgttcataacaaaaaatgctatcaatcttataaatatatgtaatctattttcttcataaaacaggcacaaaagttttatcagtaaggaattacagattgagaaatgatggaataatagacataattaattcaatacactactgttaaaatcatttgcaaagcactcagctcaattatcttcttagaaagaaagaaaaagtatgaatggtcaaaatgaatacatcgagagagataaatggcaaattgcttttttaaaagtttacataagttttttttaacccctagaatttaatatttgtagatgcaggtaaatatatatacttacgtgtatatcagtataaaaacactggtgtgcaattaattggattgattataataccaccttaagcacttgctgaaaaaagtgtggtcaaaattgattgctgtccttttgtcttatttttgtttttcttaagtcagctggttcataacataggccaaattctagagatgtttatagagcatttgaagtgctgataatttatgttttttcattatgaaaacttattttagctttagactccagtgtgttcagtgaataagtagaatataaaaaaatataaccagtattttacttcaaaagccaaaaagaggcaataagaaaagacactttgtggtggcctttatgtgtgcattaaaattggtttctgtaaaacgtgtaataagttgagtatctacgaagagtatcaagttctgaagtttaatttttttattatcctcctctcttcttagtaacttctttctgtggcaaaaccacaattctttaagattcctattgttcaggctaaggcaaatttttttgtttgtttcttcagtttaatattttgattttgtgtttttacgtaaatatttatattccttgaaagcaatttttgccaaggtagttcagtttaggaatatgttgttctaaaatatgtcttagaatcctgaaagcatagattttgaaatgtttttttaatgaaaatgaaggtcagagagaataattgccctgaccacatttgcctttcagtaggaggaggctgtgaaatagtaaaattataatcgtttatgccatgataaatacaagattggtaaataaatacattgattggtaaattatgagaatcaaaatgataaaaagagcctgcttttttccctaaccaatatagctatcttaagtatccttaggtttctgtgaagaaccatttcccatgttttcttggcaaaataatgctgtattccatatgtacatgtgaaatgatgttttaaattgataaaagcttaaataagatctacctatacccagtattttcatgatattagaacaaatgggtttttggttatattttatatttgtcaatataatttttgtattcacattctgttacactctgcctattcattgatatatgatattctgtaaatattgtacaatttgatcttttttatggtttaaattagttaattacatacaaattgattggcttatcacaaaaatcatttcatcagtaaaccttgttaacattttgtactggtgacccacctcttaggactttggtcttatccacgtgtatgttgttttcatttggtccaaataatattttatttgtatgggtatcttctaagactaaataggtagttgtgttctttatttttaaaatttctttttagagcaaatgttatgggttcttacccaaagagtcaaaaactatttcttaagaaagagcagagttattcatgactgttctttatacactaaaagcatgcatctaatctaatagtcctcttattatgcttttagttgtatgagtctctttctatgaactgaacacaaaactcaggaattggtggcttaattttagatcagtgcttgtactaggcttagttatatgaatctttataacacataattactaactttgtagccatatatgtaattgactttgaatgttatttacctgaaattaatcttccttcacacatggaccgtaaacggttcccagttgtctgagagcctcatgagggtttctaggatttatgaccttatgaccagtttttttcatttaccaagattttattttcctacatgaaaatttaattgagtaataattattcacatgtgcattttctttttagctgttaaatgtactatgccatcatccaccatttagtaaaatgtagctggcccaggacatgtaaaaaaaaaaaaaaaacaacaacaataaatagggcatgtgaaatgttaagttacagcaatagatattttatttgtatttcatgttagtacttttttgttttatatcacttataaaggtacagtgtactctttgtcacagctcagttggtaaccgcattccattgaaaagttggccttgtaaaatacaactctcatttaatattcatgcttttgtgcctttaagaaaatattttttgtcattttttgtgttacagaactataatgtgattcaaggtgtttataggcttgtcataaaagggtcatttctgtgtgttactttctttttatatagctatagtatatttaaacaataatactatcttttataggggtttgtctatttacctattctttactcagacattgatgtagacttgtcagattattctgagtattgttaacagtgccttttcgatggaatcacactttttggctgtcaccttgtgccatatacacacaaaattttgtggaaggcagttttaactttctgaagaatatctgtcaaaatttaagaaaacaaatgtataaaattccattttttccagtgtttagcatttctagtaagcagtgaggttgtttgacatacagtgatgatggcattattgataagccatacatgagactgcagattatattgaatcatattaaatgtacagaaataaaatattagatttatatcaaattttccaatttgaaccagtggggaaaatcccacagaaatcagtaagtttacatttcaatttctatcttatttgactaagtggaaagagattctttaaaatgtataacctgccattatgtaatttggtttcattttattctacctgttgtgtgagtttagtatatttaatttactttttgttactctttacatactgtttatttttgttagtttttaattgaagatggactgttgaaattgtataggaccagtgtcttattaatatgattaatatatttagaagagccacgtgaaacccatgacaaaatgaatgtgaatattctttctaaaaatttagaaaatgttatctttttgcatttattatgtaaaactgttttacagtatcaaaatttttcacttaaagaaaaaaaatgccatgaaacatttgaactgatgagccacagaacttcagttgaaatttttttcactttttagcatgctaaatatacatctgagtttaaatgttctgtttaatggccattcataaattcaagcactaccactggtcagttttgtgtgatagaataaaaatatgttacctgcagtgtaagtacagcacactgtcaaattcttttccttaaggtgcacagtaaatgtacagatagttataggccactgttttgtaatgtagtacatttctaatctattattcctaacctattataactgtttgcagaaagaaaagaatttttctaataatctgtaaaattatgctaacttctacaagtaggcttctaaataaaatttttaaaaagagcaaaaaaaaaaaaaaaaaaaa

SEQ ID NO: 13794 - DNA, 5168 bp, Homo sapiens
gccttggtcattggaccggctcccaaccaaaaccacaccatagggttttctgctcttggccaacccaacatgagaaaagaggaattaaatggtcctactaataagaaagcctcagcgtagcattaagggacgtagcaggtcttctggccacactcccctacaaatgtggaaagctcattggtgaaaacagttctcaggggtcaaagcaaaggaactgatctgggtaaagtagaggctgcctgatcccaatcagacatcctcacctctcaataacctttgccatttctctgccatagagtgaaagtgtccccaggccaaaagcccagggctccaggctgccatcaggatggtgggtgaaggaccctaccttatctcagatctggaccagcgaggccggcggagatcctttgcagaaagatatgaccccagcctgaagaccatgatcccagtgcgaccctgtgcaaggttagcacccaacccggtggatgatgccgggctactctccttcgccacattttcctggctcacgccggtgatggtgaaaggctaccggcaaaggctgaccgtagacaccctgcccccattgtcgacatatgactcatctgacaccaatgccaaaagatttcgagtcctttgggatgaagaggtagcaagggtgggtcctgagaaggcctctctgagccacgtggtgtggaaattccagaggacacgcgtgttgatggacatcgtggccaacatcctgtgcatcatcatggcagccatagggccggtgattctcattcaccaaatcctccagcagactgagaggacctctgggaaagtctgggttggcattggactgtgcatagccctttttgccaccgagtttaccaaagtcttcttttgggcccttgcctgggccatcaactaccgcacggccatccggttgaaggtggcgctctccaccttggtttttgaaaacctagtgtccttcaagacattgacccacatctctgttggcgaggtgctcaatatactgtcaagtgatagctattctttgtttgaagctgccttgttttgtcctttgccagccaccatcccgatcctaatggtcttttgtgcggcgtacgcctttttcattctggggcccacagctctcatcgggatatcagtgtatgtcatattcatacccgtccagatgtttatggccaagctcaattcagctttccgaaggtcagcaattttggtgacagacaagcgagttcagacaatgaatgagtttctgacctgcatcaggctgatcaaaatgtatgcctgggagaaatcttttaccaacactatccaagatataagaaggagggaaagaaaattactggaaaaagctggatttgtccaaagtggaaactctgccctggcccccatcgtgtccaccatagccatcgtgctgacattatcctgccacatcctcctgagacgcaaactcaccgcacccgtggcatttagtgtgattgccatgtttaatgtaatgaagttttccattgcaatcttgcccttctccatcaaagcaatggctgaagcgaatgtctctctaaggagaatgaagaaaattctcatagataaaagccccccatcttacatcacccaaccagaagacccagatactgtcttgcttttagcaaatgccaccttgacatgggagcatgaagccagcaggaaaagtaccccaaagaaattgcagaaccagaaaaggcatttatgcaagaaacagaggtcagaggcatacagtgagaggagtccaccagccaagggagccactggcccagaggagcaaagtgacagcctcaaatcggttctgcacagcataagctttgtggtgagaaaggggaagatcttgggaatatgtgggaatgtgggaagtggaaagagctccctccttgcagctctcctaggacagatgcagctgcagaaaggggtggtggcagtcaatggaactttggcctacgtttcacagcaggcatggatctttcatggaaatgtgagagaaaacatactctttggagaaaagtatgatcaccaaaggtatcagcacacagtccgcgtctgtggcctccagaaggacctgagcaacctcccctatggagacctgactgagattggggagcggggcctcaacctctctggggggcagaggcagaggattagcctggcccgcgctgtctactccgaccgtcagctctacctgctggacgaccccctgtcggccgtggacgcccacgtggggaagcacgtctttgaggagtgcattaagaagacgctcaggggaaagacagtcgtcctggtgacccaccagctacagttcttagagtcttgtgatgaagttattttattagaagatggagagatttgtgaaaagggaacccacaaggagttaatggaggagagagggcgctatgcaaaactgattcacaacctgcgaggattgcagttcaaggatcctgaacacctttacaatgcagcaatggtggaagccttcaaggagagccctgctgagagagaggaagatgctggtataatcgttttggctccaggaaatgagaaagatgaaggaaaagaatctgaaacaggctcagaatttgtagacacaaaagttcctgagcaccagctcatccagactgaatccccccaggaaggaaccgtgacctggaaaacatatcacacgtacattaaggcttctggagggtacctcctttctctcttcactgtgttcctcttcctcctgatgattggcagcgctgccttcagcaactggtggctgggtctctggttggacaagggctcacggatgacctgtgggccccagggcaacaggaccatgtgtgaggtcggcgcggtgctggcagacatcggtcagcatgtgtaccagtgggtgtacactgcaagcatggtgttcatgctggtgtttggcgtcaccaaaggcttcgtcttcaccaagaccacactgatggcatcctcctctctgcatgacacggtgtttgataagatcttaaagagcccaatgagtttctttgacacgactcccactggcaggctaatgaaccgtttttccaaggatatggacgagctggatgtgaggctgccgtttcacgcagagaactttctgcagcagttttttatggtggtgtttattctcgtgatcttggctgctgtgtttcctgctgtccttttagtcgtggccagccttgctgtaggcttcttcattctgttacgcattttccacagaggagtccaggagctcaagaaggtggagaatgtcagccggtcaccctggttcacccacatcacctcctccatgcagggcctgggcatcattcacgcctatggcaagaaggagagctgcatcacctatcacctcctctactttaactgtgctctcaggtggtttgcgctgagaatggatgtcctcatgaacatccttaccttcactgtggccttgttggtgaccctgagtttctcctccatcagtacttcatccaaaggcctgtcattgtcatacatcatccagctgagcggactgctccaagtgtgtgtgcgaacgggaacagagacgcaagccaaattcacctccgtggagctgctcagggaatacatttcgacctgtgttcctgaatgcactcatcccctcaaagtggggacctgtcccaaggactggcccagccgtggggagatcaccttcagagactatcagatgagatacagagacaacaccccccttgttctcgacagcctgaacttgaacatacaaagtgggcagacagtcgggattgttggaagaacaggttccggaaagtcatcgttaggaatggctttgtttcgtctggtggagccagccagtggcacaatctttattgatgaggtggatatctgcattctcagcttggaagacctcagaaccaagctgactgtgatcccacaggatcctgtcctgtttgtaggtacagtaaggtacaacttggatccctttgagagtcacaccgatgagatgctctggcaggttctggagagaacattcatgagagacacaataatgaaactcccagaaaaattacaggcagaagtcacagaaaatggagaaaacttctcagtaggggaacgtcagctgctttgtgtggcccgagctcttctccgtaattcaaagatcattctccttgatgaagccaccgcctctatggactccaagactgacaccctggttcagaacaccatcaaagatgccttcaagggctgcactgtgctgaccatcgcccaccgcctcaacacagttctcaactgcgatcacgtcctggttatggaaaatgggaaggtgattgagtttgacaagcctgaagtccttgcagagaagccagattctgcatttgcgatgttactagcagcagaagtcagattgtagaggtcctggcggctgattctagaggaggaagaggctctgtgagatgaataggaggagtcttcaggaggaggggctgtcctctccgcaggcagccctggtcttcagcccctcccatccacggagtgagctggggctgaagttgtccccactgccatactcagtccatgtcaccccacttggtgggcttggggttggttctgggtggtgaaccggggcagacccagctaatggattaaaaaactgcccttcacctcccaaatccccaagggttcctcatgtgttttcaccaaaaccaccccagtgcctgagattgaaaatattgtaactttcagttagaaatcagccacaataaacaacatgggaaaatgccttaggatggagtttgcaaggtttccttgcccattatcagaaggaaaaagagcagaattttcttctcgtttaaccccactcacttccatcttgactgggtgacaagtggtaatgacacagatttgtagcgtgaaagactgaatacagtgtttggccaaaaatttttttaaaaatcatattatatgtttcaattgatctgttagaataaccaagaaaacaaaatgctggagtttctctataaatgacacttttatatcttctttattcgtcgttaaaacgcggtaggaaattaccctgaaatgtcgccttgcaattatttcactgaagatattccaatttccatactatttcctccaatagacccttgttgcct
